United States Patent Application Publication US 2014/0230087 A1 - sequence listing, part 19

SEQ ID NO: 12922 - DNA, 4433 bp, Vitis vinifera
  Intron number 1 from transcript GSVIVT01016973001 (locus G SVIVG01016973001) derived from phytozome v7.0 (chr-ID chr9 ; pos 3091995 to 3096427 reverse strand)
attcgaaaactgctcagaaaagttctacgagtaaggtacacaagttagtgcttcgaggtgctctttgcaattttttttctttagatgcttatttaaatgtgttcatcatgagtgtcaccagtcatttcaaataactcaattttgttgttgctaagggttcttatcttgtttttcccctcattttctatatcacataaataatttatttctgttattttcaatttttttatatttcatgtacatataaatgttacagtcatgatcatgtacacattttgtcttaagtagactgctaattttgtatgttttaccaacttgcctgtttatatggcattgggcagtgatggtattatcatgttgttttctatgtggaagctcatgcagcaattcaattagttgccatcttttaggataatggattgtttctcctaaaatacatataatatcaactgaaatttcatgagcattatgatcaattgtatttattttgtacataagtgcttagattttactaacacgaggcaaaaaagccgcatagcatacagggagtatataaggcagcaaaggcctcacaaccaaaaagagacaaaaaactcaccaacccttaaatggaggctaaccactccaagaatcctataagggagcgtgactccactccactatacaattttgcccaaccccacacattacaaacaaaagaattcttaagtttctgcatagctaactcccctccccccccccccccctaaaagctaatctattcctctccttccaaaccgtccaaaaaataaacaacggaatagatctccaaatttttttcctctttttacccacaaatgagcccttctagctaagtataacctccttaacagtttctggaaaaacccactgggcaccgaacaaaccaaggacaatctcccacagtactctagccactgtacaatgaatgagcaaatgatttacattttcctcttcgctaccacataaaaagcatcgattaggaagctgccaccctctcttttgaagtctatcaaggataagaacctttcctcatgcggcttcccacgcaaagaacgctagtttagttggaactctatccacccaaatgccatttttggggaaagggagacaatggggttgatcagcaagctatatgcattcttaacaccaaactgcccattttttcctcccttccaagagactgagtcttcctccaaggtaatcctttggccccttaaggcttggagtaattcacctaccaagtccaactcccaatcgttgaagtctctgaaaaaccttaaatttcagcctccttgaccagaattctggtcccacattcctcccactatgccgttcctatgggcagccacggcatagagctgagggaaccttagggacaactccacatccccacaccaaggatcagtccagaatctaattctggtgccttttcccacattgaaaaccatattatcccaactcctatcagattccttcagaatttccttccatacccctacgcgaaacgccccatttgccttcttagtcctccacccaagttcctcttgcccatatttcgccataagcacttgctttcatagctcgtctcaggcccgcgcaaatctccaaacccattttccaagcaaggctttattcaaggggactagcttcctcaatccaagcccccccttctccttacccgcacacaccctttcctaattgactaagtgggcttttctttccatatttccccctccccacaagaagtctctttgcaacttttctagctttcttgccactatcttaggcatacggaaaagggacaattgatacaaaggcatactagccaacatactctttatgagggtgattcttccaccttggagatatactgtcgtttccaaagggcaagtttccacctcaccctctcttccaccccatcccacacggaagaggccttattgggcacccccaagggcagccccaagtaggctaagggtagctaacctaccttgcatccaagctccacagccatctcaagtatctcttccacctcccctactagaataatttcacttttagccagattaatccttaaccctgaaacaacttcaaaccaacataaaatccagctcaagtaggtcatgtattccttctttgcctcacaaaacactattatgtcatccgcaaagagaaggtgagaaatattggcaaccggcccactaccccgccagatgttgcacccagaaatgaaacccccttccacagccctcctaataagaacactcagcacttccattcccatgacgaacaagtatggggatagggggtcgccttgacgtagcccctttgagctagagaaaaacccagcagacactccatttaccagaactgaaaacttagcagttaagatacaactccacatccagtccctccacttagacccgaaccccatttttggcaatacccttatcaagaaatgccaattaacgctgtcatacgccttctcaatgtccaatttacaaattaggcctttctctccccttttttgctaagaatcgatcacctcatttgcaattaaggaggcgtccagaatctgcctacccatgacgaatgcattctgatatggggaaaccacttttccaatcacttttttaatcctattggccaacaccttggccaataatttgtacagccccccaaaagactgataggtctgaaatcccccagctcctccgtccctccttttccgtgtttacctatcaaaaaaaaaagaaaagtgcttagattttactttggatatgatgaagcctcttatgctttgcagattaaaatttccctgatattgtcatcttaatttgtatctagtgagaaaaaagttgttctgcttttgaaccttttgtgatcaaaataacagtttctgtattgattgagattcttgtatagataagctacctcttgtcgtacccatttgcgatttctattgcctatagtaaatgtagaatgggttagagctggttttgaggtcatctttgagaatgatttggtaagtctagctacccatcacagtatcacctttcattttgtgaagaaggtagaatttgtttaggtccttgtcttagaccatccatatgggaattggcattttgttccatagtaccaaataccaaaaaaattgaaaaattgaagggtggagggttgtatgtatatgcttttgtaagccattgaggtctgacacaagtgctaaaggattggggagggtttgtgggggattccaagttcaagtcccaatggggacaaaaatttacctataaaaaaaaataaaaatgtacatgcttttggaagtatcaaatttaggtttctgtcctaaatgcttgatgtcttaaaactttagagtcatctttatgttttgtttgcgtttaaagaagcaaatttaggctcactttagccctgtttggtgttacgttcgtaggtttgatagcccaaaatatgatctaaaactcttttttcactacttgtttttgtttataggttttttattttattttattttttagttttgtagaaagcaaacttgattggtgccaggtattaccatctctactggttgtagtcttcaaataaaaaaaaaagggtttgggccattagggactaaaggtcttactcaagttaaaataaatagtcaagtggactaagaacaaataaggcaactgagctgcaaattccaaataaacattgaactcaaattggaagatcaatatcatattaggttgcattgctcctggaattctcaaaagaggctgcagttagcttatgtttcaagaaaatgtgcaatatggaaatctgtggggtggtctggaaagactttcttttttggatgattctgaaaatttacagctgaggctggaaggagatgggtctaccctttcagttctatgaacaaacctgaccagtcatcatcatgacttgcaaaagacccattgtaaagcagtattttattctttttctggatccttggctgtgtcattcaacttcagaactagcggtgactctcctacctcagttttaagtttgtcttccttctggatccatgaccatgagaatcaacttcaagatttactgtgactgtccaaattgagcaattgtttatggtttccagattcttaaaacaaagatgtgtttgagtcatctgtttttctttaaaatctccaatttcctccataatgagaagttcgtatctcttgcttcctcttatccgtgcgaagcatcaaaccattcggatgccattggttgtcctgattttctcaatcacacagccctttactttcgtacttatcaatgagaattttgttgaatgagtgtactctctctctctcttatatgttttttgatactcaggtttccaaaacttacaccaaagctgaaatttcttt

SEQ ID NO: 12923 - DNA, 501 bp, Vitis vinifera
  Intron number 10 from transcript GSVIVT01026421001 (locus GSVIVG01026421001) derived from phytozome v7.0 (chr-ID chr 4; pos 23751309 to 23751809 reverse strand)
aagtttacccccattttcttttgggaaatcttagggtaagcatatatagcatcctcttttgtagatttacttattttaataagaaaccctctgtattttccacatttaaaatcatatgttactttcttctgatgtcaaaagatggaaaagatgaaatgccaaaaccacgttttcatctactcttgtggatgatagttgagccagtctcagaagctttattaatctacagtgagacctggaaacactattgcttcagaatataagagtttgtttcatagtaattttaggaagtggtttttaatttttctaacacttaaaaacactctttttataaaaaaattcttaatgttagaaaaagtagaagcattttctaaaattactatccaacaaattctaagtaattttatgttatttaaatatctgaataacatttttctttgaagtcttattcatggtgcttttctctctcagatctcatttacctttaccagcattcagtgc

SEQ ID NO: 12924 - DNA, 2018 bp, Vitis vinifera
  Intron number 1 from transcript GSVIVT01032521001 (locus G SVIVG01032521001) derived from phytozome v7.0 (chr-ID chr1 4; pos 28055228 to 28057245 reverse strand)
cttccgattccgccgccccctattccttctgcaaagtatatatccatttctcggcctttctccattccatttctaatgttttcgcattgctttgtgcccttgtataggatatatttgaatttcattttggtaaccatatgttatgagaatttgattatgctgatggttattttacttttaggtcaaaagtgcgatttttagttgtggatggactgtggaacattgctcaattccttattttttggattaaattccgaggggtagtattctgatgactttcatactgattcagtgggttttctcatgtttcgaatgctatgtcatctcggccttgtcccaatctgttacacccctttcctctcaattctatcattaggccttgaatggatgaatgaatctgtggttagtgttcagccacatcctccttattataagccatggatgtcaaagcctagcatgtatgtaaggcgtcatcaaggcaactgaggaaaagggtgtattggagaggagctgaattggtgttcatgggtttttctttgttgggtttatctcttctgtttatgggtgggttggtcatgcggtggatactttcaatgttctgagagggcattgtatgtagtgccatacttcatttttatggctggcataattctatttagcctttaaccatacaccgtgctgtggtgatttttgtagtatatgcccatttttaatggatttctcatatctctttctagattctctgcattttttttttcttggatagggaacctcttatttcccctctctctccaacctttttccatccatctgtataattaagcacttcaggcaattttttctatgaagatttacttttacaagatcagttcaggtcaagctattttcattttacaaatgaaatcaatttgttgttgtgattaacctaaataccttttcctatcatttatatatatgatgggctgggggtcaactcgtggcagcaattgctactcagttggtagttccacttttctggtcaaatctacgggcattatggtccattaaaatgataaaagaatcttgaaattcactactcttattagttaactcttcttggataatttattcgtaacagctaattgtgatttcagtttcagtttcataataacctagcatattttctatttttattctgccaaaaatctaggtttgttaatgtctctgtagcaaattgcttttgttggacctttttttctctcactttgtttgtttttgaaatatatatgttgacagattataatatctaggctcattatttgtagatatcgccttctagaactactatataatattcttcattaggtcttgcgtctttttaaaactctctagtatgaatagggcatcatttttcatatccattgatgtcttgtgaaaattctcttcgacaatttctcaaaattcttgaggtgtggtgtttgttcctctcctttgagtccccccctccttctcctgtttgcctataaaaaaatcatttctagtttgagtcagtagttcctgagagtataaggcatagtctgtttgtttccgtgttgtctcttattgttttggattcaaggtatattttgtttattatgatttgatatgaaactgataaagtgcagtcaagcaaactttatgtatattttttgggagtggggaagaatgtacataggtgatagctatttgtccatgttggacttcattgattggttgagctcttagtgaggcggaggcgttttttgtgttatcctttagtgttgtttggccttttggctcctttgtatacaactttgcttgcccttttgttagacgctattaatattattctatctttgcctaccacaaagaagtgcagtcaagctgcagttgagtggggcacatttttttactgtgtcagcactcttaagttgctagaattgcatgtgcacacctcttaaatcatttgtggaatttggtgtggtgtattatatttcattgaatctttttctggttgtagg

SEQ ID NO: 12925 - DNA, 1889 bp, Vitis vinifera
  Intron number 6 from transcript GSVIVT01035664001 (locus G SVIVG01035664001) derived from phytozome v7.0 (chr-ID chr4 ; pos 3130080 to 3131968 reverse strand)
ggttatattgcacaaatagcttgacaagagatttttcttgtttagatttgatgcttggtgagaatggtgacaaagcatctttcgtttctccaaaaaatatccagaaaaagaactccagaccttgcatggaagacaaagaaaatttgagttgtgcacctgaaagaaaaaaagaatggagaaatgatgctgcactttccaaccatgcaattccagggatgaactttgatcgaagttgtccctcagacaagatagagaaaagttccaatgttcttgctgctgaggctaaagttgatgctgatgctgctgtcaaagttgtgagttcaatttttttggcattagttttgtatacatcaaattgatgctgactctatagttatttacttgcctgaattcttttatcaaatgataatgtttatgataggtagaattccctaatcacattatgaagaatttctcttcatatgggggtcaaactgtttccattaaatcagccttcatattgggtttgtatgcaatttattctgaattgttttctaactaccttgttaacattttttctgctctagtcagtatcttggaatttttgatatattaaatatttaaatacacacacacacacacacacgcatatgtgtgtgtgtgcgtgtagaactgaatgagtccttgaaaaggacgtggctgaatgaatttgttgactgtttggagtccagctctcgtagtggaacctttctttcccagggccctgtaagcctttctgtcctgctttgatccctctacctattgatctaaaccctgctaaaaaatatgcttcaaatgcctctttgatttttcaaaaagaaagtagtagtcttacctggtttcacagtgcagatactcctttgaatccttatgtattatgcatatgtgtgcgtgtgtgtgtgtgtgtgtgtggtaagtacttacctatgtatccatggcaacaataccaaatagcaagtggatcggtattgctgcccatcctgtctgtatgattctctaaatcaaatgtttgcttaaaaggaataaggacataaggatcgattttacaaaaagaagaacaaggatataatgatcagatgacttttaatatcatattaatgtatgatttggctttcacattataaattggagtggggcatctattttacgcctgatgagacatgggttattttctcaggtgaaacaatcttctggaatccttgttgaagacaagaatgacctttcatcattctctcctgatagagttgtacataaaatgaacagagttctatgtcctagtgctagaactccagaaagtccaaattctagacagttggaggagattgttcattctgaattcttatctggaaattcctccttttctgttattgtctctccaactgctcatggaaagaagaatggtagttgttcaggttcagttacacctgtcaaatctgctccttcattaactccactcaagatcatgtctggaagctctgggagtgatgctggtattgacagcatgtaagtttggaaaatcttttccttctgctattttttcattatacttgttgagtatatagcattcctatcatgtgagcgagttttattaagttaaactgtaggagatgctctattacataaagaacatttcttttgttgtatatgagggcaccattctgtgaaattggacaatttaattttagttctatccatatttagaagttgatttctcataaatcgtatgttcaaacttagaatgtctgttgattaattgtctctcttctcttctattactaagacaatatcagttgcccttgattatctcttatgatttgcatggccaatttcatccaggttctgtgaaactccttacaaaagaggaagtgaat

SEQ ID NO: 12926 - DNA, 2326 bp, Vitis vinifera
  Intron number 7 from transcript GSVIVT01024208001 (locus G SVIVG01024208001) derived from phytozome v7.0 (chr-ID chr3 ; pos 267755 to 270080 reverse strand)
atcactgaggtatgcattattcttttggttgaactttctgaccatcatctctatgatttcttttgggaagctttgaccatactgcaacttgatttctcattaattttgctttttattttctttggggtgtcaattttttatgtttgtgcttttcttaagaaccttgttgattcttttgtctagttagatgatgcacttactatgataagtatgtttcctcgtgtgattcaaattcatagatgaatattaatgatataaattagcccttttatcattgaatgaggattccaatcttcaatttcagctctttgattgatcaaacacctcctgtactatgggctatagccccaacaccgcaagttctctgaccatcttatttcattagaagattttcgaatatttacataaaatttcagctttctctcaaatcaggtagttttggatggttgacattatattcatgtgatgatagttgggcaatggtccaccctataaggtgatcaggcatttatgcagtatgcatccaagctctgaattgtggttgcttcaggatcacctgtttaataagcctactgtaaactctgagaggttatgtagattacatatctgtgtatgacattgagaattattcctttaatttgatattctaacttcagatcaacaagaatagtaaatcaactgacaaaggaccagtttacactaaaagtggttttatttctagttaggattaaaacttagtcttgctagaagattaaaggactcgatggtccagttgtagacgaatttccaccatttttatgcagtggctgttagtgctggttggagttaatattgctcatttagtcaataataattgctgtagagacacttctaacttctaactaactgggggatgattaaaaatagggagtgagtgagctggtttgactgtggattagagggtgattggtagatcaacttaatgacttaaagtgacttaataacttaattttaagttattaagtagattaaacacatttggtaaaataacttaatatcacaacttaaaagttaaaaatgattttaagtattaattcaaaatagttaacttattcttaatcccaatttttttttttttgtcttatttgcccacatctatgactccaaattcataattcactttttctagtaaatattttaagcttatcttacaaatctataatacttttaagtatagatgtttaataaacaaatttattgcttaaaattaatgaaaataaatattagttaaatttttaattataaacattaattacaactaacggggtaaatatgtcaattcaataacttaaaataaattttaagttaattttaccaaacaacttaatacttaaaataaaaaataagtaataagttttaaattaacagcttaaaaacaatttaatctaaagttaacttaagtcattaagtaataattattaagttttaccaagtacccacttaattatctgtttgacttttggagtgatgtactcttcccatagcatcattctcagaaaattcaggataatcatttcatagcaggtggtcctgacactttcaaacctacaataatgatgcagtattatggtaaaaatcatagtatgtaccacatgatatggtcttcgcatgatcctcacctcatttaaattcaggatgatcatctgatggcagttggtcgctactatcaagtatcagcatagaaaggtgaagctgtactactgaccacccatgtagatattatgacattttgttgatatggacacaaggacataaattaatttgtggttcatgggttttcctggtttttttactcaaggatgagtaagaaaggatggtctttactggaagagtggaattcaaatgcacatcatattcccttgaaaagtatcatgcataggcaagcttgcctatgattaagaatatgttgctttctctttgtgcattctcatgatattcttactatcatgagttcattctcttttctcaggtatctattctgtgcattgagatctcttttcttcagtcaaaatagttgaattatgtgcaatgacatctcttttcttgtcaatcaggcatgccacatcaatttcattcatgctacactacaaactcctttttccttgtattgttcatcaatatttgactcttttcatattacattgcagttctttggagattgccttattacattccttgtatagctgtgtttcttgtgtaacatttcgacctttatgatttgaaatgatatctgtatccacttcaaattttaggtttcaggaagactgtcagagctaaagaccacaat

SEQ ID NO: 12927 - DNA, 7447 bp, Vitis vinifera
  Intron number 1 from transcript GSVIVT01022048001 (locus G SVIVG01022048001) derived from phytozome v7.0 (chr-ID chr1 4; pos 3776777 to 3784223 reverse strand)
tcagttttcctctatatctctaccttcccttctcagttttcttggctccctccatgcccaagagagctttaaatgctttgtttctgacactgtttcttaggttttgctttattttatttttcttttctaggattgttggtgggtgtttctgaaacatgtggggttctattatttgcctcctcaacaaaagcatttctcaaattttgtttttttttttaaatcttcgggaatgagatgggtttgtaaaaccgagcagttcatgtcgtcctgtacttcaccatttcacaattttttgtagttggtttacttcaaattagtgatgaatacaagggtattggtttggttagtgaatggatgttaattcaactattgatttacggggaaagatgggatatgggaatgggttctatgagtcagagaagttcaatttagatgccaagtggttggtccatcctaagctattgttcattggaccgagaattggagaaggtgctcatgccaaagtgtatgaaggaaagtataagaaccaaaatgttgctattaaaattgttcacagaagagaaacactagagcagattaaccaagtattagaatggcccacttcttaaccagccaaaaatggccccaccaacccctttatatctttcccatttttgcattggccatgcatggccacccttctagtgcaccacccaatgaccacatctcatcctttttttaattcttcattttttgatatcaaagtttaattttccaacattccaattttcaaaacttacattttcaaataattttccaaaattccaattttcaaaaattatattttcaaataattttccaaaattccattctcaaataattttccaagattccaattttcaaaacttccattttttccaattttcaaatttagttttcaaaacttccattttcaaataatttttcaaaattccaaatttcaattttaatttccaaaacttccattttcaaataatttttcaaaattccaattcttaaatttaattttcaagatttccattttcaaataatttccaaaactccaattttcaatttaattttcaaaactccaatttttaagtttaattttcaaaactttaatttttcaaaatttcaattttcaaataattttcaaaacttcaattttcaaaatttagttttcaaaattttaaatttaatttttaagacttcaattttcaaataattttcaaaattccggggttttcaaataattttaattccatcctagggcccatttccgcatgagaatgcatggccaccctcagcatgcaatctcaaaggccacatgtcctcatctttttaatccctcacacttattttcaaaattctgtctttcaaatggttttaaatcttttaaatttatttattaatttgtttattcatctaatttaaataattaatttatttatcttttatctaattatttatttattttattattttacttttatttatttatttgttattattattattattattattattattattattattattattattattttcttatttctttctttttcttttcttcattaaaatcctaagtcaccaaaacctaatttttaataaacttgctgccatattttattcaggcatgcatcttgtaattttctttggtttttaataattttcacatttttcactatttttaataagtatgaacgaattttcataactccagaaacaatgaaatttatgagattaattcatgcaaaatcaattgggctttggtggggggcctacatatgagttttatcttctaattgtcaactgctatacttaatgaatattgtttgatctttgtcctacactttgacatgcatgtactaattttatcattatgaactaaccttatttccatgatagcatattcttattttctgctaaggtacactcccactcctatttcatttatttattcgttctcatgttcgatttgtttaattatttgatcatttcattggtatcaattaatttccttatcaattgtcatacttgtctcactttatttagtagagaccttattatagggcttaaaggggtattatgactcaccatcgtaccttctcaataggtaacctgactccccaacccgattttggttttccataaactgtctttttcaaataaggagtcacacttaaggttttctttcttattttgtataaataaaacaaaaataagtggcaactccaagtattttctaaaaatcatatttttcatcaaataaataaaaaaatgagtcacatcattgagtgggaatgtatattgcaaaatacagggtccacgacctcatttcttaaaatatttataatatcatttatcatatttacatttatatcatttattatatttgtccttattttttgaaatatttataataatactattcttggtgtttacaactgtgctacattatgtttacgacaatgtaaatgaattgtatcacaactatgctactcactatttccaagataattgtgtgtatttctaatttatttttaattcaaacattcaataataatagtcatcgaataaatctcaataattttttctaagttttaatttttttattatcattaatcatcttgtaattttcatgatagtaaaatttatagaaagggaaaagtcatatattttgacttttttttttcaagtaaaaacattagtaaataagtaaaaaattaaaaataaattgacgtttagtagcaaattgcattcaacattaagttaacttaaaatttattataagtcatcgacacacattaattttaattaatatttatcctaactgattttaacttattttcattttcattaatgttaaaattatagatgcataagattactttaatatatttattataaaaaatgagtcacaaatgtgaaattataatttcaaaatatactcactagtgtggacaaattaggtaaaaaaaaaattgagattaaaaacaaatcaactattttaacttaacacttaaaagttaaaaatggtttttagttataatttactttaacaagtatacttaatctacttaattacttaaattaaatagcctataattgttgtctggttacataaccaaaacatgagtttttactaggaaaggactccatccaagtggaggtagccggttgtataactcttgctcattctcctcttatgtgcaacccctatgacaacagagagcaagcagttgtgttatggcttgctatttcaatgctagcacactattctaatgttgatgtattttttaatttttttccaggggtgtttgcaattgggccatgcattaaatggatccttggggcccttgagccaaatgggctctactgagtaggcctctgctgggtttttgtggagccccttccatcctcccacttggtttgctcacaaatgaaggtggtgtttaatttcagcttgaccctcaagaaaaatcagtttacaaagtaaaactttcttctgttttttatatttttttttatccaagctatgattaatttttttcttccacttcaaagcccatcattaacctaaacaaattgtcaacaaagaggttagattgatcaaagattatataaggatatcactacatatatatatggattctcaataaataaattttattgagaataagttatttgtatacaaatattttaaaattaataaagatggatcaaaagaaactcttaaaacatttgtcatcaaagtgctatatgcgcaaaatgtgtttcaaaccattaatatataatgcattttcaattatggaggggatgctattaaccatgattccaaaggccaatgctcatttcttttaaatttcctaaaattgtagcatatcctcgtttcttcttacatgaatatctacaaagcaaattatgttgccttaggtacccataatttcgtttgcaaattgcaatatctatcacaaaatataagacaacacaacacaaacatggacattcataataatataaatatataccaacaactccaaagatatacatatgcgtcaatagctgacatcccaggctcaattacataatactaatccattattagctaggatgaccttagacacaataaaagaagaagagaaagtactcatcatataaaccaattacataatattaataatccattattaggatgaccttagacaataaaaaaagaatagaaactcatcatgcaaaccacttttgctgacatcttctatggtcctccaattctggaagaattgaaattggaaacaatgaattgtgtgcacaagtgaatgcatgagttagaagaaaaaaataaaagcaatcacatattgcaatttgcaaccaaggttagtaatacgtggaagcatgcataaaaatagtttttatccatccattactagaaaagtgtacgtactctgtgcatgcatacatgtgtgagatggaggttctacaacaatgtaaaggtagtgattagagtggtgatgaatcacacacaaattataaaatggggatttgtaaatataagtgagaattttgagcctcggttagttgggaaaaaaataaaataaaataaaaggcatgttgtagacccccgtttggggctggttttctcacgtttctacaggttgctttctttgcaggtggagggttctcgaggagccacgtggcgattcatggttgaggaagccagctgcatggggggacacctcccatgaagctccatgcacggacgtgtggtgagcaccagcagctcgcccatggtggtggttggagaggatgacatcttccctggatgaggcacagtgaagaaggtgatggcttgtagagaaagccagttgcaggaggtcaggggggaggtttttgagtttttcagagatattttgggaggagagttagggagagaggggaaggcgatcgctaagagagcacccttttgagagggattccgagctgaatatttacccgggacggagcagtgagttacggcccaaaaacacccagctgaggaagagactttcaggtttgattactatggtttccacgtatgttttcattcttcatgcctttcatatctcattctctttggttttcttttaattccgttagttgggttgtggtggttcagtgatttttttttggtttaatgtttgaagaacttgccgtcttttacgctctgttcttgtaaatattctctgttttttttaactcactgattgctgaacctctaaaaaaaaaatgatgaaatgggtccaacgtgattgttaaaggcttcatattcttttcctgttgttactctttgattcctctgttttcctctgaacgtgcattcaagactgtaaagttgggagaaattggattgaaggtaaacctagtagtttatggtgagttggttgctgagtctaagttcttgctttgattcgtcctggaggaatggtattcctgtaagagatggctcatctctcttccttgtggacaaaagctggaattgtatgaacaagggtgattcgtggtagaattccatagaggtcgaaatatgaaaggagattgttgcagccactgggtcttgcaagaatttattcgccattgggattattcttgagggttgaattccgcttgatatggaatcccaagtttctgagacgccatggttcgaagaccatgtatgtttatgatatctcaaactgctgggagtgttctttattgtaaatgatgtataccgatgggccattatacagtcgaatctttttaatagagatcaatgtatcaactatagctaaagagccatctgcccagcacattccaggtctcactgctatggttcctgcctttgtgcatgcgaggggaaagattgtccctccaaaagcaatattgaaactattggttccaaccttttcatcagcatcccgaccagcaattctttttgttgtgaaccttgagttggtggaaccctcagtagccatatcaaaaccacagcacattggcgattcatatacgaccttctcgaaaaacgtgaagatgcttggcacacctgaggagatgaatttaattcagagtgattcctcaaatttacagtcagaggccatcccactaattgattcactgaactcctttcaggaatttgcaaagcttaaagatcagtgtgtggttcttattagggacctgaaattgattgggcttggactagagaacaaaggtgacatgtctgggtcctgctctgaacagcattgtgaggagccgctgaaggaacctaaccccctctgcagtacgcataggggttctgtgcatgattatcttcaggcatataagaggctcattgcgaacatggccaacctttattccaatatccattattccgcttcagcatcacagtcatttgcactcttcccatatcactaatcacacacctatgccttctcgccacctttcaaacctcatacctcaccatacccatatcgacacccacgaacccatttcttccaccatcctaccaccttcctatccaaccttcaagcctcatcaaatccattcccatttccatttccatgcttccatcattcattttctttcatcgcccttcatcacccaccaatacccaacttactcattttctttttcaccaccttttctctctctacaccacatccatctccaatgctcattccaccactcaccaccctccatcgcaaccaccatactcgtgtcgtgctcattcccattggaatcccaaagtcacctacccacatgcatgagaaccatgcgcgcatggccatccccatggccacttctactcactactaaacccgtaagcccatttctctctaaaccctctcatacccatcaaacacctccctcgccgttcattatccattccaccaaaaccatacccataaccccatgcatttccgtttttcccatacccccctaagcctacctttctcatctttctctcattacccgtggccacacttggccgctttcatacccaccacctttctcacctcaccacccttccatccttcacgtcctccacctagctcgttcctcattccttttccttcattttctccccgtgtatgaatctccacacatgcatgggaaccatgcaagcatgaccacctttcataccgatttttctctcactacccgtggtcgtggtcatgctttcgtacccatcccatgcacatggccttccttcactcatccccatccttcaaacccaccaatcacacccattttccatgcccattatacccattcccctcactttcgcatggccatgcatagccatgcatggccgcctccttttcatacccatctcctcaatctcgctgctcacttcttcacatccattaccatacccacttggggtgctgaagaacttggtctctggtgccaagagaggcttctctga

SEQ ID NO: 12928 - DNA, 6864 bp, Vitis vinifera
  Intron number 10 from transcript GSVIVT01035293001 (locus GSVIVG01035293001) derived from phytozome v7.0 (chr-ID chr 4; pos 137288 to 144151)
gttgttccaaggtttttgacatttttttcctacagattataatagtgtaaacttattgtccgtctctgaacagattaaagatggtaagcaaagatgtttgatgggttgtagcctctcaaacattttttcttgtgttgaagagtccatgcagtaattttttttttttttttttgataggcaaaatagaatgtatattaaaagtatctaagaggaggcatagcacagtgcacatgaagtacacaaaaaacacccagtataggcgaaaatgttaaaaaacaaaaaacccctctccttactttaagatcaaccaatctacaaaatccaatatagatgttgtatggtcctctatatacaccctaacctaattcacaaaagttttgataatataagatttggttgcttggttgaaccgctcaacgtcattaaaagtcctttccttcatgttttttttccgtttttttccaacaaaagagccatgtcaacctaatagattccttctaacggaagaatgtatcacccaaactactccaaaaagagaataaatcaaattttacaccattcttgctttggaacattgtagaagcaagtggtttgacgtttccttttcacctttgcacaattaacacttatttgggagagtctaacccctctttttaagctggtcaagagttagaattccatcccaagatgcttcctaggcaaagaaattgatcttcactggtcactacactagctaggaagactctcctatatctcctagaaaaggaagaataaagggacctaattgaaaaattgccgctcttggattcattctaattgagtttgtcctccacttctcttttaattaacaacaactattatttccaaaagaaaatctccacttcatcacgctcctaatcattaaattgtcttgaaaaacgggggctccaaccacccccttccctaacctgctcccatgcctctatcactcatctatctttattagaagcaaaagagaataagttcaggaaggtttcttccaatgttagatcctcacaccacgagtctttctagaatttaatctttctcccattcccaactgaaacgcatgacttgttttttatcccctcccatttgtttttgatggctttttacacccccaatccattcctgtctattgccttcttgaacgttacccctcttcctcctctctgaacttctctattatgatttgctttcataaggattctttttttatataagatctctaattccacttaccaagcaatggcttgtttaagacaaagaaagtaagatttgattgaaatttgtttctttttctataaggttaacttgacttacttcctgatttatttcctgtaattaggggctgattaagcaactaatttctttcatgtaactagtgactaatttagtggaattgttctaggcgtaaaatagagtaacttccttttcctttttccattgttaagattataaatgggctgtaaatttacctagtgaatatgcaaatattatttggaaatcattctctatttttatggtattagagccttgcacttagtaagtccaaaacgcattttttgatttcctttttcttttgatgtatgccctcattacagtaatctcatctccaatcagatgacaaattttgatgcctcttgcattgttactcaaacaaccataaacacaaaaaatccagtcttaatcctaggataactccagagtcttctgcacacacttaaactgaatggagggaattacctagagtggtcacaattgacaaaaatgtacctaaaaggaaaagggaaatcgaatcatttactcaggttagagatgagtaaggaagacttgaaattcaataatggggatgaggaagattctcaaataatgtcttggttaaggaactcaatgcagttggagattagtagaacttatatgttcctctctatagtaatagagatttggggggccattcattaaacttatttaaaggttagagatgctactcagagttattaacttgagactagaattcataggaattctaaacagggtaatcttttagtacttgaatgctacattgttagatcggtatcgatatttacaaaatagagtatgaaaaagatggcacaatgtatcaagagtttattgaaaagaagagagtttttgattcttggttggattgcataataattttgatcatatcatagtccatattagattagaaccctatagatggcttagcattagttattacctagcccaaaacctatgttgtcaccattgctagctagaccatatgtactactattgctactttagctacaagcccgagaaggaatgagatagaggatcaagtgacaaggactcttggtggtgtacttactgctaaaagctgaaacataccagagagtcatgttgctaattccaaggaaagcctccaaatgttttttgaagaggaaatggaaaccgaggaggagactaggggaaagatcctcaagctaatcttgccaacattggtgaaaccccctagacaacaatgttagatgagggagagaattgaatagagaagatatcaaaaaattgaagagactcctatcacgacgtgagaagttagagggaataacatgtttttcttagactagtaagtattctcctcacctaaatgtcttaaaagtagagtttttaagccccttggtcatcgattcaagagcttcagaccatatgaccaattcttcaagttgcgttatgacctacaattcatgcctgagaaatcagaaaattaaaatagcagatagaatgtttttcaccataactaggctaggaaatatctctttagctgaagatatcatcattgaaaatgttttacatgttccattgttttctattaacttgttgttcatttctaaaatcaccaaaaatttgaattactttgtgaatttctcacaaatttgaattgctctgtgaatttctcaccttctaagcgtgtttttaaggaacttcatattgggaagatggttaggtgtgctaaagtggactatacctctttgaaattgaaagtagaataacgtgctcaagtcctctctcttatttatccaagagttctaggtccaataaaattgaagtttggttattccatctttgttttgtttatctaccatttagattattaaaaaaatgtttcctaatttgtttgaaaaattagatatctagaatttacattatgatgtctatgaacttgctaaggaccattgagtatcttttcctttgagtaataaaaggtattttattcctttcagtttaggatgtttagttaatactaatgtttagggacctacaaaaatccaagtatttctagggcaaagtagtttatgtcttttattgatgatgctataagagttacttgggtctaccttatgaaataaaagttagatgttaatactacatttcccgttttccataaattgatgagcacccaatttaactcaaaaatccaaactttgagatttgataatcgaagggaatactttagccaatatcttttaccataaaggaagacatttttcacctatcttcttatattgataccccacactagaatgagataattgagagaaaaaacaaagatttgcttgaaattacttgaccttgatttttcaaagcctattgggggaagctatccatattgctattcatcttattaatactttaccgtcttgagttcaactttcaatcacccatgagtcgacattgtaagttgtacctcaaatttgatggctacaattgtgtacctcctaaaatttttggttgtgtaacctttgttcatattcatgctcactaaagaataaaacttgatcctataggccttaggtgtgtatttgtaggctatttactttaaaaaatgggatataagtgctattctcctttgtaggaatttttttgtgtttatgaatattaccttttgtgagaataagccgtttttcccttaaccttatcttcaaggggagccatttgcaggagttggggaattttttttcttttgagtttctttatcccatatgctaaaattgcttttgagtctaactttggacctatacttgttcttgtatcaagctctccaagttgttctctaagtcatccttaagacttacttgagcttactgactttgaacttgttgttcctcaattcgttatcttagttctatcgtacaaaggagaaaggggaaagatatgctatattactcaaggtttactctaggagaatacagtttgctcttgaacctttgagtgttgctccaactattaacttggaagaaagtattgaaactcaatttgagtctagttctaatgtgtgaatgatcttcatttaccgattgctattagaaaaggcaaaagacattgtactcaataccttttgaccaattttgttttatttgataacatttttgcatgttacaaagcatttgttaccaaattgaacaccattgacatagcctaaactattcaaaaggcattaggggatgagaattggaggaaaacaatgcaaagggagaatgagtgctttgagaaaaaaatagtaactgggcgatttttgatcttcctgttgaaaagaaacaggttgggtgtaagtaggtatttatagtaaaatatagggcatatgagatacttgagaggtatgaagtaaaatcaatagctaagtgatatactcaaacttatgagatagattataaaaaaactttgctctaatggcaaagatgaatactattcatatattgctatcccttgctactaattttgattgatcttacaatagtttgatgtaaagagtgtatttttccatgaaaatttagaggaagtttatttggagataccacatagtgtagaagaaaatttcaaggggaataaagtctgttgattgaagaaggctttgtatgagcttaaacagtcttccaaaccaagctttagaagattattttattcattgatttatttattttacctacaaaaaaaacagccttctgaagcttggtttggaaattttgccaaggcaaggggattatacactatttattaaacactttggaaatgggaaaatagctgttcttattttgtaaattgatgatattgttgtgataggggatgatttagaagaacgaggagattaaaagaaaagttggaaaaagagtttgaaattaaagacctaggaaggcttgaatcctttataaggattgaagctgcttgatcaaaggagggaattgtgatttcacagtagaagaagattttatatctctttacagatttgggttgttggggtctaggttgatagatacacccattgaagctagttatcaacttgatgaaagaactagagagtccttcggttgagagagagaagtatcaatgcttggtagttaaattaatttacctatcacatactagacctgatatagcacatgctattagaatggtgagccatttatgcataatcctaaggaggtacacatggaggaagttattaaaaaacttagatgtctgaagttaactcctagcaatgatattttgtttaagtaatctaggaggatgacactggaggtttatatagatgctgattgggcagaatcagtcattgataggaactcaatatttaggtattgtactttcttggtagggaatttggtgaggggtgagaagcaatccatggttgctaggttgagtgttgaagcagagttttgagccatggggtatggactatgtgtgcttctttggaaaaaaattattcttagtgatcttaaaataaattggaaaggtcctatgcagctttattgtgacaacaatttggctatcgggatagcccacaatccagttcaacatgaccaaactaagcacattgaagttgattgtcatttcattaaggagaaattggatagggggttagcatgcatcccctatatattcttaaaaagacagttggtcggcatagtgaccaagggacttacaactcaaccattctagtcaatcacaaaaatactgagaattaagatcatttactcactagattgaggggaatgttggagaatcggaccaataattgttggattatacaacctaaataggctaagatttgattggaatttgtttctttttttgtatagttgacttgatttacttcttgatttatttcttgtaattagggattgttgaattaattgatttatttcctataattagtgggtgctttagtggagtaattctaggcctagaatagagtaatttcctttccttttcccattgtaaacattataaatacactataaaatataattgaagaatatacaaatattatccataaatcattctctattttcatcctatttgattggaaagaggttcaatgaaatatgcaagaaaattacctaatttatcttgtctttccatttgtatggtggcattgaatagaatccgatttaggatagcacacatatgatgtccacaccatttcattgttgtgctttggctgaggagtttgatttggaactattattttgcttcacttaagcaagagtttgaagtggccaagtagaagctaggtcataagtaaagaagtatatgaattggcttaataaaatttttctaattttcctatttacagatttttaaagatgggtcctgaatatatctatctttatagctataaacacacatacgcacacacccacacacacatgttaactattttggctaccaaattcaccaacattacacttctgatgtctattagacctctctttatttctacttttgtaaatgggtttcttttgttaccgaatgacaattcctttttcatttttcgtttgtctgtag

SEQ ID NO: 12929 - DNA, 3515 bp, Vitis vinifera
  Intron number 4 from transcript GSVIVT01000238001 (locus G SVIVG01000238001) derived from phytozome v7.0 (chr-ID chr7 ; pos 20412557 to 20416071)
gctttgcgtgtaaggtttccataactatattttcatctattataattacatatgatggctttcttacattgttaaggactctttcaatgatattgtataggtgcatccacatttattcagttgaatatcatgtgaactagttgtaccacctttataaatgaaggttctattttcgaagtgttttaaaaaataattctgaaaaatagtttttgggaatagtttttgaaaacggtttttgatgctttgtagaacaaaagtttgtggaaaacctgttttctatatttttaattttaaaaatagtttttattcatagtgttttatgttttatcatgctccatatttgtataattatttttttttaatagtcttcgaaagacaagtgaaaacaactaaaagatgttctctgaaagtatcatgttttttgtttttaagaacaaaaaccgttttttgttttctgattaccaaatgtgttttatagggctgaagagtttcatagtgatgcttgatagtgatggtgcttcttatgatttgaggtgcaatactagaattttgatgccagctttctattacttctaatatgtgatattgcatatggtatccattagatacttatgattgattagtttcttaaaccttgattttctttcccaattctagatgttgaaatgaaggggtttttttatttcagttttgtggaaaatgtgtgaagcaacttgcatgagattatacgtgggctttgtgcttcaatgtcttacgtgttattcttttgatgaatgccttgtgctcatgtagtgaacttttagtacatattatacatagtgaacttccttttttctgctttatgctgtgttttttattgttctattacttctggtgttctctcagaacatttgtgccttttttcccattgtacaaagtcagttccaatttgtatccagttgtctatgttattgagttgtattagggccttgctatatggggaaggtgagtgaggataatgcttgaaaccatcttttggaagcacatgctgatcaaggaaccttttggtattttgagtgataagattgtgctagagaggaagctatttgttaatattttattttgtaagataagataggctcagaggatgtggagatagatggatgaacttgctaggatgggaggtaaaacaaagtcatgcacttgttgcacattaatcacatccagtaagaataagtttcaatgaagaatggtgagatgaaaggaagtccagaagttattttttagggtataaaagctttaacaaagaatggtcgataatgataagtataccatcttcgatggggtaaaattgggggctgatgtcaattccattgtctttttggtgatggttgtagttcttcaatgactggttcttcttttccttagtttcccatacttgggaacatagaagtgaatttcttagcgaacaaagtgctctcatattttctagattatattgggatttctgtgccctttggtctgtggttttgcttcatatcttcttgtggctggtgatactatgttggtttctctcttgttctcactagtcagactgcattctctactaacctctttatgaaaaataaaaatggagaagaaataaagtgaagattggttctttggtctctgtgtccatattttcaattgaggcctggagtcggtcagacatcccttaggttaattgtaacaccttttaagctggatgcacactgtcacaaagatcacttgtgtcacccttgatgctgattaggttcctacttcccaaatgggatgggatggggtggggtttacttcttactttagcaaaagcttagtacttactgtggatccaatgcaaaaggtatagtttgaggagaatatggacttgtccatagtataatagaatggcttcaatattgcttctagttggtaaggtttcctagtgtccctacacaagtagttgccttgcgatctacatttataattgtttgatttaaaggaatctgagcctatttggcaatgattttaaaaatagttctaaaaaaaaaaaatggttgttttttgataacaattctttaaaatagttcttaattgtttttaggaacagaatcctatttgagaatttaaatatggaaaatagttttctcggcttattcatgaagatattgtgcatttatgtatgatgtataagttttcaaagtatttcttaattgtttttaggaataaaattctatttgagaatttaaatatggaaaatagttttcttggcttatttgtgaaggtattgtgcatttatttatgtatgatgtctaagttttcaaagtattctccatatctataattgtttcgcataatactctataaaacacacctgcaaataccttaaatttgttctaaaaaacaacctgtttttcaaaacaattttttcagaaactattttgattcaaaaatttgtcaaactgtgttttttaagttaaaaaattgttttctgttctaaaggatagaaagcttttatcaagaatagtttccaaagaggtccttgcattaatagtctgattctaaatgcttgaaatttatcccatatgatcaattttttgctataatgtctcttcaacttgacccattggagacactaaggtggtgtttgattaaattgaaaacttcttttgaaatttaaatgttgaacttagatggcgtttgttttttgactgaatagaaaaagttaaaatattgtactttttttattcagctagaagtaacccccggggatcacatgccttagaagaaaaaaaatattcaaattaagaatctcaaatgcagttgcaaagctgtgatatgctctgttgaatataatgaatttatagtgtacaatctttcctttttaatataggtcacatgtatggtagttaggactcctagccttgtatatatatattttctcaattgtaagtagatacaatgaatgagaatcaaggttttcttctctctctctcttaacatgctccattaaaatctgtaagaaattcaataagttatgtgaagattctcttgttctttagaaatgtccttggtattacatgaagtcgtgaagccatggctttgcaactttctttgcctatatccatgtaccatgttgctaggtcaagagaccaaagctccaactgcaggctccaatcggtttgcaatcacaaggaagaatgaaaacaatgcctttctactttggcagccttgaacaacttccaatggaataaaaactcaactaaatatttccggaaatcatttatatttcaagtcttcatacctatcaaaaaaaaaaaaaaattacatttcaagtcttgattccatggaattagatctgtcacttctccatgtccaattatgtcataattctttgcatctaatttttctggtttgattgaaaagttgcatgatgcctgtttatgtaaattgctgtttgatattattttaagccatttgtaggtcatagcagaggggctttctgaagaggagattgg

SEQ ID NO: 12930 - DNA, 14150 bp, Vitis vinifera
  Intron number 7 from transcript GSVIVT01032359001 (locus G SVIVG01032359001) derived from phytozome v7.0 (chr-ID chr1 4; pos 26668803 to 26682952 reverse strand)
gaaagacgacgtgcctccaaagggcttcgatattgcttgcatggatttccatagcaagcttcatagcgattctcagccctgctgccgctttgagttcccgagcgaagttggaaggattccagagaagatcaggtgcccagagtgcctccagatcatggagaagtacatcactttcgggtgctgccatgacgagaacgccataagcgcactctactaagcctctgcttctgtttttcatatgatgcatgcaggttgcttgcgactgaaataatttcatgcgtgtgttcatttattttgttttctttgttttccccttcctgtttttccgtgtgatgtaataaaatttgattgcctcattgcatccacatgatgtagaaggaagccagcttgcaaacttgaggtgctggtgaatgctattatccattgatttccatccgggtccatgtactctatatggtgattgctattagatgtcggagtgtccttcaaatattatccttgtgttgattatgcttatgtgttcccatgtagttgtcactataaaattcagaaccgaaactgaaaaccaataatacgttcatataactcacaatattatcattccccatgtttgaaatgatggaatatagaatagaatcagataaagcaaaaaaggttgtttttgtacaaagaatttgtaaaatttaagtttaatatattaattacctaaaaataattcggattttgtgcatcttttgatcaaaagtattatcttaatttgaccatctagatatgacataggtactaaatttgatcatcgtaagtattttttacttgaaaatacataaaatttgaattatttttaggagtttttatcttttattttctttttatgcatgaaacccacttttccacacatcatttttattactgcatttagaccgttttctagaaatgagaataagaataagaatgacaaattgaatctcatggaaatccaaactcactctcatcatttggattttacttttctagttaccttcattcttattcaattataatcccaatcctaaatatcaaactcaaactatagagattaagagatttgctatcattgcaaatacggctgcatgcacaagcagcacggatgtaacacaaggtgcctattgggttgcatttatataaaaattagttttttgttttttatgttttgagtggttgttatgctcccatgtggagagatttattcaagttaaatttcttaacatctggttttgtagcttgcaaactataacaaaaataaaaaaataaaaaaatccaagagagaaatgcgaagtgaaaaactataaccaaaagaactttgttttatgggggactgttttacttctttgtttccggctgttactcttccattttctttcagtatccatcctctgttttcaagtcgaaactataaccaaaagaactagtatcaaagtcacccgtttcatgaacccacctttcaatcaaaagaactagtatcaaagaacttgttgtttccagttttttgttcccagatttcagggtgtctcaccaacatatactatctctctttttcaagtcctcttatctattgcaacatgtctcttatgtatggaattttaagaaatatccactattttggagaaggaggattctagggtttcttttcacttgaagacccaaatccaaacccacaatataattgaattggcggtcattgaagcaacaaaatttgaaggcaaacaaggaaagataaaatgaagagcaagtgttgctgttgttttgcaagcagattatgtagctagaaaccctcaacattgaagtagaaggaccaaggatttgaagagtagatcaatggccaacacaaatcttacaagtatgagttttcatgcctcttctattccattatttgaaggagaaaactatgatttttggtgcataaaaatgaaaacattatttatgtctcaagatgtttaggatttggttgaaaatggttttgatgaacatgaaaatgcagctacactaactccaattaaaaaagatcaattgaaagattggaaaaaaaaaaggatgcaaaagctctcctatttattcaatagggtgttggtaatagcgttttcccaagaattatgagagctagcttcaaaaggtaaagaagcatgggacatcctccaacaagagttccaaggatatagaagaacccgatcagtaaggcttcaatatttaagaagagagctagaaaatatgaaaataagggagaattaaactctaaatgagttctcttctagatttatggagttcataaatcaaatgaagtcacatggtgaagaaattagtgacagaagaattattgagaaaattttgatcagcctacctaataaatatgacccaattgtggctatggttgaaaaaacaaaagatctctcataactcaatgtacaagagctatttaggtctttaaaaacttatgagtagagattgttgaggcattctaaaaaatcagttgaaaggaaacctacaagcaatgaaaatagaagtgatatatccaaaggtggtagaactaggtgaggaagaggaagaggtagaaaaaacttcaacaatggaagaaagttcactaacaaagaagccttatcactcacaatgtgtagtatttataaaagaagcaatcatgttaagaaagattgttggttcaaagggaagccttaatgctttaattgtaaaaaatttttgtattcaaatatgctgaaaatgtggcttttagagtggaaaatattgaagtttggttatgacatagaagatttaggcacttgaacttcaatagcttgaaaatgctttatcaaaggaagatgtggtacaagggttgcctaaaccattgaaaaaaagaatgaaatatgtgaaggttgtgctattgggaagcatcacagacaatcatttccaaatgaagtttcttagaatgcaaagaaggtattggagctaattcaaattgacatatgtgggctcatgtctacaccttctcaaggcaacaacaagtacttcaacaaaactatataaagccaaatcattgcataacaaaatcttcttggaaagaaaattctacactatttgaatgtcagaatctacttcgatgactaaacacattaacactctaaaatttttgttctatcaactgttagctatggagcataacatagaagagaaagaatgtgttgaacttctattccaaagtctacctgactcatatgatcatctcatcataaatatggccaatggtgctttgaggataatgctagttgttaggagatagagtcttgtttaattgttaataattttgttttttttttaatgtttgaatatagaagtctttttagatagtgacttgctttccattgaagatcaagagttgccattcgtccaactgggaagtcacagatatgtttaaaaatatttggcttgtggtagactctattgaggtataaagaggattgataattgttttgaatttaaaattaatttttataatttttttgaaaaatagagaatgcttaagcggggaacaacacttaaatgatgaccgctcaagcgttccatactacttgagcacttgaagcgttcaagccaccaaagtaggctagagtggtcatgaattttcaactaagattctttcatgcaaatatgatttggaagtcttctaaaaccaaacctcttcaggatttactcttataaatacctcattataaccctttgaggcttaaaagatcgttttagagattctggagattggaaagtgatctcaaacttattgagaggttctcattgagaagaaagcctaaagtaccacaccattcccaatctctcatttaaggatttgatttatgaatcttgggttgaagaccttcatccctttgacgaggctaaagtgatccattggagcaattgaaggttgctgcattgtgaatgtgaatcaagttgtaggtactggaaagaaaatctttaaggtaagatgatcaagtaaatatgtgtaacctgatttcacataatggatttagattagtaggtcttagattttgtgggggttttttttttccctttatagttagtatgagggttttccacataaaaatctcatgcccactgcatatcttttcatttcattgttatatcattgaatgtttgattatcattgttacccctaacatctcataggttatccctagaagataaaaatcatatttttatacttaaagatttcaagtatagcctattaggttatacaaggtatcactggtacttcttaagataaaaattggggataatatatataaatctttattttaaattttaaaatcactcattcacccccactttgggtgtttcagttttttactagtctttaataatgttgcgactactatacttgaggaagaaagtaggcataaaaataaggaatacaaatatcatcttctcaacaaactgaggctctaattatttctaaaggaagatcaacaaaacgtggttctagtgggagtcacaaatagagtaagtcaaagccttaaggtaagaagaaagtcaaatgttaccattatggaaaacaaagacacgtaaaaaagagtgttaacccaatgggttctcctaatcaggttttgatgataacaaaccattgttaagtgactacttggtttgaatggtaaagaatctcaggtataaattcggaaattcatcaaatgaccaaatggatacaagatcaggactttcggaagacttttaatcataagaaaaaaaaaatgtaagatgaatgcatgagtgcacttagggtttacatatctttttatgcatctttggaaaactcgatttgttctctaaagttgtaatttcattaaaacccgagttttatcaaatgtaccttaggcaaaacgtttcaaaattggcatattaatttacctaaagaccttgcctaagtgttagaaaagaaaagaagtgaaaaagataggttttcagggccaaaaggctgaatcggtcgaggctctagccaaccggctcaattggttggggaaccaattgaccggttgcccttgtgcggtcgaggtccgatcgaggagtgtcaaaatcactctctcttttttagtatccttcctttcttggttgaggtttcctccttcctggtcgacctctggttgaggttcgatcgagacaatggtaacctgtcaaaacattaaatgctccaacagctagtgaaccggtcgacccccagctctaccggttgaggctattttttgctgttcttggctcccaagcttgaaaacctataaattgagagctccacttcatttatgacagaaagacacttgtaatcaattgtctacctacttgttcttgccttaaaagctctcatttcctttttagtgcattaaatcctcacttgcatatcttttagtgcacccttgtgagtcatcctagctttgttttgtatttgagatatcattgagataggttgagggattcattcttgtaaaaactgagtgttaaagctttcaagaggtttgaatcttgaagagattgtgcaagagccaattggagccgcaatccaagtgtaaaaagattggaagcttggttgaagcttcaagttagtggaaccctcacttggttaggagattgaggagagtggacgtaggcaaggaagtgccgaaccacaataaaatttgagtttgaaaattttacaaaacatagagctccatttttcataggaatcgactatccctattggaaaactagaatgactcgtgtggacccgcatttttcacgtgatctcccactcaattggtgagactcaattttatttgtgaaaaattaattttagaaaagtcggagtcgccacttattttattttattttaaaggaaaaataaaacaagaaataaaaccctaaaaaaaatgacttcatagtttttggaaaaacatgtctttgaaaaaaccgagtctaaatccggggatcaggttacctattgggaagatacatttaaaaggtagcacccctttaagccctacaaaggtctctactgactaagtttagggaaatatgacaattaattggttaattatagatacctaggtaggctaggtgattttaaaaaataacatactaaataaggaaaccaatcacaatcatgaagaagatttcgggtacgtacctggactgcttcttaagcgctatcacaagacatcaaattaagttagttcaaatagtatatcattcagcatgtgttttattagaaataatcgaataatgaaacatgtatatcaaaacactcaagcactatcaaacataaacataattcacaatgacaatcatatttatagaatttagaaggtaggtgatagggggcgtacctggatagcatagataactcataatactctttcttaggacatggggggttagataataaataataaaacaagaaatcctaacatgcatatctaattagcataacaaaaattatcaaagtatacgaaatcatcaattatcacatacatcttgtatataattcctaaaaaataaatagacatgattacaacaaataacaagggtgataacaaaataagttttgaaaagattttcttatgtaggggtttcaccaatttcccaattgatatacacgaatttagcctagaattgttccatttatttgggaccacaagctttggtttgtgttttgttcaaaaccaaaattttcattggaagccgaaaatgatgcaaactgattaagatatggttgcattttatttttaaaaaaaagagattttgatcttgaggactttaaatgaattttttaacataaaattttcaagggtatcttttgaggaaagcatttgattttaaaataaagggaatttatgtgaaaataaccaatgttttcagaaccggaccggtcatcgaaccggaaaagttatcggttcacggttcactggtcggaccagtcgtcgaaccgcagtcgaaccagtgacgtcataaatatgcaattttttatttatatattattaaaataaaaaataattataaaaaatttaaaatatatatgaataaattaaaaatcaataatattattttatatctttgatattatcaaattaaaattttaaatttaattagatgaaatatgtataatatttaaatgtgaacatatttgaaaatttaaactaattttataatttttaaaaatattatattatttttatttaatattataaaaaattttaaaatctaaaatatattatttagtttggcatggtagataacaaaatgcatatagccgagtggcctcttagggagagtagtgtaccggaggtccaaggttcaagctctcttggtggagattgttatataattttttcattgataatgttagcaatcccacatcggaaagtgagaggaataaggatgcaaatgactcctataaaagccatcctcagggcacaggcatgaccacgattaatgggctcaagactcagcctaaaatgtggttgggttgcgtgtgtgggctttgtcataagacaaggcccagcatgggctttggtacaaatcaataaaattcaatgggcccttcttgcaaaatgaggggctaatttgaactgttcggttcgttttgaaccgttcggttcgaccaggtcaccggtttgatcgccggttcaggcgatttgtgtccagtccaatagccaagcggttcaatagagtgaaccgagccggaaacgtgaccggtcgacggttaaaccggttgaaccggccggtccggtccggtttttaaaacattgaaaataacaaaacataagaaataaaatacctagcaaaatagaagaaaacgaattcacaaagtgaaaatttggacaattcgagcaaactaaagttgtgagaatggagaccaatcgtcactattttccaatggcctttgacaagtaaattttatgagagaccatcaaaacaataaattattcaaacttagatcaaataagctaatgagacattcaccaaaaattaaagactagtattcaagaagcacataaattgaacataacaatcaagaattaacataggattggctaaacacacaagtacacctagattaaaaaaaataaaaataaattgaaactatactcaattagaattaaaaaaacataaactttatgtaatgggattaattaaactattggattaaaatcataaacacactcaaagtaaaaaaaaaaaacatattaaaactaaactaaattataattaaaaacatgaattttatttagccagattaattaaactattgaattacaaccacaaatatatccaaactaaaaaataaattataacaaaactaaatcagaattaaaaacataaactttatctaataaaattatttaaactaatgaattaaaattactaacacattcaaactaaaacataaactaaaactaaactaatgtggaattaaaaaaaaatataaaatttatctcacaagattatttaaactaatgaattaaaatcactaacacattcaaactaaaactaaactaatccaaaaaaaaaataaactttatctcacaagattatttaaactaatgaattaaaatcactaacacattcaaactaaaacataaattaaaactaaactaatccggaattaaaaatataaactttatctcacgagattatttaaactaatgaactaaaattacaaatacattcaaactaaaacgtaaactaaaactaaactaatccggaagtaaaaatataaactttatctcataagattatttaaactaatgaattaaaataaaaaacacattcgaactaaaacataaactaaaactaaactaatccggaattaaaaatataaactttatctcataagattatttaaactaatgaattaaaataaaaaacacattcgaactaaaacataaactaaaactaaactaatccggaattaaaaatataaactttatctcaccagattatttagactaatgaattaaaatcactagcacattcaaactaaaactaaactaatccggaataaaaaatataaacttcatctcacaagattatttaaactaatgaattaaaatcactaacacattcaaactaaaacataaactaaaactaaattaatcccgaattaaaaatataaactttatctcacaagattatttaaactaatgaattaaaatcactaacacattcaaactaaaacataaactaaaactaaataaattccggaattaaaaatataaactttatctcacaagattatttaaactaatgaattaaaatcactaacacattcaaattataacataaactaaaactaaactaatccgtaactaaaaatataaactttatttcccaagattatttaaactaatgaattaaaatcactaacacattcaaattaaaacataaactaaaactaaactaatccggaattaaaaatataaattttatctcacgagattatttaaactaatgaattaaaattaaaaacacattcaaactaaaacataaactaaaactaaactaatccggaagtaaaaatataaactttatctcataagattatttaaactaatgaattaaaataaaaaacacattcaaactaaaacataaactaaaactaaactaatccggaattaaaaatataaactttatctcaccagattatttagactaatgaattaaaatcactagcacattcaaactaaaacataaactaaaactaaactaatcccgaataaaaaatataaacttcatctcacaagattatttaaactaatgaattaaaatcactaacacattcaaactaaaacataaactaaaactaaataaatttggaattaaaaatataaactttatctcacaagattatttaaactaatgaattaaaatcactaacacattcaaattaaaattaaactaatccggaattaaaaatataaactttatctcacaagatcatttaaactaatgaattaaaatcactaacacattcaaattataacataaactaaaactaaactaatccgtaactaaaaatataaactttatttcccaagattatttaaactaatgaattaaaatcactaacacattcaaattaaaacataaactaaaactaaactaatccggaattaaaaatataaattttatatcacgagattatttaaactaatgaattaaaattacaaacacattcaaactaaaacataaactaaaactaaactaattcggaattaaaaatataaaccttatctcacaaaattgtttaaactaatgaattaaaatcactatcacattcaaactaaaacataaactacaactaaactaatctggaattaaaaatataaactttatctgacaaaattatttaaacaaatgaattaaaatcactaacacattcaaactaaaacataaactaaaactaaactaatccggaattaaaaatataaattttatctcacaaaattatttaaactaatgaattaaaatcattaacacattcaaactaaaacataaactaaaactaaactaatctggaattaaaaatataaactttatctcacaaaattatttaaactaatgaattaaaatcacaaacacattcaaactaaaatataaactaaaactgaactaatcctaaattaaaaatataaactttatctcacaagattatttaaagtaatgaattaaaatcacaaacacattcaaactaaaaccgaactaatcctaaattaaaaatataaacttcatctcacaagattatttaaactaatgaattaaaatcacaaacacattcaaactaaaacataaactaaaacttaactaatccgaaattaaaaaaaaaatataaactttatctcacaagattatttaaactaatgaattaaaatcactaacacattcaaactaaaaaataaatgaaaactaaactaattaattcggaattaaaaatataaactttaacacaaagaattaatcaaaaattaaaatttcaaaaaacaaatctaggttaaataaaaatactatatagaaaactaacctatgaagcgaaagaaaaatcctctcttgatgattaaagtggcagcccgatctccgtccgaaatccctcgctctcctccaaaattctgcgtgctctctctgaaaaaaatttccttagcctatttttcccagacaaaaaaaaaaaaaaacatttcccctcttttattcttgtctctctcttatttatatggcaacctatcatttccatgggatactctgtttctttttttaatcccggcagatatatggaaagtgcacatgtgcaaaccgtgtcttgtaagttgcaatgcttaggctgtcaacgccacttgatgtagaaactattaggactaccatttttcagaacaatgaaacccatcatctagcaatgaacaattctaggattgatatagagggtagctctcattccaaacccaactcccatcaaacacgttacacccatcaacaccctcttcaagaaaccccagcagtatatcgacaatcgcctctaacgacaacggggaggacaactgcgactcatcaaatcccaaccaagaaagcctcccaggcaatgtacgagtgtgaagcctctgactgacagcatggtaattcaagaaaaagaaacatccaatgaaacatatgacaacgaagaaggagccaaaaacgcccacaaacgactcaagaggattgaaacgctaaatttcttcaagaactcatgtgaacaaccatattgggatcgttgaatattgtctcgccgtttcttgtacaccaaacaattggatctgagcgtagcgacataggcgatgactccaagcgctatcttgactttctatccacctttgaatccactggatgactctcccccctctgaatttacgctcttggtactcacgtgctgcacatccctaacgtcagacgaaaatggtgtaggagagggcgtcagcggtgatccaaagtgtggtgatggtgaaggagcagttggcgaggacggagacagagcatgtaacgacagagcgacgtcttcggcgccgctttttaggtgccaacgtaggcgataactccagcgattctataacagtagtgagctctattaagatgagaggaaattgagactgaacgttggtgtagggggcggcggttggagagagcagatccagcgatgctaaacgaacgatagtagtcagcgtgaacggtggcacggtgatggtggacgtagatgaccctccttcatgaggcatcgccactccttgcactgctgcacaaagtcttcgttgtcgagctttgacgccgtacacctcgtcaaaacacatcttgtttgggaatgtacaaacagtgccggaaaagagaaaaatatccaaagaggcacctccggcggtgatagtggcgattgcgacaaccatgacggctaggtcgacgatccagaatcgaaatctaatgcggagatgcgattgaattgagaattgagaattgagagttgagaggtgagagcgctccaatgtcggtgaggattcgagctgctgcaagatctgaagtagcgaagaaaaccttgaacccttcacgagagagagatggagcgaaggagttgggtcattccaggagaaatgaatagagagaataaatggaatcaaaacgagaattggcacccatcctatggatgacaacaaagcaagagaaggttaaatccttgcataagaaccagacatggaaatttgtgcccccaccacttggaagaaaaattattggaaataagtaggtctataagatcaaacatgacagcaatgaccaagtggagaagtattgtgcaagactcgtggttaaagaatatgcttagaaagaaggtattgatttcaatgagtgattttctccaattgttcaatttacatcaatttgagtagtcttagctatgtgtgctggattggatttacactttgagtagttagatgtgaaaattgcgtttcttcatggagagtttcaagaagaaatttatatgcctgaaaggctttgaagaaaatgagaaagagaacttggtttgcagattaactaaatctttgtatggtataaaataagtgtcaaaatgtgggtacaagagatttgattccttcatattgagccttgggtacaatagactcaattcatatcattgtatatattacaagaggtttgagggtgatgattttattattttgttgttatacgtgattacatgttggttgaaaaccccaacaaagattgagtctaagaattaaaggcacaattggctaagatatttaagatgaaggatctaggaccaacaaacaaaattctagggatgcaaatttgccaagatagacaaaacaagaagatttgactctcacaaaaaagctatttgaaaatttttttacatcgtcttaacatgcatgattgtaaattaaccagtttctaccttacttcttgtaaattacaaattatccttaagtatgagtcctagtaataaagcggagtggatgaaactatctcaaacaccatatgcatcagcaatgggaaatgttttctatgatttgtacaaaaccaaacattgcacaagtagtgggagtgataagtcgattcatggcaaatttggggagagagcattgaaatatagttaagaggatccttagatacatcaaagtattagttatgttgattcagactttgcaggttatcttgataagaataaatctactacgagctatttgtttacacttacaagaggagttgtgagctaggtttcaaaactccaaactattgtggctctatctataacagaagcaaagtacatggcagctacacaggcttgtaaggaagctatctggattaaaaggctataaaaaaagcttagacacaaacaagagaagatttctctattgtgccagtgacatatttggttgcacaaggtgacaagtttgtcgcaaattgacagttgaaagaaacagactgagcgaaattggccagcctaaaaaatattatgaaaataattttttctgaaaaacttaattaacactaatttattccccggctactggtatgtttatgaattacaaagctaatcagatagattctgctactgaggaaccctt

SEQ ID NO: 12931 - DNA, 6129 bp, Vitis vinifera
  Intron number 3 from transcript GSVIVT01016195001 (locus G SVIVG01016195001) derived from phytozome v7.0 (chr-ID chr1 3; pos 6827088 to 6833216 reverse strand)
aaatttgtagctcttttagctttgaattggtatttgtatttgtgctagcaaagagtgtattcacattagaaataagtccatatagacctatgtgtcttttgaaattgttagaatttattgagagttttcagcctctactgagcttattttcagagtggttatccatacttttaattcttaaccctttcaagacatcctacaaccaaagaaaattctaaagtgatggaaaaatgatcttacattgccacactgcataatcttgccagttgataagggattccatgacaaaggaaggcaacatccaagatacactgaacatggagaatagatagaatacctttgtttatagttgattcctcttcttttactcaatgatatccttatttattaaaaaaaggagtatgttaagaggaacttgaatttatgtaaaattacatgtcatatttttgggcgtccttctctttttatatatactaccgggattttacctatcaatatatatatctttatttgcttacaaatgtttgaagcttttacattattccttctgttagaagttctattataatctatgatcccatgaatttctcatttctagttaaaggagaagtgaaatgatccaataatgctcaatcataaaagtattatttatattatgactcacttgtttatcagggggtcacccctttttggtgctaatagataaaataattccttaacacagagttgaataggactaataggtatgtttcattatggtacattacactcacaaaacacataccatggtgtcaacatatctagacttttgggatgtgtcagagatatttccacaaaacaaatagtaggttctttttgcaacattattttctgagttcctctttatctggccttttgtcatttttgaaaacagaaacaaacatgttcattcgtctttgaagataaatataagaaggatgaacaatcttcatagatgtacaaaaaaatggttagaaattaactgctgtcaagccccataaaaactagcacatcctcacaaagaaaaaactcgaaggtacacaatgagaaatattgtacactcaaggggggacaagaatctctaacaaaagggggccaaaagcttagctccttgtttggctaactgatatgcgacttggttggctgaacaggtaacccaactcactagctaccttgatgattttgcgcattcaattgtcaaacttccatgaacctcttttcttattcacccaagatattaaagttgtagaatctccctctacaattagattggaaaggtctaaggctttaggcctgcagttaaacctccaacaatgccaatatctctgccttgatagccaactcctcacctgtttgcttagagtaggctctcaacattgtacttgagtcatctatgatcacaccatcgatatccatatggccgggattccccagaaacatccatcaatgtttaactttacaaaactacttaaggggttgatcaaccaatcatggctttcttcttcaacttgtttgagtagcaagcactcttctagtctagcattacaagaaacaaaagaatatttgcaaaaggcttggtgattgaggcccaaaggaaggaaagtaaatcaatgctcacatggaatcctcatatttccatctgtccttaaaaatccttgcattcctttccagccaaataaaccatgttaaggataagacaaccacttaccaaagagtcttccattttggaagggttctaaagccgcccttaaaggagattcccatcatctttgctatgcctctaggaggaacccatacaatattgactatgtgaaacaatctttatctggccttttaaactcatcttagtatcttacctattgtatcatctttgacctagctacctcaaagatctttgataccacagctgaaacttaaaaccacagtttatggatggtttttaatacgttaaatataaaacagtttttatatcaatgagacactgctgggaccttggttaacattatcagggaaaaaggatgctgcctacttatttgttaggtcattgccatcactatttgatgtgtcaattatcattcactttttaggcaatgccttcactgccaaataatattccgggacattacatgccttgttgcaggcaatcaccaattggttgctctctgaggtgtctctgtctaaaagaggaaaatgaaagggaagagttgctcttttaagaaagattttattgttaactgacatgtggactgttgtttatctgtagttgttgatcttgttgctttacattctgtatttttcaataactttgtcttcatcctacaaatttgtgacagtattagttattttcttatttgttcaatttttccttttcatcatattaatgccctttatttgttttgttgtctttttggaatgctggttatatcttttgagatccgtagatttgagtgtgagaaatttttggtcagattgatgcatcgagttgctgaagctcaatgtcatttgtgtgattttataacattcagatggttgttttgagattctcaagccaggaagtattcacataaacagatggtgtctgggtatgtggagtctggttcacagaaggcagctagatttagatgcctggtgtttgtgaaatctgctatttcgtggaaagagttatcattgatgaaatgagatggttttcgggttcacaataaaagcctaatcataagtttggaatgtgatccaatgttgtgaaaaaggttgaataatcaatgggtcacacgatttagaaaaatttgagaagctttctttgtagtgaaatttactggtttttactgctcacagatgtgctgtttggattatctaaggaattgaagagtctaaaccgatctgcatttgatcagatgatatcattgttcatttacttgacgaatttaatttgtttattattttaaatgaaaccttgctagtgtttcaagcagaattctaacttttgtattgtccgactgaaacatggtggtaaaggttttgcatgttggttatgcgagaaaaactattaagcttgatggtgaatccttgttggtgttctatggacgtgggtaaatgctggtctaatttcgtgtgatttcccttctcacagaatcctgagagttcatctagtgctgttaaagtatcattttatatggtgcggtctcttcttaaaggctgctgcatggtaacgtttgttgatttaacaagtactctttaggttgacttgcagaaacggtgcttgttcttcaagtaaaagagtatgcatgaatccggtttgattttgtgtgttttgtttttgcgcaagaaagcacatcgataatggtctcaagattgaagaaagtttagatgactggttcttcatctccaaggctcctgcttttctgtctcctagagattttgtttctttgaagttgtcaaaatgatcaagctagtactgctggctatagttggtaaatatgatcaggaaaagttttgttactgcttccagagtgtggatatggttgcttggatcataccttttcctcttaacattctaaaccagcttaagtaacttcaaatcatctgtagaggcttaaactgcatttctgctttctggccatctcatttcagattgtgatattcaggaaactttaggatgaaccaattcagtgaaattttttttattcatccacatttacttgtgtctgttggaaacctcaggtgccagaaactgtattaatgtcagactgtgatggaaattttatccaactctacaattttggagaactatattctgcaaggctgagggcagaaatattactgtatcaacaacactaatttaatatttttattacattttgaattttggtgcttagaagtggttggatcattaccttgagaactttaaagaaaagttatggtggaagagactttcttttcgctaactaaaactctgaattgttagaatattggattcagagactggatattttatgctggtatctagtcaaaccctttcatcccctactttctatctttctagagtattctctgtggcatcctttttggtagtacttcataatagatgggctctggcttgaaaattttctgttttagcttattatctcagaggatgaatttcacctatataggatgcatatcagccaagtttttttgttggatgggattgccttgattatgaatcagtctgctggtctgaccaaatgtatggacaaacttatcatttcatgattagatgtgaagccaattcttactgtgctgactgggtcaatgagtccctgaaggagacagaaaaagtaaaaatcttgaactttgtgaagattgatttcacatgatcttccccatttggtcttctctgtttggttgctgagctgcccaactgcaagatatatcctgtctgggttccaatatgtcttggtaattattcattgataagatttactgacctattgatcaaaacatagctattgaatagaatgctattaaagaagattaattcaagtggcatgttataattacattaagacagattagaggaatttcctgtgtggtgggtatgtactgctttatgcttgaattgataagtggattccatggataactggagccagctattgcatattatgtcgggcaacatacatgcagtttgccatattcttctgctttaagtaagagtttttgcaatatcaaaatgtgatggtgcattatttgtattgttgctgaaagtatcatgcctcgagatttcccatattcaatttacattgaatgatgaagagattgtaagttatctctttgcgtgcttgtttttgcttttgttctttttttaagttattttaatctgcgtattgctttcctgttttgaaatgtgtcatgcagatggaatcttagtgtctatgttttactttctactgttttggccaatgagttatctttaaaataaaattttcctttgttctattgatgtttgaaagtattttcttttttgttttcccattctatatcatgttgtgatgtctcatgctgcttcttgaaaactgacattaatatttacttgctagttccctgtcttagcaatatggttttgggacacggcacaccatttagagtttcttatatgcatgttatctctgagcttgcattgccttttcctggcttaagaatgtgaaaaaacaaataaggcatccaatcttgcatatcattttgttttgcctgcataaaatatgaaaagacaggtttgctagttcttttggcactttaaatatattttcttatttatcaaaaataaaaaataaaaaattgacaagataggtttggagcttctgtgaactaaacccatgtgactggaaagtggttctatggtattatcaactagcaaatgtaactggtatttcaattctgagaattagatgatgttccggcctcttgtaaggattctcccttgtcaactttttgtggtattggtcaccagcaagtccaagctgttccaaaatatcaatttataggccctgattctatctggtcatatgatgaagcagttaccatggtgctattatttgttttcaaagttcaacatgagagtgttttgggaatcttttttgcaatgtctatggcttgtaagagggtgatgcagttttttttctattgaacccatgttctttggaaaagaaaagagtcaaattgttggcattcattggtcgtatttggagcccccaaattttgtttataaactgtgtttttcttagttcttcaataggcaataggatttggggcatgactggtgttattttttgttggtgttttaaattcttatgtagggtgccataatgctaattttgttttttagcattcatgttgtatctgttatggtgttttctcaaaatagttttacgttacattaactgcagcaactttggagtttgtggcattttgacatgcttgtgatagaacactcaaggctgattcgtctgaagcgcctttcgttctctttatccttttatattcatgttaaatctttctaaatctaaatttctaaatgtccatttattagtgttgcattagtgcatcagcttctcaagtctggtgttcatgtagatt

SEQ ID NO: 12932 - DNA, 12658 bp, Vitis vinifera
  Intron number 14 from transcript GSVIVT01008829001 (locus GSVIVG01008829001) derived from phytozome v7.0 (chr-ID chr 18; pos 2529469 to 2542126)
agcacagtgcccgaacccatgtggaaaaaaaacttgaagcagagaagtatgatcagagtgcccgaacccatgtggaaaaaaagcttgacaattccaatcatacgtttgaattaagccatctacacagagaggatcttatcgacatccatctaccaaattaatcagttgaattttcaagagaagagtgctactaggaaggaatggtggttgcttttggttcttgtacgtcattgaatgttgttctcattagttataagttcagaagaaaatgcagtggaatttaatcatgaacgaataatttttaagctcctttggatggagactcctgtaattgataaaattgaagatgaggttgacaagggccatataaatttgacatatagagaagtaaggatgtgcctttctcatcttcaaattttctagaagtgcttttgtctaagttgtttcaaagcaccttaatataactccatcaaaatcataaaataaaaaaaaataaaaaggagattaaagttggtttggtggtgtttttgaaaattaacctcctttcttagccttgtttagacaaaaatctccttattattttttttaaaaaaataaccctcccttttaaaatctaaatacttgaaatggtaaaagatatttatgtccaaagtagattacttttcaaataaaaatatgggaataattagattcataaatttatgatcatttcattccttttaaccgattaattcttttttaaaaggaatagacgattggattttttttcaaaaaaataaatacttcatttcttatttgagataaacttaagaactactaggatgcctaagaaatgttttagaaaataattcctaatcatttttaaaataaacttttgtttaaaaacataaacttaaataccaaaattattaccatcaaaataatagctgtaagatagagacaagaagtaagagtgtgttgaaggccatgaagaggacccgagcccatactggaactttgaaaagtatattcagtgaaaactcgtccctatcactgcagtcaaatacaacctttaaaaaaaaaattgcatgtatttaacatttttgataaatatctaacagcattctgataactcatgtcatggaacttttaaaatgcctagagacatccaccttcaatagctactgcttcaacctcactgtacctatacataaaccctaacttcatttctttcctttcctttttatttcccttcctcgttttttctccactttgaaacgtaaaaacaaggatttttgtcacagcttcctttaactcatatccatgattggatcttgcctccggatcagtttccaccatgacatggaagagaatgatcatgtatgagagaaagagatgaaccgagagatttatgatttccaaggtcgagataagctaatgagacaagaaaactagggccaacgcttgtgttcgttggccttagttttctcatctgtggaccctatcatttgatggcaagacttactttttttgtgaaaagttgttatttttataaaaattagagtcgtcatttatttttattttttatttttaagggaaataaaatatctaaaatcttgaaaaaaaataactagttatgttttgaaaaaaatatgtttttgaaaaattcgagtctaagttcggggattatattacttattaagattgtggatcattaattttatctcaagacatatgcggatcacaccaactccagattttggaattaatgaacccaacacacttgatggacttaatgaaccaagtatactcagttcagacttcagaattcagaatatcacacatatcaatgtttttcatcttatgaaactaattaatcccagattgagggctaggactcatcagtgcattatttcctaccaccagttaacctctcaacaaaataactatccatccaagaagcaatagaaagaataaggtgggccaaggaaacgacaattgatgtctagcaatgagcatctaggagggagatgtgcacccccatgctcaagaagatgtgaacaccggaaataaggaagtgaacaaaccacaccagtgcatacccaaaaagaacaaacaaacaagtaaaatataaaaagacctttttttttggacatggcctaacctttagcccatgccgtcttctctttcacaaaaatatagtgtttgggaggtggggtgctccacccaaaatgtctatttacttaaaaatgttgaggcatgagcactgacctaaacatataattaattaattaattcatactaatgaaaggtggcatcatgccactgacacccaaatgtaaacaaatattgggaacatgcaaaatgtgataatatggggaaaatttaatttggcagggcaaaaaatgatcatttgaagaaaatttaatttggtagggcaatttgtaatgatgtactctctgttttatgtatgacaatttcatgttctcaaaaaggttataatttggggaaaatttaatttggcaagacaatttgtatcaatgtactttatcttttatgtttaacaaattcatgtttccaaaaggtgataatttgggaaaattttaatttggcattgcaaaaagtgaccatttggaaaaatttaatttagcaaggcaaaattgaccatttggggaaaatttaatttaacagggcaatttatatcaatgtacaaacaacaaggaattgaacaaaccacgttagtgcatatgcagaaaaaacaaacaaacaatttaaatataaaaaagtcccttttattgacatgacctaacctttagcccttaccatcttctctttcacaaaagtatactccacccaaaatgtcctttttcttaagactgatttggggcatgagcattaaccaaaacatacaattaattaattcctactaatcaaaggggcatcatgttactaacacccaaatataaacaaaaagtgggaacatgcaaaaagtgacaatttttggagaatttaatttggcaagacaaaaaatgactatcttagggaaatttaatttgatatttcatttggcatggaaatttgtagtaatgtactctctctttcatgttcccgatgacactttggagaaaatttaatttggtaagacaaaaagtgaccatttgaggaaaatttaatttggcaagacaatttttattaatgtactctctcgaagatttaatttagcaggtcaaaaactagtcattagggagaatctaatttggctaggtaatttgtaccaatgtactctctcttctatgtttgataatttcatctttggacacccatcaaatgatagaacttgtctaaattaaaaaaataaaataaaataaacacatggtacatttgaacccctttaccgtgaacacgtaaagaatccattgttactactagatttacacatgcattttagagtttgagcactgaccaaaatataccattaattaattcctagtaatgaaagaagtatcatgtcattgacacacaaaacaaacaaatacatagaacataccaaaggtgaccatttggggaaaattaatttggcaggacaatttgtaccaatgtactttctcttttatgtttgacaatttcatgttcccaaaagtttataatttggggaaaatttaagggtaaaaaatgatcatttgggaatgtgcaaaatgtgacaatttgggaaaaaattaatttggcaaggcaaaaagtgaccatttggggacaatttaattttgctgggcaatttttactgatgtactttctcttttatgtttaacaatttcatgttcccaaaaggtgacaatttgaggaaaatttaatttggcaaggtaaaaaatgaccatttggggaaattttaatttggcaaggtaaaaagtgatcatttaacaatttcatgttccaaaaggtgacaatttgaggaaaatttaatatggcaaggtaaaaaatgaccacttggagaaaatttaatttgccagtgcaatttgtaccaatgtgcactctcgaaaatttaatttggtagggtaaaaagtaactattttgggaaattttaatttggcagtacaaaaaataaccatttggggaaaattttgtttggcagacaattgttagcaatgtactctctttttatgtatgacaatttcatgttcggacaatttggggaatatttaatcttgcatggcaaaaagtgaccacttggagaaaatttaatttggcaacacaatttatatcaacgtactctctcgaaaatttaatttggttgggcaaaaacttaccatttggggaaaatttaatttggcagggcaatttgtatcaatgtactttctcttttatgtttgacaattttatgttcccaaaaggtgacaatttggggaaattttaatttttttttccatgcaaaaaatgagcaaaaagtgagcatttggggaaaatttaatttggaagggcaatttgtatcaatgtattatttttcatattccaaaaatgtgacaatttgagaaaaatttaatttggcaaggcaaaaagtgaccatttggggaaaatttaatttggcaaggcaatttgtaccaatgtagaaaatttaatttagcaaggcaatttataccaacatactttttcctttatgtttaacatattcctcatcacaactatttgttatctatcctcttctaccatatgatcattttgttaaaattggaatcatttgcaccgaagttgagagaatttggtaaaagttgattccctaacatccaccaaggttagtgggttgttttctttccatgctattttgatatttggaactctacttagcccgctatctaaagtatgcctaaacataagagcctaaaattaaatatgaaatgtgatgttctatatcggataggggagaatgttcctgacatcatatatgtagagactcctcttaaccaagtagacgcgttttaaagccgtgaaggctcctttggattcaaagcggacaatatctacatggttgggtgcgggtcgttacaaatggtatcagagccgatccccgaccccggtatgagggtttgtttagctccgtaaatggtgtttgtctgtttggccccgcaatcccatgggacacaatgatgatgttgtgtctgcatggggggtgtttgtgatgtcccacatcggataggggagaatgttcctgacattatatatgtaaagactcatcttaaccaagtagacacgttttaaatccgtgagggcccctttgggtccaaagcggacaatatctacacggttgggaacgggtcgttacaaaaggtatcaaagccgatccccgaccccgatgtgggggtttgtttggccttgtaaggggtatttgtctatttggccccacaatcccataggacacaacgagaacgttgtgcctgcatggaggggtgtttgtaatgtctcacattggataggggagaatgttcctagcgctatatatgtaaagactcctcttaaccaagtagatgtgttttaaagccgtgagggcccttttgggtccaaagcggatagtatctacacggttgggagcaggtcgttatatgacatgtcctaaaaaatttctttaactatcaaatttgttttcaatttaaaaaaaaacaaatataattaaaattatttagtaatttatgttttttaaaattatttaatattaattaaatacatggaatgaagtagcataataaataatttgttggctttaaaaaaaatttatttcatataaaatatgatattttctattatggtaacttgtggatgatcatttatattcaaatgcatttatttatgactccctataaaagggtgagacatttaatgaaaattcattttgtctttttcttacattctaatttctctttttcgttttttttctctttccactttattattttggaacatgttatcggcacgacgctctgagtatgtagaaaatgaaaaaaaattcttaggtagaaaaaaattgttcaagatagaaaaagaaaagaattcatcaataaagtttcttatagatatgtaaccatattttcttcaaacgaaatatgaaaagtcgtatgtattgtattctattattataatttttatttactttatcttatcttatagtcagaagctatgtaaatcatttttattttcttatgttttttttcttttgctttttctttcacaaccttaagtgaaaaaaaaaaattgaataacaagaagactgcatttttaagataagaaagaaaaaaataaataaaggaaaggaaagagaaaagtaaggttggtgggacatagaagaatgcatttttgtatttttattgcttaaattttattctaaaaaacaataaagggacataaagagatttttcagctaacctataagattaatatatcatcacaatccgcgtacagtgatttagtgagaaggccacgtcaaaagctcactttcctctgcagcatactacgattttattttttccacgtgtcaccttcacaacgcttcaaatccaaataatgccaaatgcgtgacagccacgcacgtccactcattttgttaagtgatttctccatctccaatgcagacgccaattctctttttatagattttaaagcgtgtgttagaaacttgagagttgcaaggagtgtggaaaattatcagctccttcaagtagaaaacaaagtcagaggattgtataaagaggaaagatgcccctgagatagagacactgtcccacctgtaagcggctaacacttgggtttgtaaagctctccttctctgcaatttttttgagtgttgagaaaatctgggaaaattttgccccttgagatagaagacttgaatattggatttttgtatttttaggttccagaaaaatggaagcttagacccaactgggattaatgcaagtctttggttttggattgaggctttttctttctctctttcctttttcctttcatttttatttacaaacctcaagacaagattaaaaaaaaaaaaatttcctttgcttttggttcctcggtctcactttgctttgaagttttttcttttttgcttccttatggatagggtagagaagaaagaggtcagctataatgggttccacatgttgggatttaagggtatggaaacaaattactatcccaaaagacacaaacaaataacataattaataaaaagaaaaatttatcggttgaagcatgacaagcactgtccttgaaatagatccaccatcctcgaagacgaactcgatgcactaagataccagtggtctacctatgggattcaacaaccaaatgtcgccttgggtgcactctgtaagcaagatatgtagagcttggttttttgaaaaaattcctccagatagatatatgaaaagacttttagaaaaactctctgaaaaattctctaaaaaaattggtattcgtatatagagaatgaggggtgacctgtttttataggccactaacacagtctcaatgagaatttatttataatcagaacatgactcaaagtggaaggggattctactcataaatggaatgggactctactagcacaatccccataggactctttccaaaaatataagattaatagaataaaataaaataaaaattatttacactcttcctacaattgacagtttttcttcttattaattttgttctttgtttgtatcttttgagctagtcatttgtttccatacctataaccaacaatcgtaaaatatatcgaaatggaagcttccttagttcacactcgttctaacacttttaaaattgatcccttcaacgggacattctttaatagatgataggaaagggttttctctgcaattgatgagtgaacttgggacacattttgacttacctaaaaccagaaaatggttctcatttgttaccaacctgagaaactggaaataaacaagttaggcatgctattctaagtaccctttctaatgaacttttttatatttattgtcaatttaaagttgcaaaaaaaaaaaattgggatgcaatgaataaaaaatatattttggagtatgcaggaactcagaaatatgtcatagggaattttagaaatttctaaatgaccgaggataaaaatgtatcatctcaaattcatgactaccattcgttgattaatgacttagctattgaagacattaaattactcaaaccttttgtggctggttatttaatagagactcttccaaagtcttgaaaagactacaaaaataacataaaacataaaaaaaaacagatgtccctagaggatgtcataattcatattaggattgagaaacaaaaccgaaataaggacaatgttgagaaagctaaggaattgtcttctaaggctaatgtagtagaagaaaaacccaaacccaaaaacaataggtctagaaagcaaaactttaggaccaagcccaatgcatcaaacaaggtctagaacccaactattaaaaataaaaaaataaaaaaataacaggagtaaggatcttgtttaactatgataaaatagttttaaccaagaatgatgcatttatgggaaagggctattgtaatcagggtttatttatgttgaatgtttccgatattatcaataataatgcatcttcttcttctgcttacatggttgattcttgtgatatttggcatggtagactaagacatgtgaagttttcatatgtgaagaaaatgattgaattgagtttaatccctaaaccgtcctttgaaagccatagaaaatgtgaatcttgtgtagaatctaaaaccacaaagaaatcttgcaaatcagttgaaagagaatcagatctactatgtttaatacacaataacttaggagacctaaaaaatacaataactagagatggtaaaagattctacataagattcacattttctatggttttccaaggacagtttaaggattaaactcagtattcacccattttcttcatatatgaaaagttcacatgtcctagtctaccatgccaaatatcacaagaatcaactatgtaagcaaaagaaaaagatgcattattattgataatatcggaaacattcaacataaataaaccctgattacaatagtttttccccacaaatgcatcattcttggttaaaactattttatcagagtcaaacaagatccttactccttttttttttaatagttgggttatggaccttgtttgatgcattgggcttggtcctatagttttgctttctggacatattgtttttgggcttttcttctactacattagccttagaagacaattccttagttttctcaacattgtccctatttcggttttgttcctcaatcctaatatggattatgacatcctctaaggacatctgtttccttttatatttcatgttatttttgcaactagtcacaaaaggttcgagtaatttaatttcttcaatagctaagtcattaatcaacaagtggtagtcatggatttgagatgatacatctctatcctcggtcatttggaaatttctaaaattccctatgacatatttctaagttcctgcatctttcaaaatatattttttattcattgcatcccaaatttcttttgcaactttaaattgtcaataaatatcaaaaagttcattaaaaagggtactcataatagcatgtctaacttgtttatttccaatttcccaagttggtaacagatgagaaccatcttctgattttgggtccgtcaaaatgtatcccaagttcactacatcaattgcaaagaaaaccttttcctgtcatctcttaaagaatgtccctttgaatgtatcaattttagaggtgtcaggacgggtgtgaactagagaagcttccatttggatatatttcaagattgttgggatttaagggtatgaaaacaaatgactagctcaaaagacacaaacaaataacataattaataagaagaaaaacttatcggctgagacgtgacaagtactgtccttgaaatagatccaccatcctcgaagacgaactcgatgcactagggtaaagtggtctacctccaagattcaacagttagatcttgctttgggtgcactctgtcagcaagatgtgtacaactcggttttttgaaaaaattcctcctaatagatgtatgaaaagactttctaaacaaattagtattcgtatataaagagtgaggggtgacctgcttttataggcaactaacacagttccaatagaaatctacttgtaatcaaaacatgactcaaagtggaaggagattctacttagaaatggaatgggactctactagcacaatcccaatatgactcttcccaaaaatataatactaatagaataaaataaaaataattcccaataggacccttcccaaaaatataagactaatagaataaaataaaaataaaaattatttacactcttcctacaattgatagtttgatgatttttgggtcagcacacagtagaggatcgtttcgggtcagatcctcccaagcttgggtgtgcggttgactacctcactaaaaattgttgggatttaagggtatggaaacaaattactagctcaaaagacacaaacaaagaacataattaataagaagaaaaacttatcggctgaggcgtgataagtacaatccttgaaatggattcaccctccttgaaaacgaaatcgatgcagtagggtaccagtggtattcaatggtcggatctcgccttgggtgcactctgtaagcgagatgtgtacagcttgattttatgaaaaaaaatcctccagatagatatatgaaaagactttatgaaaaactctctgaaaaatttggtattcgtatatagagagtgaagggtgacgtgtttttccactaacacagtcccattgggaatctacttgtaatcagaacatgattcaaagcggaaagggattctacttataaatggaatgagattccactagcacaatcccaataagactcttcccaaaaatataagactaataaaataaaataaaataaaaataattagaattctttccaaaaatataagactaataaaataaaataaaaataaaaattattcatactcttccaacaccacattagtgcaaccatagttcactgcaagcaccaggaatggaagtttatcaaatgcaccactcgtcgagaatcccagatctgatcagatgattgtacctgatgtaagtacgattcggtatttgtgaatttcttttgggctctgagtttatcctacggttttgggatgcttgctttgacgagtttaattcgcaatgcgattttagaggagaatgagaaataggatttctttatttggtcacaagcacttgtttgtattaatgctttgttaagaaggtaatattcaatatttttcacatacatctagaacactcgggtgttcaactcagaatttggtttttcaaatgagactctggctttcatatggaggcaactttgaggaatttctatgtttaattgcccaaaacaaaaggatcatttgcataagtagttaaataaaatagtcttgataaataaatcttttaattaatattttgatccaacaaaattaatttttcttaaaatttatttttttgaaaagtaaatttatttgttaatgcttcatcaaatctatcttttctttttttatttcactttattcatgaataaaattattttttacaaataatctttagtgcaaaattataaaatattgtgaatcatttgatataaagttcttccatatctcataaatcagtatgctacatatatctttataaagtaatcagtatgctacatatatctttttaaataaatcaatatataataaataataaataatatttaaaaatcatttatctttagaaagtaagatttgtttgttaacataaatctaaatgaaatttaatttatcttaactctaaatacaatattaaatattttttatttaaatctaactataacttaatttaatttaattctaaatacaataaaatagtattaagtaatttttttattattttatttctgtttaagtattttgtatcaatagagtaaggatgttttggttgttttaaaaagttatttttagcattcaacaaaaaatcaattattttaatttcttttattgattcaaaaaatgtaaaaaaataaaaataaaaacaaatcatttatactgcattctatgaagttaaaacaaccaatatcaaagagttatagaaaccatcattatttcttatttttcagtcctttcacaaagggagatatattacaagaattcgaatagctttctgcatgatcttgcaaatcacgacctaaagtatcattatgtttcttttttagaattttattagaaccgtaaaagagaaacgataaaacgaaggactgaaaaagggaagaaaaataatgcaatggtatgacctgagcggcagcccccatgctaacaaaaaattttaaaccaaatataaattagaaaataaagattttttttccaaggccccttgtgtttgagccagacttgggcaattgaattatgagccttatggctctattcattaagacaagaactgaaattaaaattggtttaacttgcctaccaacaacaacaatggtcaaagaggaattatcaacatct

SEQ ID NO: 12933 - DNA, 10251 bp, Vitis vinifera
  Intron number 1 from transcript GSVIVT01028585001 (locus G SVIVG01028585001) derived from phytozome v7.0 (chr-ID chr7 ; pos 10247128 to 10257378 reverse strand)
gtcagcttgtacatgtagccggcagaggagtttggtgtagacataagttatttaccaaacgtcctctaaatgttatacatttttaccgtatgatgggattaacatgagatgacactgaccaattaccacttacaaaccaactatgcttttgaaacaccttataatatagaaaatatgtaacaagtagtctcacaaggagtggagccagttgcgcccccttgaaaaatgttaaggttgggctattgggtcaaagtccacattctttataattgacaaaatttatatatgccttaaaagttgccacccgaactaaacttccagctcagccattggccaagcatataataacttttgttaccctgaaaatagctgtttgatcgtggactacaaatatttggttaggtctgatggtcttctgtattgatgtattgaaggacttatttggagtggggtccaatgggaataatattactttattgaatttcatgttgaccctgctcttgtggatttattttaaccaaaatgaaaataataataataataatagaaaagcatccatcttctttcttccttaacatggcgaaacggccataagcttcaaaaacatctctattacttgttagaaaacttcgagatttgagaagattattttagtaaatttttaatcttagattccacgctacatatttgcatgtagccttggatggatacaaacaaatctttgaaggaagaaaaatctgggtgatgtctccctcctcccatcacacgtccacaaaggtgcgcgaatctatcatggaaaacccagattacaaagtattcaaatgaagagaaaatcgtaaatttgaaaaatgaaatgtgattgaaaacatcataatgccctcaattccaagagaaaatctcagctgatgggttgcatatgcaccactatatatgattggatgatctatatgggtgtggtttctacttcagctgaaccacaaaattaatgaagagtctttctattttatcaagaccatctgcaaagtgaaaattaattaaaataattatccattttagctttttagtacctatattttattttatttttatctaagttctagtttggcatttttttgcatttaggttttacattttttacctaaatttagtaatatccataaacacttgaattgaaaattggatatgatattacaaagtcgttatctagaattttcctaaacaaagcctgctactttgcggcttttattttctttggtctttttcctaaacaaaatatgcgtttccttttgtaaaaagatttgtatataacatttttctaatttggtatattattataatattatatttttttttataaaataaaaaaaattattagaataatctttgaaaaagttaaaagatgaaaattagtttgcaaagaatataccttatgaattgaaatgtgaataagagtgaaagacattcaatagaaggaaggacttgaggctcatggtgtaaacatataagaaaatatgagatgtttaagaaactcaataattatatttagaatgattatttctctcattgatagaatgtaaatataatgtatcaaatcacattaaaatatgatgtatttgtgtggattacgttatgtttatatttttgaaagcattaataaagcttttaattagctggcacatgaaagtttcttttttgcatttttattttttatttttttattttctattttgataagacgaaccacaagtcacgaattttcctttttgttttcctttttctttcctccatttttggcaacacgacaaagtcatggtgctggaaagaatggaaacggaatcgtccttgcatatctttgaaaaaacacgcttgtcaggcgacaacgagccaatttttcatgcatgtttcttggcaaattccttagtttaagtccaaaataatccattgttgaaaaaaaatggcaagaatagtatccccatctcaaaatatttgtcaaattaatattttgtatccacataagcatccacatgattttttttagtataaaaaatcactattaacgactgtgattttaaaagttacaaaaatattcttaaaatcatagtcacagactgtggttttataaatttccttaaaaccacagttagaaactgtagtttcaaaattatttttaatctacgtccattttaatggcattgcgattttaatattatttttaaaatattttttatcataataaccataaaaccacagttagtaatcgtggttttaaaaatatcataaaaacccacagtcatagacggtggttttacaattttctttaaaaccacagtcataaattgtggttttataattttctttcaaaccacaattaataattatggtttcataaatatttttaaagggaactcatgtaaccataactaaaaaaagtatgggattttagaactttgcttttttatttttaatttttagtgtaaattatagatgtacaaaaatttcttaataatgtaccaaatttccttaaagttcgtttcggagtagggaaaatttcttacaattttctattgtcaattgaaaattattattttttcgttacgactattttaaaattatatatatatctttattttttcatattttccttgaaattttgagaaaataatttggcctacatgcattcccataaaaatttatatatttatggtaaataaaatatttatttttttatgaatattttcacatatgaattaaagaaaattatttattcacattatttttaaattttaaaataactaaacaaattgtttatattattttaaaattttatatttttatatggaaaataatgctaatgattatgattttaggttattccttattaagtatgatttaaaattatgtcttggttaaaatgtataattttttaattatatgaaagaaaaaataggtaatggttgtaagaatttgtttagttagaatttctttcatttagactttaggatacatttgagttttatttgttcaaattatcaaggaaatgggtgaataacataacatcagtaatttgaagtaacactttatataaccttaaatgtatgaaccaaagtattatagttctacaaacatgaaaaaagctctcaatgtgtcccacatgatggaatctttctcttccgttgtgaacatctacgatagatggtcatatttgttgtatccatttgtggtatctgaaaagtctccatctttatagactgtgacacgtcatctacatgacctatcgagttagatagatggaactgatggaggtagaactcgacgtacatgtagagatcaatgtcctctaggtacccgtacatgtaatcgtgcggcatgagttgctccctgaagaaaaggtagaaatgcaatggactttgtaacaggtggaggtgtaatagaccctataataggtggggtgtaacagactttataataggtgggggtgcatccaatgatatagatggttgggatgaaggtggagatggaggtgaataagtctatatagatgtaacatgagggaataaaggtaagtctaatgatatagatggctcaacaagggtaagagtagatggtatggtagtctctggtcgagatgaatgggctagtatggatacatcagtaggaaagagtggtgactctggctgaaacagaggaaaggtagatgtgactagtggatgtgagagttgtaccaaagtagatgccaaagtacatgtcggtgactacctcaacgaccacctctcccccgacctctaatgggtggtaccctaataggcgtaatcaatgatggtggtctcatggatggccctaaagatgtatatggctcatgtgttaagtgtacataaaacatcgatagaaattcagtgagtttcatccaaatcatttgaaatagccatatgcgatacgacaatgatttgtataagaaaataaaacatgaggcatttgcacataatttaagtttaacattcattaaaaaatggttttgtatctcaaatggtctcaccaataacttagtggtagaagttgtactatggaacctcatatgatctttatgcaaaacaagtgcgatcaagcgtcgcgtgatgcgtcgataccactacatatatggatcataaaaatccatggtagtaatagcaagtggtgttgttgcaatacactcaaaacaagtagcccgaagagaaatataatgagcatggaatgtcacccaatcatactgatgtcgtccttgcctatccattaaatgtagttccatatctatcaagcaaggtgaaagtatcccttgttgcatacgaaactggcgtaaaacttgctctggtctatgccactcgataatatcaaagcatattagaggtgatatagttcgccaaatttcttcatcagcctgacatatagccaaaagatgtgcactcaaatctgttgtatatggttcccataatacctgtaatttataaaaaaaaattaattagtcacattggtggaaaatgttgcaaaggtaatcttacgcatcaacactttacctgatctcgtgtctgggcatccaattgatcttgatagaatgtcaacacatgtggtgatgggttatgagacaatgacagggatactctccacccgtggcccaatggatcgattgggagtgcctcatctgacaatagatgatcatgtaaaccatcaactacctcatcatgtacatgtgggactactataggcactggaggatgacggaaatcaggttgacccacatgaagcctctctcatgaccacaactacaaaataagatagcattatcaaaattagacaacttacaacaataatgtgagtcaattaattagaatagatagttatgtcgaaatacttgtaatagtgtgataggtctagaaatctctatggcactatccaaactcgcatagctctctataaaggtatgccaacactgcactgccccgactatagtgagaaatctcagtgaattctctcaacagtgaaagataacataactgtaaatgtgtgccagtcttgtctgcagagaatgctccacccaatagtgttaatatgaaagcacgagcataatgctataaaataacttcatcgacccctgctggtggatatgagaattgctcatgcaaccattgtgctgatatagctaaccctttaatctgagatagaggtgggacaacaccagacacctaaaagctctgaacatagtagtgaccaatctatgtcacatgttcaagtgataggaggcccatgaatacgtaatcctagaatcatggctacatcctataaagtaacagtcatatctccaataggtaaatgaaatgtgtgtgtctcaggccaccatcgctcaacaagactcatgatcaatggccaatctagtgaaatgtgtttgacactatatacaccataaaatccagactgcatcacatatcgccgaatacaagggtccatctcccactctcgcatgaatgtccataaacgttgtcgacatgtcaatacccgattaagctacaaaagataccatttcgattaaataagaacttaattaaggtttatgattatgtttttatatacatctatatttatatatacatatatacctaaccagaatccactaattgagacctatgtctgtcctgtagcactaaaatagagcgatctaatggatctaaatcgaatctgccctctctatgctccattactatactatcataataaactaatgttaatattataatttaaaaaatttcaacagagtctcccctataaataagatattctctaaaatacaaacaacctaattaatcaaaatattcatctacaaatgatatactattgtaagactaataattgttaatattacaattttgaaattaacaacaaagtctctcttataacataggtattgtccaaaatacaaataacataatattaacatccaaagcccaacacccatcatgaaggcccagcacccatgttcttatttggacaagaacgacgattgtgaccattttgtttgcacaaaccacatgtaaccgaggttttaccttctctaacatccatttcattgtgcaaacgagtagatttaggtcgtccacctgacacgtttcattgaatctgcaggcacaataactaaaccaacatatggtggccactcatactcattgtgtatggggttaaacagtggtgcccaagagctaaaatatgattgcataatataataatgttgaacaaatgatctaaaatcaattgaatgaaaatgatattccgctagaatatgactacatgggaatccgtatatgagtggtttgccacatgtgcatccatgctcacataggttaacacgatatgttcgcctactagatgatgtccttttactacccctattagccttcacatgaaacagtccttggaagtggtcatacaaaaaaacctcatgagaacctggcttaacaacatttgcattaatcttagcatcaacgtaaggagtgtattcttcacctgaagcaaatcgactagcaccatgttctcttcttacagcaaagtaactattaactcaatagaatgtcaattgaacaaatgcggtgatagggaagcttcgtgcccctttaagcacactattgaacacttctgacatgttcatagtcattatgccatattgttgacctccatcatgtgatagtgcccatttctcaaaaggaataacctccaaccagctaagtgcgtcttgattaattttcccaattgtgtccatatgcatgttgaacttttctaccttagtttctaagacagctttgcataaaatttgtttcaagcatttgtccttaaagcgagtcataaagttgctagcaagatgggcaatacaaatccaatgatacgcatttggctctgacaaaccaagataaatatcagtaaacgcagccataatgcctgaatgacgatcaaagataacacaaagacccctcctttgagttactcgatttctaatacatgccaaaaaccatccccaactatcaacattttcactctcagttaatgcaaaagcaagaggaaataattgattatttccgtcacagcccatggcaatcattatagtgccttattacttcccatacaagtgtgtaccatcaatagtttgcataggacaacaatgcttgaagccctctatgcaaggatgaaatgcccaaaagactcactgaaatacctcttcatttcgcatattacctgggaatgttttagaaattacaacacatcctggatttgcttgctctaaggcatcaaaaaaaaatgtggcagtttagcatatgatttataaaaatcaccaaacaaattagttaatgctttacgcttgccttttgaagccctagtgtgtgagatccgatacccgaatctttctacaacacttgcttgaatggcagccactgaaaatgtgaattgtgtcttaatcattccctctatatgggtggctatcaagtttaagtctaactaatgatgatcttggttcatgcaaggattgacacatgtgtgtgggccactatatttgttgatctcaaataaagatttccctttaacaactgtagcatgaagtctctaaggacattgagactgttcagctttcttgcatcttaggaccaacaatttctttgtggatgacaaaacgatatactcttggtgcgaattaatataatgcatctttacatcatgttgtaaatctcctttggaattaaatatttggcccactatgaactctccgattggatgtcccataagagtgttttcccatgggatccaatcacttgacacaacatgaccaatgttttcaacattttcaaactgtgatgatggtgccaaatgatactaaattagatataatttaattgggtcatctaaatcctttatatttggactgtttgacaagttacatctttccccatccacagccacatatctcgtttgttctctttcaattacctcacaaacagctaaaaaaggcaacctaccttctctatcccgaattatcatcattatggacatcctcggctcgtacactatcatcatcacattgtattccttcttcgtcttccccatcctcttctaatctatgctcaaaagtaaatggattttgaacattactagtaccatcattttcaccaagtaacaaaggtatgcaattatcaattggtgaattcatttgtaagtcaataggtacttgttcaacaaataactcaacttcatccaccccaaatctattatgcatttctaacattcgagctacaccactatcattctttactaggcaagcttggaatttattccctcttttcataggatatttacaactaagaattaattgaaaatgttctttattgatgtcagtgaccgagtatatcatttccagtagttgttcgtatgttgtcccaagaggcacatgaataggttcaaccacaactctatccctaacataatcaacatcggtttgtgttctcaccattttcccattacaaaaacaaactattgccaccgataaattagacatagtttacctatagaagaagccaaaaaaaatcaaatcaattgcttttttaaccacaaaattacacaatagaaaacattagtaaaaacatcaatttgtaatgaaataacaaataacaataatagggtataccattgacaataatcaaataacaaataacaccttaatatccaaataattcaatgttttttattaataatattttcttattatttattaccattaaaattgaataaaatgttgttatttttccattaacaattaaaatgtcattgttttgaaaaatagtttttaagaacagtttttggtttttttagaaataaaattgtgtttggaaactgaagtttggaaaacaatttttgttcttaaaaatagaaaaaacatgtttggttgagttaataaaaaatgtttttttataacaaataaaacaaaaaacatgtttagaagttgtttttttaaaaaaaaaattaatgttttcttcataactcttctctatttataaaaaaagatatatataaaaaaaattcaacaaaatataataataagagggtgatggatttgaatgggaaatcaaattatatttttagtttttattttattttaaattttggtcatatattttttattttaattacaataaataaaaagatgaaatattttaataataaacaagtaaatatcatactaaatgaggattaatgataaggtaatcattttcaataaatagttagattttttaataaaaataaaaataaataaaaggttataattcaaatttaaaacttttgttactactctaaattgattgtagaaacattggatacaaatatttaaaggaaatattcacaattatgtaaaatcagacatattttattattttaaatattggtaaaaaaatattattaattaaaggatttattatttataaggatatttattaatcagatatatttatttgaaattttcttaactatttgccttttttatctcctattttttactaaatcttatctctccaacatcctttccaattattctaatttttaaaatataaaaaaataaattttttttaaacataaaaataatttgataattaaattaatcattaaatataaagcctttacaacatgtttattttatttttttaaatatattttctttgattaacttaatattttaaagataaaataaattatatccatttttcaattaatttttataattttaaaatttttaaaaatttatgcattttttaatataaaaacaatttgtttaatctttttttattttcctttttttaataaaaaaaattaaaaattttaaaagtcttcttccttcttctcgcagacataggcaatctgctaaaccacgttaaatctatgtgttttcttttcgtttttctctaatttttcaccaggaatcgttgcatgaaaatcaacaatattcattcttattctcattctcattctcattcttattcttattcttatgtattgtcaatactactcaaccccagaacatgagctatatattggaatttaatgtcataatcagatgtttatggttttcttttcctactaaatctacattttgttttatttaggtaaaagggaacttgtgacttgttccaaagacaaacaccccaactgtttttcgcagttctaagaggtctcggttagtttgggattataaca

SEQ ID NO: 12934 - DNA, 7834 bp, Vitis vinifera
  Intron number 15 from transcript GSVIVT01029087001 (locus GSVIVG01029087001) derived from phytozome v7.0 (chr-ID chr 5; pos 12271832 to 12279665 reverse strand)
tacgccataactacggaaaagaaggaaagagaacagtaagacatcaccttaacaccattaaagagcatttagatgtagtattgatttcatacaggagatcaagaatcggttatttcactgcatgtcataagttgtgggccattaagaggtttgggccctttcttttccaattttatacgactaaaaagaccaaaattagaataattgcttactactttgctcaaatccatattttattaaccatgctcgtttatttaaaaatttggaacttggaagcaagtctttatgctctcaaaattgctctaaaaggtttcatattccactatgaaagaaaagattgaaatatttcaccaaagaatgtcattctgcacttatagatctacaattcaactcttggctcaaagtattgtaattatccataacaatgctactacaattatattaagtatgaattccagtgcgggagctttacaattaaaaggaagataaaaaagaacttaccatcattcatgtattcttatataacaaagatttgcttgtatagacgtatttctgcatgaagagagagataataggaataataaccaagcacataaccatagtataatgtttaaagtcttccccttctatgatcatctgaagttttttagttatttacatgctctgaagaaaactgggtcccatgtagtaatggtgttctattgtattgatgttgatttgagttatgtgcctactttggattccatattgatttctataacaggagtaatgcctatagaactttcttccctttattgaaagctcatggttggcatattgtggaatattgaggtctacattcaccttatggttcaaaattgtagttaaaattttaaacaggataggtttagtgggaaccctataaaccctttaaagtctttaatgcatacacttttttattttttgattactttttaactttgtgaaaaaataagggaaataaataggctcttgctctgattagcaaggacttctcctaaaactagagatatagataactctaaagaataatccaaaacaacaaaataaaagagtcctaatccaagccgaccttatttattttgaatgcctaacggataaagtactaactaatagataagataaaaactcataattatctaactaacagataagataaaaaaaactcataattatctacactccccctcaagctgggcaaaaaatattcaacatgcctagcttgctaaccatatactcgaagttgcttctagacataccttttgttaaaacatccgcaacttgctcttttgtaggcatgtaagaaatgtctaagactctactctcaatctttttcttaataaaatgtcgatcaacttcaacatgtttggttctatcgtggtgaaccgaatttcatgaaatttcttaagttgccttgttgtcactaaaaaactgcatttgctggtgtactcctattttcagctctttcaacattcgtttaatctagaaaccttcacaaattttgtgagcaattgcacgaaactcggcttcagcactacttctagccaccacactttgctttttacgtcccacgttactaaatttccccaaacataggaacagtacccaatagttgaacgtcgatcactttctgaccttgcctaatcagcatctatgtaaattttgactcatttcttcattttttctaaaaaacagcctcttaccgggagtagttttgagatatctcaggatctcgtacacctcctccatatgatctttagtaggaaaatgcatatgttgactaacacgactgactgcaaaggcaatgtctaggcgagtatgagacaaataaattagcttaccaactaggtgttggtacctccccttgtcgattgacattttctcatctaaatttccttccctctagttaacttccataggtgtatcaatcggtttgcagcctagcatcctggtttcttcaagaagatctattgtgtattttcgttgacacacaacaattccctgtgtggttctcgccacttccattcctaagaaatacctcaagaggtcaaggtctttaacttcaaactcaattgccaaaactctcttcaacttctccattccgtctatgttatcccctgtaagtataatatcatctacatacacgattagtataacaatttttccatcaaccaaatgtttgtagaacatagtgtgatcaacatatccttgactatatccgtgtcatcttagcacttgggagaaccttccgaaccaagcccttgggtactgctttagaccataaagagatttgtttaacttacacacctttttgttaccttggtcatcaaagaatccgggtggaagttccatataaacttcctcaacaagctctctgttcaagaaggcattcttgatatcaagttgatacaatggccaatcagagttagctgccaaagaaagaaggatccttgttgaatttagttttgctaccggagcaaacgtttcagaataatcaattccgaaagtttgggtgaatcccttcgctacaagcctggccttgtatctttcaaccatccgggttatatttcactgtaaatacccatttgcagcccactggatgtttaccacctggtaaatcaacaattttccatgtattatttttctgcaaggctttcatttcctccataacagcttccctccattttgggtttttcaaggcttcatgtatattcctaggcattgtttcttcagaggaaatatgggtaacaaatgcttgaaatgaggttgacagcctgtggtgtgagacaaagtttgagattggatgttgggtacacgatcttactccctttcgaagcgctactggcttgtttaagttgtcacctgtttcctcacaagtttcaccttgaacatcaagtggactgttgctgtcagattctagttctatctctggttcagacttttggcaagttcactttgaacatcaagtggactgttgttgtcagattttggttcaatctccagttcagacttttggtcaactcatgatgtgttgagctctatttgttgagaaggctgtcaccgagaatagacacggagctgttgttttggtggttctgcaggtggtgaattagtatcttcccctgtaacagaattttcgagcattgatggcactctagattcagttataatgggtgattcagatagtaatggtggcagttgctcagttggtgggctatttggcaattgaggtgatgatatttcctgaaagcaatcttcactcatatcctccccttgaagagtggtgatgggaaagtacggttttttttttcaaaaaattggagatccatagtgataaaaagcttacccaaaatgggatcaaagcatttgtacccatgtttagtggatgactaacccaggaaaacacatttaatggcacgaggctcaagcttagacctactgggagttgtgtagtgaacaaatgaggtacaaccaaagatttttaagggtaagttctgatgaagccaagagttagggtaggattgaagcagtgtgtctaagggtgttttcatgttgagtaccctagagggcatttggttgattaagaaggctgcagttaagatagctttgccctaaaaacgttttggcatgtgggtagtaaacatgagggatcgagctacttctaagaggtggcggttttttcttttggcaatgccatttcattgggaggtgcctacacatgagctttggtgtatgattccatggtcttttaggtaaggtccaaggatggaattaaaatactctgttccattatctgttctgaggatctgaatgtcggtttgaaattgattttggatcatagaatgaaactctttaaaagtttgggttgtttatgatttttcttttaataggtagatctagcaaattcgtgtgtgatcatctataaaagatatgaccgcttagtattggttaagtttggaactcgtgagggaccccaaatgtcgctatgtatcaaggaaaaaggtcgtgaggctttatacgatcatggtgggtaggtatttttatggctttttgcaatttggcatatttcacattgaaaatcagaaacatttttattaccaaatagggctggaaaaaaagattttaagtacaagaaattggggtggcctaacctaaagtgccatgacattatttcatcattactagaaaaagaacctaactcactacttgcagcattagcttgtccattctccatggctgaatcctcataataatagagtccgtcacattcccaatctttcccaatcgttctccctgaagatagatcttgaaactcacaacaagaagggaagaacttagcagtgcaattcaagtccttggttagctttcttactgacaacaaattgcatgataaatttagtacataaaacacagaattcagttctaatgaatctgaaaaagaaacagtgccctttcctgccactgaggatagtgtaccatctgctatcttaattttctgaccatcattacatggtatataggatgaaaacactttagtggttcctgtcatatgatttgatgctccagaatcaacaatccacaccattccttttgtacgtgcagcattaagagcagtaagaaaggtacctttctgagctactgaacatgatcctatattagaatccccattcattctggttaatgaggattgattgagaagtttgtacaactgctcaatttgttccttgttaagacggatggtagcactttcggatccttctgatttgttgaagttaatattcggatcactagttgaggtttgggcttggaatcctctaccttctggttgtctccttggtgtccagtttgctggctttctgtgaattttccagcaagtgtcacaagtatgcctggtacggttgcaatggtcgcaccacaggcattttcattgctctccattgcttttgtccgctggtacactgcgtgagacaagggcagagccatcaaccagcccttgattgttgtttttatctccaagcatgactcgttttcgatcctcctctcttcttacctcagcaaaggcatcgttgattgatggaaatggcgatctgcttagtatccgtccacggacttcatcaagttccctattaaggcctgcaaggaactcaaagacaccctccttctcgatcatccgcttctgtttcaggcagcaatcttcacatcccaaatcagattcataaaataaatctaattcctgccaaatattttgtaattcagtgttatattgagtaacactcatcgttccctgcttcatttcttttattcttgtttttaaatcaaaaaactgtgctgcattgtccatatccgagtattttttttcttgtcgagtcccagattgcctttgtggatgagagaaacatgaaaatctgaccaatctttggttccattgaatttatcagccatgccattacaattgagttatctgctacccatgacgaataagtcagatctgttttgtttggtgcactcgtttctccggtgaggaagcccaactttcctctgccacaaatcaccaatttgacggactgggaccattgaagataatttttcccatttaatttgtgtgtggtaatctacagggaggcgttatcgttgacctggaacgttgctgttgtttgcattttcgcctgaatctggctgtctcttcatgcatcagttctgccactgctacctgtcattgccgtctttaccattgccgggattcataagattttctgctctgataccataaagtctttaatgcatagaccttttttttttttatttattcttttttaactttgtgaaaaaacaagggaaataaataggctcttgctctaactgattagcaaggacttctcctaaaaactagggatatagataactctaaagaataatccaaaacaacaaaataaaagagttctaattcaagccgaccttatttattttgaatgccaaacggataaagtactaactaaaactaacagaaaagataaaaaaaaactcataattatctacacttctcactagcctgaagttgatgcaggtatatggttcttttcatccctagcatacctgatctaaaataaaccacacctactccattggggtagaggacagggctggctaagacaggatagtggaccaagaaagagtgggtgcaggctattgaagattgaaagaacgatccgatattagaaatgaatctcggtcaatgaaaagcagtcatgaatttcattctgtattatgcaaattatgatttttgaaaacccctcccattgattgagccagcagtaagcaaggtagtagttctttaggcaacctaccaaaactatatggttttaaatgttcttggcacaaagttgatgtagatttgcctagttctaattgtgcttctgttgtaaaggtttgacaaaactaactcatctaacctgttatgacctctataataaatgataaatgtgtcatttaaacttaaataaagttgtaacatacttaaagggtttcttttcaatgaagaaacctcaaaaatacttagctttcctcatcattattctatggcatacatgtcatgagtggatcatattaggtgtatttgtttaagcttgttttttatcaagtggttacatttttgttcagaattttgacctgtttgttaacagcacaatatggtttgtgccttagctttgaatgctctctctttctctggataaagacatgaaaaagcatgatttgttgctaccactgcttgctttctccataaatagaaataaagttgctaaaaggttactgaggaaagaacattttattgaacttttgatcagactgctcgttgttttttagtgttattctatttctttccttccaaatagtctaaaaaatgtacagaggagtagctctccatacttttttctgtttccttcctacaaaggagtcatgccaacttaaaagagtttctttgatcgtggatgggtgcagacgactactaagcacctctactattccaagagagaattctcaacttcattgtcaatgataaccagttcttgtcatgtcctcccctcttctcccatgtaatcagaaccaacctcacagaaaagaggaaaggaaaccatgccacttagaggtttcaaaattttaaaaagggaaaaaattgggaattagaagttttcgtcatctgtgcacaaggaatgatccaccgatgacgaggcttgccaacaagattacagccaataattgaaaaaacatccttcaaacctctttgcagtgaagctagcacatcggatttgtgagcccccttagctgcctgactttgaagacaccccctttgatgaaaacacaacttagggaagctcctattctcttgaccccccaaagagatctcctttgagccctatggatctaaagatccctttaataatgctaaggcctggcccaatctgttcccaaaccaaacaagcatgagtcctcatctgatttagggcggtcgaaaacacttgagccgaggatctttcctaactcctatctacacttgaaatggcttagatgaggtaagaattgtatgatgctataatccatattgcaattttgacaacaatgattgaaacatatatgcaattttatgtcttttattgatgttatttgtacacatattgatgttttgctcacctttttacttaaaagtgcttaaaaataagatatgacttcctatatgtgcatgtaaaccaacaacattcaaaacatttttgttttttcctttgcaggattacacaccttattcttgtcaaaaaattatttc

SEQ ID NO: 12935 - DNA, 2784 bp, Vitis vinifera
  Intron number 3 from transcript GSVIVT01031558001 (locus G SVIVG01031558001) derived from phytozome v7.0 (chr-ID chr5 ; pos 17993075 to 17995858 reverse strand)
agtaagtcatctaaattactaaaaaattctaatatgaagtcaattacatatgtgatatttttaattatgcatcatgctttgctaagtgcctagtttttcatccatcttcatgttccatttaagtaagaagagtctgaatgatgtgtgtgcataattttattttatttgatgataatttcctgttgcatcctactatttacccatgttgaaccactttgggaattgaatgagttctatatgaaagactaatagaaagctattgttgatcctatgtcctagaagcatccttgttatactaattcaggaagagtttttttttttttctttttatatttatttatttattttatgatgatactgccacttcactaaaaagatatataggaatttcaaattaatggatccttttctgttactgcatgaggtccctaaccaattgtagcaagagttctgctagtgtacttctaactgcaaggtttataagggaatatcatgtatccttctctttcactgcataaagtccatagaatggcaagaagagatctgctacatattccaactgctgtaaagtgaggcatgacaagtatgttgtggcaactagccttctctctgtttggtgtgacatgggtgattcactactcagttaaagagaacgttctaagttggcatggttcttttgtggggaagagagcttggaagtcacccccttatgtatgtttggactccctggaaggagagaaataggaggtcatttgaggatgctgaacggtcagatcaagctattaaatactcttttatggccagtttcttggaatggattaagccatacatagaccatcaatcaatatccatgataagatttgtagattggttgtgcttgatgtaaggggagtgaggttgttttttgttttttctttccttgttttgtcctttaacacatgttgtatatatcatgtgtactttgttgtgctctttttaaggtactaataatatatctcttttattgcctatcaaaagaaggaaaaaaaaagaaactaaaagaactgatttctcattttcttaatgtgttcggtcatgcatactttgcttaaaatttttgtaaaaatattcctgtattgaagtttcaatgatatttcattttatataaaatccctatttttccatcattttatatacttgaaatgcaatccgatacatgtattttctttacttgatgatatatcttaccttgtgctttatgtatagaatctgtcttagacctaaatatcacacaaacatagtggactaataataaaagcaaagaaagagaaaataaaagacagtcacacaacatatttgagatactgatacagattacatcaattccattttactttgaggtagaaagaaactgtattacattaacttttaaccttctacattagtttttctgctgtcattgaatattacatccttcttcaacacccaccacccacaccccctcgaccccttcccttttatttccaatattttgaagtcaataactaaattacaaattccacatccaatgaaatacgctgttggtatttaggattttattgctattcttagaaccaatataaatatgagacacaacgaaaatattcccaatatgataagtttttaccatttttatttaagcactgttccaaaaccttacagattctctattttccagaagtacaatcttcctagaaattcatttacggatgttattactggcaacttctttttcaacatcacaaccttcattctcttatagttcatgtttctaagtcaaccatcctcttcaccgtatatgctattagggattgtttctgtgcctcaagtgacttgactaattaaagttaggtccctttctttttttttaatttcttctcccagataaccaaccagcatatggttaagttggtttagctgtttgatattttccagtagcaaccaacatatgaaaaacaattaatactgagttgcatgttttttaaaccatgttcctcgaggggaaaagaaaacaccatgacctttattttgtatttggcaaaatcttacatatcaagaagcttattttgctgtggaacttttgcaaataggcaaactctttaagtgtttcaaattaaatcaatttgattaaagtttagccatccaattgagtatcagaaatttctaaaaaaatttcaccgttgtaaatttggttgaattttctaattgcagtgaggtaatttttacttcattttgttcagtggaccatactcaccatatagtggtttttgattattttatagatttgcatttgaatggtgttatttctgaaaacctaattaactaaaaaggaatgaagagtagaatcatcttatttcatatattttctactgattaccttccatggatgccttagctagctagtttaataagatatgatcactttgccaaaaaagaggaaaatgaacagaagtttcacaatgtgtaggcactcaaatcacataatttaagcatttagagaaggatatattattatggttccccatacttctttagtcaaaccttcaaattttatcaacagtatttgaagttttgaaaatgtgactaaaagaagtatgaaaattgtgtggcaaggtcatgtactcaaataaagtagttaagactcgtctattgaaagcattcaccactttaaagcttgtcttccttgcaccgaagaaattctagaaataactctgtaatgaattgttgttttcaggtgtcctgcactgaaagttttggagctgccca

SEQ ID NO: 12936 - DNA, 7833 bp, Vitis vinifera
  Intron number 1 from transcript GSVIVT01010020001 (locus G SVIVG01010020001) derived from phytozome v7.0 (chr-ID chr1 8; pos 13511801 to 13519633)
tcttcctcatcgctttcatcattttcaaagatctggtgcgtctctctattcttagggtttgccaatttaatcagattctattttgtctttatatatatatatattgttattatcaaaatgattttattgggctctatcaagtgtagattcaattgcaccgtcaatttggttttgtgtttgattgtctgtcaatcatagtatatggatctaagattgaaagcatcgtgggaagcgtgtctgtctgtatgtaatttgatgggtcatagttgtcaggaaggttcttttggatgacagttggcagtgaaaatttaaaatttgaaatggtgaccccatgtttgatgtggggatagttatggcattcagaagggccttcagtggtagcaagagcagagatgaagatgtgtggggattcccctgagaactggaacctggcttaagagtagttttccagagttggaacctatgaagcatgcgtaaggccataagaatttggtgtttgaatctttcctgggtttggatgggaagttggatcggagtttggattttttggaactgagatagctctaactttagagctatttgcagctaaaatagtaggatggaggggactttgtttggttgcttggtaataatagaattggatgtgcagccttgtgttcgaaaaggcagagcaactaatagggctagagatgaggccttgccctcataaccattgtgagtgggaaagttgaaccagtacctgggagagcaaaggagaaaatctctgtagtttaagtatgttatgcctttcttgacaagacagtatttctaatgacagaataatagattcggtgggagataatgagatcacttaggtcctgctaatgagatggactagcctcataagaatatttaattccacattttcccattaaagtcatgacatttattaataattccaatggcagtaggtaaatctgtgaacatctttttgtgataagtaaaggcaattgtattaaaagaaaaagtatacacgacgtatacaaagcaatgaaggtacgaatacacaaaaacaagcagccacaccctaagaaaaacctaaccaatccacaaaatctaacaaggacatagaaccgtccccaatgtacaatctagcacaatcccaaaataaatacaaaaaggagcttttaaaagtttgatctaaactttcacaattctcaaaggctctcttatttctctccctccaaatggtccaaaaaatacataaaggagcaactttccaaacatttttcctttttctaccaacaaaggagcttccccaactcaaaagcaaccctctcactgaagagttcatcacccactgtacatcaaataaaacaaaaattagttgccataaaatgcgagctttcaaataatgcagaagaatataatcacttgtttcttcttctttacacatgtaacatctattaggcatcacccctctctctcacccctttcgtgcaccaacccccatcttcttgcccatacttgccaacaattacccatttccaaagaggagctctttcagttgcatatctccaagaccgctttcctaaagggcccttattaaaggtcggaaggtttttgaaacccaaaccccctttcgatttttccaaacacacgatagaccaactcaatagatgtggcttgttaaccaaagctcccccttcccaaatgaaatccctttgtatcttttccaatctagtcgccaccctcttagggatgacaaagagggatatataataaatcggtaaactagaaggtgctcttaatcaaagtctgtcttctaccttttgagagatactgttgcttccacaaagtaagccttttttgaaacctctcctccaccccttctcaaacccttgaaaacttgtaaggcacacccaaaggaagacctaggtaggtggttgggagagctgtcacctgacaacctagaatctcggcaaactcctccatatttggcaagttattgtccaccaccaatattaccaacatgaacgtcagaatcacatatcctcttgcttgacctcttgtaccatgaccttgaaaggaccctctcaatgtgcaaacatcaccgaagatattaaggagaatggaaattcagtggttgcaagacatagacaagaagatattattatgagataaaataccgcatgggtccttccctttatagtcagggtactcttttaagttgtcataactcctttgtgagaagaaaacataagaagttttggagagctgctcttctatacattttgtggactatttggaaggaaaggaattgaaaggtgtttgaaagtgaggaacaaccgattcaagctctaaagtgttctttccttagaaatctagcattgggtgcatgtacatagaattagactcaatgcttttaattgattttgttaataaggtgggctctagttaagggagggagtagttagtttagactttatagcaatgccttttggtacccattgtgtaagtcctatgtaccttggtgtatatatttttttatatttattattcttccttgcttacttataaaaataaaataaaatactgctattaccagtcacaatctgtgttcaaatagtttgaagattgggttaagtcctgaaaagtaattggaagcatgaaactgcttgagtcctcttcaagatagttttttagctcaagcctcaaacttttatttccatgttggataacagataaattctcatacaacttgtaggttcaagttaaattcttgtccataaaatacatctcagaaactgcatccttgatctcctttagatgtgtttaaagacaccacttatactaaaatttgtctccctggtgttccataagccagccggaagaaattgtcatagtttcattcaataaactacttattgaactctgctagtactttggacataatgtacttcaattgcacttctggaaaaccttcacagaatcatagattaagcccactcaagattcttgactctatttaacttaataatagtgttttgtattccaaaactgtaagcaagcatcctaaaggatgagaaaaaaattaatattgactaagattatagcgtataaatgacaaacgaagctatatgagataccttcagtcagaagtctgtcagaagtctcatagaatgtgattgtggttctgataaagatttaaaaaaaaaacttgggttttagcaatttgataatggttctttcctatgacttctttctggctgggtatctgtaaacataaaaatggtgtgtcaatccttgtaaaaggtggtaggaatagaagagagtgggagaagaactttcgtgtcaccatgcaagaaagaaattttaagatgaaagtaagattctataaactttggagaactcttagatttgtccttcagaaaataaatccatgtttttcaagtaaatgaccagaaaataaagtatgataatccacaggctttattcaagcagaaatacctcaggaaaggtaacagagctaataagggctttcatcttataatataatcctataactctcttacctcacaaccaaacaatgataacctactgtcaaagtacagggcatgaataatttgttttccacctccctttttttaggtgtgcatttgtttttccttttttccctccaaaatttgagatttctccaatcaaaatattttctatacagatttttctctgtatccataatattgtcttggcctagataattattgatagcaataccatgcagcatgttaaataatttgcattttttaaatgttgtaactataaaaaatatcttggttggtatttacttaatggtgatctataaatatttaagccatttttatcttcactactaatgaatttatacaatgaaggttatatctttagtgttattaaaaactttctttgcaattcgatttgtctgattcacaatcattttgtttggtgtcatgaattaattgattttttttttcatatgaatcccatttatttgaatctttatttttagcttgggtgggcagaatttggttttggtcagtttataaccaaccgacgaaccgatccaagttggtctgttttaattaaactggaactgattaatttattgacccaaaccaaccccatttaacatcagttcagtttgatttggttcatttgttttggacatcaactagattatcaaaccgcaaattaacagagaaagaagcagtcaactaacatggggctatgtggctggaagttggaggagtgaaggattgatgggctccagctggtgtaggttattgtgcatgttgaaggttgaggcaaatgaaaatgaggagttgggtttgtgtgttaatgaggaatgaaaaagaaaagtaatcatgtgttgggttgtggattttgtgggttggtgccctattagggtagagtggtagaggatattgggttagtgtggaccaatgactaaggatctgaggttggcccatatatttttttaaaaatgtttatacatagtaaatgttcggttcagttttacactggtttgaaatattggtaacctacaaaaccaaactgaaagcttcagtttttttttttttttcaaattaatccaataaaattgaaaattttgaaacaattgatttgattcagtgtggtctggttttgcctacccttattttagccggagaatgttgatttactttattttgccccttttgcgttactaatctagatcatataatcaaaggtgaatacttttattgctaatgacctcttaaccagaaattttcttatggcttcatttgtaatgagagttgaaactaggaactttcgcttttggatgaaagcctcgactctgattctgaaatactgagtgaaaacctagatttgggggatttatttggaaaagtcagggaagctgctgaataattctaagatcatcaattctccataggcttgctgatatattgaagaattaactggttatgtgtttctttcattatttcttgttacttttggcttagtggggaatcttttaagctttctaaatgaatggtttttaggatgtgattttttttctttttttaaaccacaatgatcttctgaggaatatatcattaaataaaaaatgaaaaataagtaaataaataaatagaaaaggtgggatagaattggtacacctctttttgggcatctaaccaaggattccatgggattctgattagtattatgtttatggattggaaagttatgttcttcaaaagttagggaaaaagtgaagctgtcttagtgtttccctcctttttatagttccaagtcaaattttgattattatgattggggtggatgatgccaattgtatatatatctgattcatcaaagatcacaagggagagaaattgcatgttttctccaagtcaaccaggattgggtcagccattgatgctaattttttttgccctttaggaaagattactgagcacctaagctgggaataaaaaatctccttctgaagagggctctgttgttatatcctaggctacctcagggtgtagagaccactgttggattgttcatcagatgagaaggatccatgttttcccccatataataggaacctgaggacaagtggacaatcaagtggcctatgttttggctaaaattggagctaactaatggactttgttgggatctctacaccaaacacaccttagttctctgtggattttgcttttcttttttgccagttctcatgtagttgtctttatttaatgatatctcttatttcctgtattcttctttccttttttatttcttctaatgagctgttttttttattttaaagaaaaccatgatcctgatactgatagaacataaattatcatttagacactattattaatagaatcattgaacattaaattttcttttcaacatgatggggattatgttccaaacatcatgagctggtgaccaattggttacttggacaaggatatctggtgatagagttcagtattaccattctagaataatttgatctttcttgtatcattgcattagctgggtagtgggtgtgtttcagtcaggggtgcatatggtatgggttctgctgccagcatcttaactggtgaggcagttagtaaaccatcaagatgaccccttacctgctgtcttcgactatagctgccatttggcctttaccgcatgacataattatcatttgatagttttgttgtcatcaactgtggtaacacgctcaggagggccttggagaaagatgtaggtgcataaaaaataaataacataacttgtatgctatgttcttgtttgggtctttacataaaaatttaatatgaaaatttcagaaaaaaaaaactaggagttttgcagaaggacaaaagtgaagttcgagtagttggctacattgaagcagttattggtgatagtagttgaagttctgctagttgtgagaaggcaatggaaatcattagtgcaaggagaaggattattaactcagtgattgaagatgggtggagagaatatggaggacagctttgacttggcttttgagttggtagtcatgcttcctgccattctctagcttgatccttcttgggggcatgggtactctatggtataaggtgttggagtagtgcttgagaggcatgtcatccaatagcagtagacagactccagggcagatgtgacttcatgactattatctattgctttgtggaggaagtgttttggatggtaataaaggacttgataaagggatcttctgttcaccaacagagcttctcttgcttctgctcgtattaacatccaaccccaaagtaacagtgacccaattgcaatcatcctcgcatttgcacttcttgctgatttctgtaacaaactaaatatgtccagctgagagcaatacaggatgtatcatatgttttcttttgacatcaaaagttgccaaggcaataagttgttactaaagcatggtggtgctttctagagcctgatgaagacactagtcttgcagtagattggaagggaaaatggattttctccctgtgaatcgattaattaactggggaaaacatgccccccttcgttgtgcatcttaattaacatttttgataggcaaataataaatatataagaatatactgaaaagagagggtgcaatccttgtatacagttgagtataatatgaacttccatggaaagatgcaatagagggcaaacagaaggcctgcattaaaacctcactccaaccccaacctatctatgagatctataaaggctgcacaacttttcccctgtgaatcaattgatcaaacaagcagagatttagggatgggtctttccagttagccagctgggacagctccacacctttgaaagtgattctattctgccccttcatgatgcatcagaacaagttccaggatgctccacccaattatcaagcacactagtcttaggctattagcaatgcactctcttaccattgatatcttcttatcaaccaaatttttggtactaaaaatttcttcttgaaacttttttataaaatttgattgatggagaagcctaatctgatatatatggaatttcatagtctttctttatcgatcctgccttcaatttattcatgcatgattcacatatgatgaaactagaatgtatgactgaattcttatatggatggtacatgtgaggtattgtgactgactgcattaataaacttttttctttaattttctgtcaaaattctaataatggaatgaagtgattgcagacatcgaggcccgaatacaatcagattcttgtaaa

SEQ ID NO: 12937 - DNA, 2361 bp, Vitis vinifera
  Intron number 2 from transcript GSVIVT01010030001 (locus G SVIVG01010030001) derived from phytozome v7.0 (chr-ID chr1 8; pos 13651841 to 13654201 reverse strand)
gggcactggtggacgcgttccaagctttttgaaatgtaagttatttagttcttgtgcagattttgacaaataatatgtgccttttatctaaatttatttgttatgcttttctattccactgcatttgcgagtttgtgcttgatggtcctatattcatgacatcattgaactttgatttttctcttgcttatcatttcctttaccacccatgaatgatgccatgcccagctgtcgacctagcagatatttgaccaataatggatagtgcattttgatcaacagaacttaatgttgcaataatgtttgccatacttcatgggttgataattttttgcctaaaggcattatactaattttcgtagaagcacctactactactatgtttgataggtatgtgaaaattggaaacataaccttatagagatgattagaccaagggtaaaatgttctttatgctgcagcattttccataaacatgagatactgacaaatcctaaaatatgaacaatgattcttggaaatttataaatagagaaaatatcctttggataccagttgcattaggggatacaaaccatagacctaccataatctcatcccttacctctgattcaacacctagggataggatagctgatttttgtagcttaactagtttgttaacgttataggcgatattttttggttttgccacttcttcatatttggctttagaccagccttttaaccctctatgagatttgactgtcattccatcatggttaggtaaagtgtgatacaaggaagtaagatcaccattttcaaccctgaacgtagattccactatggataccttgaatccacaaggaaaggtgtaaagaaaactccctattatatcctctatataagaatagattcctcttgaaaataggaaattgttgagaaattattggaaaatattaaaactattaactctttaagatgattaaaaatcacttgcctcacccccaattttgaaaaggaaaagagcaatgaggctgtagacaaaaaactacccaaattggaaacttccagagacactctccagtgagatggattcctgtcatcaaacagtgaaatgggtgttgttggatgacacagtgaatagagacttcacctgaacaactggtaagtttatattatgggtcttgtcatagaaagttacaccgttttaatcctaccataaaaataagggtaacctgggatgcatttgagcaggagctgattagggatctgggatagaaacagttcttggatgggaaagaggcaagcatggaagtacatcataaccttattatgtacattgagatccaatgatgaaacaaaactgaaaggattattgcaatggtattttcaataaaaagtataacaaaaatatcagtgatgtcggggatcctaaagattatcaattggaatatacataataaactcctgggaaaaatgaaccattttgaattaatatctagatcagtgtgaaaacattcacttttcttgtcatttttaaggctctcttaacattctaaagttgttggtcaagacttaattttgactttgattgtaggttaccacagtgcaacagctaaccataggattgccatattggttttttgtctgcgtatgatggggagggcaagagcaatatgcataataaacctcaaatgaaaaatgataaagagagcaaaataaaatgaaaaaaagaaaaaaaaatctgatccatggattatgcaaatatttcctctcagaaacatgggtttaatttgtttgagcattcatttatctagaactgtgttcacacttctatttgatgccttgatcgatttgtgtatatcctctggtgcagatttgactctggtttaaataacccctaacagtttatagtaaaaatgtagtggcataacctgtgagtccaaggcatgcgcatctctctctctctctctctctctctccctctctctcttgatgaccatatcgtctcttaatacatctatggcatgagtcacatgactaattcattttagatggaatctctgctatagtttcagtgtttccttctgcatccaacagtatatctgaccttaatgtattttacatctagagcctatcacaaaaaataaaaaaataaaaaataaaaaatgtattttacatctagggatttaaagaaaaaaacgtgcttttttaacatatagtatgttctccaataagtctgccatgtatttaaaactacaactgtcagctttccctttgtaataatggattagctttccacgaatgcatctgtggactgctactaatatgtttttccagacaggggctgctacttccaggtgggtggggcactgaagc

SEQ ID NO: 12938 - DNA, 3688 bp, Vitis vinifera
  Intron number 1 from transcript GSVIVT01008419001 (locus G SVIVG01008419001) derived from phytozome v7.0 (chr-ID chr1 7; pos 2282356 to 2286043)
aaggctcagatttgggacactgctggccaagaacggtatgcttccttcttcttccttccttccttccttcttccttcagctttattctacttgatcttgatgttgtagagatacaaaagtggcttatatgattagggtcttcatcctttatatgatcatagagagtttatacacagtacaaagtacatattagggagataattgattaatttcgataatttcataataatatggtgctcatttttggtcttttaattgggttgtcaagcactttagacaaaaaaaaaaaagttggtgagattttattgagactgggtcctcctcctccatttcaaagtttgaattatgtgaagggtttagtgtttttatcattattgaattggaaggaaagaaatattattggaattaaataatggttttgttcttttgggtgggatttagataggaacgcatcatttattatttttataaatataaatgaaattgaaatctaagttgatatatatatatatatttaaaaaaaactataaacaaacccataggtaatctttttaatttctctatataatataatttaaattttttattcatggataaaaatgcctaaccttggaagaacataaaattaaaattgattattaattaaaagaaactcatgtaattaaatccgttagtgtatatatatatatatatatatgtataacattaatttaatctacttcaattaaatataaaaagttggtatatctaaaatgcccaaaagtcataaaattaatattatgaatatttaatattcgagtatttggatcatttagagggtcatatattttaaaaatagttttttatttttaaaaacaaaaaattactattaaatttttttaatattatttgatcgttgttttttaaaaataaaatgaagtagataataatttttaaataataagtagaatttgtttttatcatttgaaaaaataaaaggtcaatttgactttattttttaaaacttatttttaaaaaataaaaacataaaaaacaatttttaaaaacacatttcatgcttcctattcttataaaaattaaaatccacttttgttagaatattcctttcctaattcacctctatattcactacttttttttattatttattattatcaagcacattattaaagtattaatatcctcaagcctttagaatgaaaaaagaagcatgaattaacaaaatggtacaaactttatatgcgttcttgatgaacattatcaactttgaaactaaacaaaagactttagcaaagacaggtatcatggagactatggagtcatagtgtgggacccaagaatgtgatgactcttgtccttaatccaattcatatgatttgaaaaatgaaaattatctctaaaaaggggttcacgagaagaataaacaattaaatattccataaagcgaagcactcctccacaagaaagatagttgggcctctttttcttccatgcttatatgctttaactttgtgtcttgtttgtttatgtcacaaggaagcattagaaaaagttcattttctcttcattttgtcttctcatagtaattaatttggtggttcctatgttcttcatgtgtcccatttgtgctacaactattagtattttcaacttccaagcaaaagggcttttttgttactttccaatgtgattcaattcttacatgtctttgagttatgaaaaataaaggattttaaagatctttgaggaggaagcatggagtttgatgagtatgattgaatgttattggaagttaattttatgattcaactaaggtgatggtgtaaaatgacaacataatgggaattattgtactaattggtggtttaatttagttggatttggttgagcaggattatgcaataaatttgatcaatcgggttattcttaatgtcaaaaatattcaacttgaaatcaatttaggttaggttcaaataattcataatgtaaatcaaacctgattttagggttagcagaaggttctaaatattgatagaaataagaaaactactaaagatttttaattgagttttagagaatcgtttcttaatccaatcagtttttaggtatgagagagtctagttagtaatgttttcaaaaataacttttgaaaaaaatctttctaacaattttgagataaaaaatgttttttgaaaactcatgaaaatttcttaaatgattttacataatttcaattgttttccaaacaatttaaaaaagaaacatctaaaaatgtcttaaatttgttcacataaacaacttctaaaataaattctcaaaaaactgttttcagtgaaaaatttattaaatgtgactttttaaattggaaaaaaatctctcatttaaaactatttttaataatagttccaaacatgacctttgtgactcatatataaaaattttggtataaaattcgaataatatctattcttttaaatttaaattagtaatagagcctacataaaatggggacaaaaagggagataggtttaatttgaaaaatattgtattagggtaaccatgttaaattcattttgttttctttatggtacataaagaaaacaaccataaagaaaaacaaaataaagaaaacaaccataaagaaaaacaaaattcatttgtcttacaaaattcatttgtctcatgtacaatcccatagccatgtggtactctatttcatcacatcagttgtctcatttcttaaattgaagtaggagactcccccacttcctgccaagcttaagacatttcatgaggctccacatgcacaacccttcactaatgccttcaacccacacaaaaatattaaggaatgcctcaagtaattaggatatgaggcgaggctttagttgttattgttttgtgcttaaggttgataccattattttatatttttatcttattcttttatatattgattttgttcatttatatttgctctcatatatttatattttattcaataatcttaattttatcatatacttttagactgtgtttgatttctaggaaatttgaggaaaatgtaagagaaataaaatataaaggaaaagtagaagaaaataaaaaataaattaaaactcaataaattatttttatttactatttcaaattcattttatttattttaattcatcgatataaaaattaaataaatttattggattttatcaataacaaaaataagaattcgtatgatactagattaaacaaaatctggtaaaaaaaaaaaagagtatatctagggttattttagataattttaactttaattgaacatcattttcctcccactcacacaacttttacatagaaaaattaaaataaaataagttgtctataaagatggtgattagtaccccatgcaatccatgagaaaaaaaaaaaaagaaaaaaagaaatagtaaatgtcatctaaatagttgtttgatatgtttaaacaagatattatttaatttaagtatttttttttaatttagctatttttgtcattgagcttttgtaaggtatatagccaaagaaattggtacttgaataaagttaagaatgtttgtgatatgtggatatttaagttagatctttccttttcatatgtaaatgtaatttgattacaggtttagagccatcacaagctcatattatcgtggag

SEQ ID NO: 12939 - DNA, 3001 bp, Vitis vinifera
  Intron number 1 from transcript GSVIVT01036307001 (locus G SVIVG01036307001) derived from phytozome v7.0 (chr-ID chr1 8_random; pos 3653957 to 3656957)
gaatccaatgtactaagactcaaaagatcatccaatgattaaaaattgggactcaaaactagtcatgatcgtgtaactcaagcaatcactcatgaaaagaaaggattttcgcttgtcggattcataaaagaaaggataacattttttcgattgttctaacctaacttacataagattacaaaatacaaacgaatagtatttagttaatttcttgagcacaatcttaaagtttggcttgacattcaaggaacttttttcaatcatacattcattcaacttttgtaattgtcttatcttttcaatcatattggcacatttttcttgagcattaaatgcctttcttattgatgggatgcattatcatttgaaagtagggatggtaattgagcaagttttttcaagtatccgcccctaatgggacgagttttaattttaactaaataggtttgggacgaatttgagaatttttttaaaactcgaggcggatttgggtattaccttgtcacgttccatcccgctcagattatatataaaattaatttttaaaattaaattaaattaaattttactatttttaatatatagataataataaaatagttttaataaaataagttataaaaaatataataatttaattatttattttaatttaattaaaaattttaaaattaatttaaaaaaaaattaaacgagcgaggcgaaacaagtatgagaatttctcatactcgtccctccctgctctgtcccgtttaatttttaaaatgggacgaggatgagaattattttgaataaacggggcagggttgagatggggacaacccatcctgaactcgccttgttgtcattcttatttgaaagctcattttctcataaggatacttgctatgtttttatttatttatttatttattattattattatttttatcttttcttgttaattcaatgctatataaaaaaactcaaaataaattcattaaatttatttatttagagttaaaatgatgagcattgtgcaaaaatgagtcctactagctagacaatggccacatcacaaactcaccacctaggtaattacctcaaaattcaaaaaataataaataaataataaaatcaagcacttcatatatcatttgttaaaaaatagctaccgagtctggaaaagggtgttttgcaattagaaacatgatataaatttgaatggatttctacatatgtccataggtataattgatgaaattggatattattttttatttctttgcaaacatgatataaatgaatcgttttaaggtttcatgtttactggctgagcattgtaagggaagacaatatacgaaggggaattcacccttggtgattgaaaaaatagtctttaagtgtcctaagtggctggttattagactgatagtcatctcatcgcactcccttgaatgctcctttattcttaagatagaggaacatcttaattgttgccctccatatcaagtttagtggttataaactaagatatgttctgtgtgatgtctcaaatcagaaataaacactttatttgcatgaaatcattttaaccttgtaaacaaattttaaagttatgagagcctttgcgatccagaatggataatatttacacgttagagagtgagttgttgccttttgtctctaatgcagcctctttaatccctaacccaatcttcgagtaccatagaaagcttaaagattattagttattttataaaggatattgatgacaaaaaagaaaattattaacctgttcgtaagggatatttagaaaataaaatcactaattatgttatttagagaatattcgatctattgaatcaaataatatctttcataacaatagcttaacccttttcattcttgtaaattcacatattctcacattttcttaataacatttttttttcaatgtaaagaaattgcaaaaagttttttcacttggaactactagacatattgcattctcatggtaacaatttagggttatttaaacgtcattttcatttattaattaaacagaataaagagtttctttagaataatctacaaaattaattggtattgatagatggggttttaacttttaagaattagacaaaattttgtagaaaagttttccaaattttaaaagatttgtatgtggaagaacgacttgatatgtctcttcctacacgtgaatagcattggcaaggaagccgagaagtttaatcacgccagcgttttttctctgttaaataaccaaggattgatattgatgacttccattatcatttcaaagcccattttctcatcttggcacttttttttttcttttctatttttctatttcttagtatcaattcaatactaaaaaaattcaaaacaaattcattaaattgatttctcttttgtcaatatgacgtgcatagtggaaaatgaagccttctagctagatattgattaatgacgacgtgaaaaacttctctgcaggccaaactgatagtcaccatgtgccccaaactgatccaaattgcttttcaacaatacacaaccactgaatgactttttgcatggtaaaataattttttaaaatttgttctatcaagaataattctaccataaattaggatttcatgtccaactttttcttttttttgaaaaaataagaattttaaatgaattcattttgagaagacgattacaaaaaataaatttgttttattaaaaaataagtttaatataaaaaataaattggtctttggaatagacgatttaatttaaaaataagataacagacataaatatggtattattatatttattttgcaaataactattttttaataatattttttgaaaataataaagaaaaatcctccaatgacactgaaagttccgccctataaatactatggagcttgccaagctatttcgctcgtacttgccaattcatcattcagggtgctctttcattgtcctaaggaagtagctactc

SEQ ID NO: 12940 - DNA, 9798 bp, Vitis vinifera
  Intron number 2 from transcript GSVIVT01012859001 (locus G SVIVG01012859001) derived from phytozome v7.0 (chr-ID chr1 1; pos 6285471 to 6295268)
ttgaattccactctgaagactcaccttttcatccagtaagttcagtgacttccacacttattggttgggcctagttgcccccatagttaattttaggaattttgacattcatttggtgtttagacttggcagccatgtgttggagcatgctacaacatgaatagatgcatgtttaatatgcccagatgcgatctttccataaaaattttattcttgctattttatgttaatggggcttggcttttgaagactcattttgattttagtggtttatgtgtttatgtgggtgttgtttgataaccaaattaagtagtcaaagtgaaaaggaatgagtggtcccaccaattcagtgtgcttgctagttaaaattgtttcacttaaaaaaaaaatgttactcatagaatatttttggatagataagttgcacatggagtatttgcaactttccagttttcagcaagatagacttaattgaagaccatgtgcagaacgtacttgtgggaagattgcatgaagtgaaaagttggtgtttgcaccttgtttcacattgtaaagggatgaggagcaaatactggtttataatgaaacctaccttctaagcctcatgggcttgtggaaagaaagtggaggcccacaagcgtgcacagggcccaaacctgttcattgggatgtcagggaggtctgatttggaaacccttttaaagagcgtgtttcccacctccattgcttgcctaggggggactcccttggtttttagcacttatgagtgcccttaaattgggccactttttgcaccagttatttcaacctttgttttacaatgattaaggatgagcacatgctcttaatgaataccatatcccttatgggtggtatgtttaattacaagacatacttgatggtggtatgtttaattacaagacacacttgatggattcacctatgtaagagggaagtgagatcgttttctatgagtagttaagcaggttctctgcagctctcatgaatattcaggtaaggcacatgactcatccatgccaacatgtttacttagctatgagtagagaacacaatgtgaattcgttccctgatttgcaataagaaattttggttcatagaaacttgttcccaccaaagcttagtgattcacaacttcttatcctaggactggtttataatccaaaaggcaccagttctcatgcattagattctcatgttcctctagacatccttgtcttgaggatgggtggtagaagagtgagattttgggaggataggtggtgtggcgacgatgctttaagcctttttttcccttctttgtttgctttggcggcatcaaaagaggcgtgcgtggcaaaggtttgggatgcttcaggggaggaggggggttggaatccacctttttttaggctgtttagtgattgggagatggaaacggtggagagattccttttctccttacaagggaagaaggtggacactaacatggaggatagggttcaatggaaagaggctaaagatggtattttttctgttaaatccttttatagcgttatggagggcagtagtatagtcccgtttccgaacaacattatttggagcccttgtgctctttctaaggttggtttttttgcttgggaggcttcatggggtaaagttttaactttgaatcaactaaagaagaggggctggttactctcgaatagatgtttcatttgttgtgttgctgaagagtctataataatcatcttctaattcactgcaccaaggctaaggttttgtgggacttgttgtttaccctttttagtgtgtcgtgggttcttcctttgtcagttaaagaggttcttcttgggtggcatggcttgtttataggcaagaagcgaagaaagatttggagaacaacccccttgtgtcttttttgggcggtttggaaggaaagaaataagattgcttttgaaaatgaggagttttcaattcaaaggttgaaatatatatatatatatatttttttgtaatttttggtcttgagctaagtcatgtatggatgaaaggtctgattctttaatcaacttttttgattggttgggctctagatgagggcaggtgagttttttttttttttttttgtgcccctctctcttttgttttttgcctataggggtctgttgtatatctcctgtatgctttgggttgactgttggatgcgttttacatattaatatatccttcttttgtgcctttgcctatccaaaaaaaaaaaaaatgttcctccagacatctttcttcccttttttccacctcctcaacccatacaatttgtgggggaatgttggaagattgcatgagttgaaaagttggtgttttcaccttaatatggcattggagatggatgaggagcaaaaagtagtttataataacacctactttctaagcttcttaggcttgtggagagaaaatggaggcccacgcgtgtgcacaaggctcaagtccattcagcaagattttaggggcagatccaaaaaccatttaattgagcatgttaccattgcccatcgcatgcgcagggaggagggagcctaggtttgggccctcatggctgtgcctgaattggcccactttttgtgccggttattttgggttgagtcaagccttttggccagtccaagagagttttgcaccagttaaatatattccggttacggttttattgttgatatatttcctaaaaatcaatagttgttttattggttttactaaagctcattagcacgtctttcacaaaagtaaaaaacaaaatcactgttttcactattcaggaaaaaatcaaaggggaaaaaaaaaactacccattttcttggggtggggagaggggaaggggggaaacaaagaggaatcgatccaccacttccactattttgcaattttccttcctgcaacatcaaccatactcttttctggaggaactcttttgtagttgtgttgctatttgtggttggagtgcaccattgcaaatagtcggttctaccctggaggtagactctcatattttttgataggtaaataaagcaaatatattaaaagcgctagaaaaagggccacaaaatacacatggagtatacaagcagcaacctaatacaagcgaaaagaaagagaaaacacaaaccagacccccaaagtagaaggaaagagagaccacaaaccaagcctctaaagtacaagcttcaccctaaagctatcaaaacaaaaagccccagacatagcaacccttgggagaaactgccgcaacccctcttccttgccctttctgaaaccacatcttttgccccctaggaaattttaaacccaacgcatactttactaggtcactgacagaatatcacccctccactactccggctactctcttttttgtttgaagtgcagaggtagactctcattgttcaccctactgcaatgtgattatctcaaaggaagcatgatctattttgagggtaatgttcacaagcctcaacatttgtcaatacttgccactatctccttccatttctctgcagttttcaattcagtttttgtagttatttttattacagtcctctttccatactagtctaacagttcaatgacactttaaaaatatcatccatactctcttcctttcaaagtcaaattatcgtctccaacctctatggctttattgtttagtaacaaagcaaaatcccaatctctctattaggtctttctttaatcttctactttgattaatgtggcttgttgacttgtcattggaaacaatttcactatagctagctctatggaagggaaaaaattgaatttggggaataccaatttttttcttcactcaccattatgttttcaatatttttattgaccagaattatttgttttgagagccataacaacctacttttgtttttttacttggtagttggttttctctctctcgttttctctctctctttttcttttccttttttacaaaattgatttctttgcttaataggaattccatgatgtatgaaagagagtaaattaagtcctaaaatctttgaaaaagttgaattatgcttcctgacattggtgttgtaaatggattaaatttttttagtataatgatgctattggaactggattaggctctttcaaatatatcatattctcaagatatatttttacttgtagctttgttggtcaattcatttgcctttttttggttaaatccagcaaaggtagctgccaacatcatttccaagaaacatattatatataatctaagaataaaattattatattctaaaaattgcagtactgttttaaaaaagattttatgtaaatattattgaaagaatatcatcttaagagtgtaagtgcaagcttgtcaactaagcaaattgtctgacttcaattattttactaacaatttaattgaattcaatcattaaagttttggatgatacctacaagcttttctatttaagtttcagcgcttaaaaccttcaactctaacaaatctagtactaaaaaatttaagagtacaaaacatagttatttggtattataattagtggtgtgtttgcatcttttcctttgtctactgaaatttatagtttaaataaataatacctcggaataatctaattttttttagaggaaaaaggaaattgtattaaataaaggtatacacgatgtatacatatataaaaaccaataggggtgaaaataaagcaaccacaccctacgtggatcctaaccaatccacaaaatctatcaaagaagtaacattatcccccatgtatactcttaacccaatcccaaaatagatacaagaaataacttttaattgtttgatctaagctttccctaatggaccaaaaaatgcatagaggagcaactttccaagcctttttcctttttttgccaatcgaaaggccactccaacttaagaacacccccctcacaaaagagtgcatcacacattgtacatgaaatagggcaaaaaccatctgccacaatatgcttgctttcagacagtgtaaaagaatatgatttcctgtttcctctttagccttgcacatatagcatctatttgacaacctccattccctccttctgagttaatcctgtgtcaatatcttagcccaagttgccttccaagcgaaaaagttggctcttgtaggggcctaagagtttcatactgtattatgtgggaaatgctctgttctcctacttgccaaagagaagtagaaggactaaactgaaaaatctctagtccccaaccaaaccatggtgtcattagtacctaaaactatggagtagttatgcaacctcccaaaaagagcatcaacatcctccaactcccaatcattgaattgtctaataaaccttagaccccaactacccccatcccaaacatctactggccaatcatccttagaggaagtaataacaaaaaggcctgggaatgcatctctcaaacaaatccccacaccacctatctttccaaaatttcactcgattccttgagccaacttgaagacttattttatttttgaagacctcccatccatttataattgccttccaaacccctagtccatacctccctctcacctcatttgttcgcgccccccttccctgcccttaaaccatacttgccaacaattacctgtttccaaagagggttcctttccctcacaaatctccaatatcatttccccaaaagggccttattgaaaagtgaaaagcttctaaaactcaaaccccttttttgtttctccatgcaaacaacaaaccagttaaccaaattggccttattcaccaaagcccctcctccctagaggaagtctctttgaatatgttccaatctagatgcgacttttttggggataacaaagagggacatatagtaaatgggtagactagataatgtgctcttaataaaagtctgtcttccacctctttaaagatattgcctcttccacaaagcaaaccctttttggaaccggtcctccatagtttcccaaaccctattggacttgtaaggagcaccgaagtggaggcctaagtaagtggttggaagggtacccaccttacaacctaaaacctcggcaagcccctccaaatttggaacatccccaacggggatcaattcacttttctccagaataatctttagacctaagcatgtctcaaaccacataaaaacgcaactcaagtactttagattttccttgctagtatcacaaaaaatgagagtatcatctgcaaagaacaaatgggagacctctacacccacctcatgtctttccttaacttggaacccctcaataaagccaccatcctttgctctagaaagcaaacaggaaaggttctccatcactaaaataaacaaataaggagataaagggtctttttgtctcaaccttctaaagctgtagaaaaaaccaggagtgccattgaccagaatagagaaatggaccatagagatacaccatctgatccaatccaaccacttgaagccaaaacccattttatccataactataatgacaactccaatttacatggttgtatgccttttctatatccaacttgcataagaatcctctcaaattatctttaagtctagaatcaatggcctcattagctatcaatgcaacatctaaaatttgtctcccctcacaaaaacatgctgaaaatccgagaccaaagtgtccaccacctttttgagtctattagctagaactttagaaacagtttgtataaacccccaaccaaactaatagacttaagtccttcagctctttagcccccttttcttaggcaccaaaattataaaagtagcatttaaactcctctccaagcatcctaactcgtagaattcaccaaaaaatcccataacctcaccttttacaacatcccaatagctttgccaaaaggccaaagtaaaaccatccggacctgaggccttatctccacataaactagataaggttgaaaaaacctcgtctttagaaaaaggaaactccaaggctattgaatctgcgggcgatagagagttaaattctagcccctctatacttggtctctactcccttgtctcaaaaagcattagttgaaaagctcttgccactctctttttaatactattctcccctacaagtaaaacactatttacctttaaattttctagaaaattcctccttctgtgagcattagccattttgtgaaaaaatcttgtatttttatccccttcttttagccataattctcttgatttatgcctccaaaacatcttctccaatagtgcccattttaactcatctactatggaaaaattgagaagaaaatcctcttctttctaaacagaatactcatttggttatatacaaaaaggataagccctaggagtgttatagaaaattaaaactaccctaaaccaaatccctataaatcagtaaactaaatcccaaaaaaatcaggaattacatcatctcctagatttaaacctatttacataaaatacaaagtcaatgtttctccacatccaccacactccttttaacctcaaattcctctattgtgaggactctttctctttcctttgcatcccactgtcccaactacgccaaagcctcaatttttttggtagacacattcccaaaactctccttgttctacactttaagatcttgcttcaagcttttgagcttaatcgccaaaatatgactatgagaccccttgatattgtacccctcccaccagttccttatgaggtctttgaacccttcctcctttaatcacatattttcaaatttgaatggaatcttttcattttttatccttccaccatccaacattattggtacatggtcaaaggttgggtttggtaggattttctgaaccaatccattgaactggtcttcctaatcgtcagagactagataacaatccaacctagaggctaaactattgtttaaaccaccccaccacatatactcaccactagacaggggaaggtctttaaggtgcggcttgtcaataacctctaaaaaacgcctcatggtagtcgaaagactcatacagcctctcctttcctctggaaatttcaccacattgaaatcccccccaatgcaccatgggtccctccaaagacctctaatagcactcaactcaatccaaaaatcttctttctcctcaaccagaacatgcctataaactcccaaaaacatccacacaaaactaccctcgcaatttctaaattgacacaaaattgaaaaagcacctacctccatctcaagaagctccaacacccacttatcccaaaaaaccacaattcccccttcttagcccttagcatccactaccccctgatccaaacatctgcccacacccaggctcctcaccattccggttgtaatctgctgaatcttcatttcttgaagacaaacaaggttagccgagtcatacgaataaaaaatttgatcacactatgcttattcccctcattaatccctctaacattccatgaaattatcccgagttccattgacacaccctaaccaaatccccaaaatttatcccccttcctatcccacagcttgaatcagtcttatagctaacaaaccattccaattttcgtagcttcctctccaacctagaaccacccactttagcctttttagtcccctaccttgctgtcttcccttttgttctcaattcagcggaagctcgaaaaactttctaaaagccatgaatttgctaaaatttccttgagagcagtgaaggtcccgtcgtggcactcctaggacacttccttctcccaaaacgtaagcttcttccttctccccaatcgtaagccttgactcaacattaacacagtttggttgaagctttaccctcgacccatccttcaagatcaaggaaagagggccatttctaacaccctcttccagcgatggatcctttctatttgacgacaccatgtctccctagcaaatcaaacccatgttccgatgagcctccccaaaaggcccaaagagagaaggagtagaagatagagtccctcccctctagtcgggaacagaaatagatatcgtaccttgaaaacatgccacctccgacatcaaaacttcatccacgggtaatagaacatctcccgacggccacccaccatgctcttcaaccggagacaccctccacttagggttaaaaaattgattgtattaacattttatgtctatattgctaacaatgtgaatttaaatccataattgtttttatacatcaatgaataagctagaagcttgggttcttttgtagaagattttataatgaatgatagctagcattgttctaaccattgcaattgtgtagatagattggcttttttgaattagtgtacgcttatccgcccttttttatcagattttgtataaaagtttttgttctttttggaaggaattcttatccttctatatacttactattgcaatgtaatgcaatgcagtggttgttttaataagaataaatggataagtaaagaaataaaaacataattgttgtattaacagagttaattttcaagtctcttttctggtctctttacccctatcattgatcttataaacatttggtgtttggtactctgatggaactatgactcatctttgatttctctcccattagtttgcataaaatttattgtttatatgttaacctcaccacggaaaaaacagtatgtgttctaacatgatattttggctaaatttgttttccagg

SEQ ID NO: 12941 - DNA, 1366 bp, Vitis vinifera
  Intron number 4 from transcript GSVIVT01024082001 (locus G SVIVG01024082001) derived from phytozome v7.0 (chr-ID chr3 ; pos 1276221 to 1277586)
atcaccagctgctggtccagaacctttctacacaggtaactagacgtttacttactttggcatgtcatgttggtgcattcctgatgtctaaatcagctactaatttcgccaaatcaattaaatcctatattttgtgcccaatcacatataagaactgcctctacttagcttttgcttttgtttgttttattaaagatatcacattactctgttttgcattgtggaaacatattgtgattggttctacacattctatgaatattgtggttggttttttagtctatggtgcaacattggagtaagttatctttggttcattggatctctgtaattttcacatgtggtaatagtgttatttctggcaattatgagaatgatttagagaacttaattctgcttctttcatattgaagtggaaaaaaaccatgaaaatatctcaccaaagtgaatttaaatgggtaaatggtaaaggtgtcaccaccaatgctatgaaccactctgccaccaccataaccacctatcaatccatcaactcctttgttgctgttatctccagcaacaccaccattgcaaaacagtatcagcaatcctgacattatgaccaacaccatcaaacttcatcatggcttgattttgatgtttaattgcctgaaattataccaaggaatgtctaccttttggatcccctgaatgactgtgaaagatctgccaatagccagttctaatgtcacaaaaatctcagctttgttagatgctttcaaacatgtggagatgaaaaatatacctatcaaaaaaataaaactaaaaatgtggagatgaaaaatatcttcagtatgctcattttttgtctgatgattctgttgcttagttgaaattacagtccgcctgatgtcttttgtattgatatgagcttaaaagatcatatttcctgcctaacacttgttgactttgtgatttgtttgggatctgcatcttccagataatcttttgaagaaactgcttgtaatgcagtgtagattttctaaaagtgtcccatgctatacaaccattattatctgctcctaattatgtcatggatagttatttccaattatcttagtagtgaaccactcattagctcacggttgatatgaatcttccatgcatcttaagctttttttaatattcttatatttaaaactgcattggtttgtctatatctgggaagggttttttgattcttcatcattcaatctgatatcattgtgaaattgtcctttatcacagcttaggaataaaaactactgtctaacttgttttattcttttttttttctctggtttgttattacttatttacacatgttctaaattgtagggttttaaca

SEQ ID NO: 12942 - DNA, 7821 bp, Vitis vinifera
  Intron number 31 from transcript GSVIVT01021873001 (locus GSVIVG01021873001) derived from phytozome v7.0 (chr-ID chr 14; pos 6163434 to 6171254 reverse strand)
tgtaagattacattttagaatttttcaataattttattttcattttgctcatttttttcttctaaaaaaaatccacatttttttagctaaacattgtaactttttttttatgaatattatcactgaaaaataaaaatatttgagtaaattatgaagttcttttaagcagcttcaaatggtaaggttaatagaagagttatattgctagaattttagtttataatatgatgttgtctaatttcatactagttattccattttcttctcattcctctctctcattccccacagaatagagttgtttgaatatatgatttggatacaagatcctgtattgagagcaatggatatttctatcatttgattagaaaacaagatcctgcatccaaagttatgtactttattcatgcacttcaaagaatttgtagccttgcaagcatgacttctgccataaaatggccttcaaaatggagttagctgatgattctggtttccttcatttgaagcatgtttgtaataccacaagaaaatttatgcagcctctgaagagtgtctgctgtaacaaaattagagataaatttttaaccatttatctctcaaaaaaaaagaagaaaaatggggggaaacctattaagctaacataacatgaaatttagtgttagctttggatatgactaaaagaggatcagaactttgaatctctaaatattattctttcttgcttcttcttttttttcttgtttttttttaaagatattccttgtcagttcctctaggagtaatttatgtgacgagttgccgcattcatatcaatattgttgattgatgtttctttgccagaggaggcttattgtccatgagatttctgtgctacgtgggttgaggtttggggtgacagggttggtgattttgaccaataaacaggctggcagtagagctgggggatgactcaagtggatacacctaacatatccttacaaaattccaagcatgggattaggacttgagtttcttttataattccctgggaagtagccctagcctgttaggccttgcaaagatatggccatgataggggaaggtcaatagccaaaactggcccctgcaacatcaccaagataccacagggtagggctttttggccctagaatcagagattgacactcctgggtgctaggatttgttggtagatagtgtcaataagggaggtgtggggcccactgtgatgacaattggctggcctccttggttcttggtgatgaggaagcctatcttcagaaatacataaagagaaaaccatagacaacaactccaaataaactgagtagtaaactactaaatcattcgaccaaaagtggcccctgcagcatcaccaagataccacagggtagggccttttggggctagaatcagtgatggactctcctgggtgctgggatttcttggtagatagtgtcaatgaaggaggtgtggggcctactgtgatggcaattggccagctcccttggctgacacttggtaatgaagaatcctatcttaagaactaaataaagagaaaaccatagataatgactccaaagctagaggaaataattttgagggaagaaattcattggagacaaaaagctaaggtaaaatgggttaaggacggggattgcaactcaaagttgtttcacaaagtggctaacgggagacgaaacaggaatttcatcaaattcttggaaaatgaaagaggtttggtgttggacaattccgagagcatcacagaggagatattactttatttcaaaaagctctactcgagtcctcctggtgagtcttggagagtagaaggtattgattggtcccctatatcagaagaaagtgcttctaggctggattcccctttctacgaagaagagatctttaatgccatctttcagttagatagggatatggcgttgaggcctgatggtttcaccattgcactgtttcaggattgttgggatgtgatcaaggaagacttagtgagggtgtttgcagagtttcacaatagcgggattattaataaaaacaccaatgcctccttcatagttcttttgcccaaaaagagtcggtcaaagaggatttcggattttagacctatcaacttgatcacttgtctctttaaggtaatagcagaagtcttgttagggcgactaagaggagtactacacgagaccatccactccactcaaggtgcttttgttcaagggagacaaattctggatgcagttcttatagccaatgagattgtggacgagaaaaggcgatcaggggaggagggagttgtattcaagatagactttgaaaaggcttatgaccatgtgaaaggggattttttggatcttgtgttggaaaagaagggatttagttctaaatggaggagttggatgagaggttgtctgtcgtcagtctcttatgctattctagtgaatggtaatgctaaagggtgggtcaaggcatctagaggtttaaggcaaggtgaccctttatcccctttcctgttcactattgttgcagatgtgttgagtagaatgttgttgaaagctgaggaaagaagtttgctggagggcttcagggtaggtagaaatagatgtagggtgtcccatctgcaattcgcagatgataccatcctctttgctaactttagtgaggaagaactacaaactcttaagagtttattgttagtgtttggtcaagtttctgggcttaaggtcaatcttgacaagagtaatttttttggcatcaaccttgatcagaatcatctctctaggttagccttgatgcttgactgcaaggctttagattgacctatactttatctgggtcttcctttgggagggaatccaattgcttgtggattctgggatccagtgattgagagaatctctaggagattagacgggtggcaaaaggcttacttacctttaggtggtaggataactctcctacacccatgcctttcccacatccctagctactttctttctctgtttaagattccagcatcagtggctgcaaaagttgagaggatgcaaagggactttctttggtcaggggttagggaaggcaaaagagatcatcttgttagttgggatgcagtgtgtaagccaagggtaaaagggagtttggggattgggaagattcctttaaggaatcgcgctcttttagggaaatggttgtggaggtttcctagggagagtacaactctgtggcatcaggtcattcttagcatctacgggacacactcaaatggttgggatgccaacactctagtcagatgatcacatcgttgtccttggaaggtcattgcacaagtctttcaggatttttccaagtatactcagtttgtcgtaggagatggggaaagaattcgcttctgggaagatttgtggtgggaggaccaaatcttcaaagaccaatatccaagactatttagagtagtaatggataaaaatattctcatatcttcaattctcagttcggctcgccctttctcatggaactttaatttccatcgtaatctaaccgattctgagatagaagatctagaacgcctcatgcgctctcttgattgtatgaatttatccgcttccgcttcagacgcaagatcttggtccttattgtcttcaggattgtttacaatcaagtctttccttataaccatgttccaaatgcctgattcatctccatttttccccactaagtttgtatggaaatctcaagtccctttcaaagttaaggcctttgtctggcttgtggcacacaagaaggtaaataccaatgacttgctacaattgaggagaccccacaaagctcttagccctgacatttgtaagttgtgtatggagcaaggagaatcaacagatcatctcatccttcattgttctatgacgttggggttgtggtacagactattttagctagccaagatggattgggttccttcgaaaagcatttcagacatgatgttcatcaattataaaggttttggcaagtccaagagagggttagttatgtggcaaaacgcgtgcatagctttaatttgggttgtgtggcgggaaagaaatgctaggatatttgaggacaaagctaggaattcagagaatctttgggactccattcatttccttgcttctttttgggctttttgttccgcgggttttaagggcatcccccttaacgtattacaactagattggctagcagtgtgtagttccaatggacggtgtagtgtcttgttatttttttgtgttgtttagtttttcttttggcgggaggattccttgtcctccttttgtacttctttttctatcaatatattcatgcatggtttcctatcaaaaaaaaaaaaaatgacttcaaagaaactgagtaataaactactaaatcattcactgatttcctttcctcttagacaagtaggaccagcaaactgtgctccactatctgaccttgagatggtccatagccaacagtctctctcatactgcaatccagaaaatgaaagctatttttggcagcatgttcgttttcaccaaaaaaattgcctctgtttgaatccttccatcttatcttcaaacatctttcccttcccaactgggtcacaccattaattgctactaagaactcctcgactgtctgtgatttccaatcccaaaaatcttccacaaaccttggattttagaaagctccaactccttagttttggcatcactgactactgaagccctctttgtctctagatatagaaaacaactcaggaaaactcaagcaacacaggagcgtgccacactacactgggctttttatgccatgcttcattgccttgctttgagaaattctcaattcaactaggttaatgggtttcaatacaatgtgtattttatgttttcctcatatgggagaatgagggaagaaatattgaaatctgatgttctagaaaaagatgtttaggatgcgacccaatctgtggatgtctagagtaatagtgttttatggcaccatctgcccgagcagtaagatttttcatttcaacttggtaggtttggttgagctgaatgccacctaatctcaacccatagaccaatctgatcatgccattcaagttgcttcagctaggttgtgccggatattgtaagctaatgattgttttgcatttcctcgatgtacattgccatgttaggcttttttaatagtgtctgagtgatacctaggaggatattttatgaaattaagatgccaataggaggaaaattgaaacaacttttagatttaaacaagtttaacagaataagccaattaaagttggggagttgcattaaagataatcagtaaagaatttgtagcatcagagtaattttgtctgatatttctgtaggggttatggttgacaattattatattttatgtaaaaaaaaaaaattaaacataattgtgctttatttaatatatcttcattaatataagagctagttatcaatgaattaggtgaatccttatccacgtatgtatacatgtgtatatgctcatatatgcacagaggcaggccaaggtgataagcttgcatcgtacatggggcatataaagttgcatgtctcctgaacttttatcaagtcagcacatcacactttaataggttcatgtaaacctaacttggcttgagaatttcatgctaccacctcagatgtttgaatctccaaggaaatgaagaaattctgtttagaagttttaaatttcttatggcagtttaagataataaatccttcttctgtgcaggtaatgatgatagttattgtgcccaaatatttggtgttttttaattactcttgatatctgccaatagttttgatgttatatctttgctataggttttctattaaatgctatatctttggtgtaccttacttgcaaaaagcacttgtggttctgttgggttttttcctaaatttaactctcctttcatgccaggttgtgattttctaaagtttcttttgagtagaatttatgttttaacccctgatttaaaactaaacatgaatctaaatagaagaagccgaaaaaaaaaaaaatgtagccaaccccaaatagttagggtaaggttttggtatatgcttgattgatccttcatattgcattggagttctacccgatgtatagggtattggccagtagctttacccagtgggtcaggattgcatccacagggaatgcttgtgaaaaacttggaaccaaaataaataaataaataaaaaacaatggaagaatagattatagagagagttgtttctaaaatgatcaatgatatatagttgaattttgtaggagaatagtagaaaattaatgaataaaaactaatttttatcaacaatgaaaagtccttagggctcaggatcccattgatatcctcacactagcccttatttgtacacacttaggcctaatgattacctcaacccaagtgaaatatatattcattaatcgcttttaggtttcaattttgcaaaaggtgtcttctccgtttgatacccaatttttcaacattctagatcaatgtgtttctcactctaacaacaatagtcactaatctcaatactagtgccaagaattggggatataaacatgtattttgcaaactggctctttaggcacaagaagagagttactttctaaattttgtgggcaccagatggatcagatctgggcataatcaattctttatgtttagcactcttttagcctcgtattcagagtcccaatgttaccctcaccctggccaaaaccttaaccaagcatagaaagtattgaaaacatcataaaaataataaaaataatccttagactcaagaattgaatctttaaaattgtgacaattcatgattgagtttttgcagattgaagaaagcaagagagagcctaggaatcaaatctaagattcctagatcaaagataatcaagttctaacactactaaggtaaagaaagaaagaaaactctaggaaatcttcatagacgtgctaaaggagaacaccttgctaccactctttttctcttccttgtgtaccttgttcctctgttcaaactggtcacaatcccctttctcagccaccaaaagatgtttaatatgtcctttccaaacccttggcagtggtaagaagttttgagcctttttaagggtgtttggaccttctcatcagtttaagcctgaaaccccttttcagcagattttttttttttttttttctgatttgtgtgatttttccagtagagaaaatgacctcagaatttgatgaaaattgtcagatccattcttctatgagtctagaatttccaaattttatttcactcaatctggacatctttatccccctgaaatagttgcaaactccaaattggtcaaaatcaggtctgtagaggagttatgtaagcttcctcttatcttgctactttgttctcagttccgaatgtttttgcaaccttcttgaactctctgaaattatcccaccgctcaaaattttctttctaagtcatccaggtttgagatcttgaagggaaaacctacaaagaattacatcaagcttaaaaaccatgagaaccacctgcatagaaggacaatgcaaacttggctaattaaggactatgatgtccactaaattgcttcaaaatgtgagaaaatattaatgataacacgcaatttatggtattcatcaatgtttaattgttagtatatatttgtttatttcttcatgataccttttgataaccttttccgtttacattagtgttactatgatttatgcag

SEQ ID NO: 12943 - DNA, 12107 bp, Vitis vinifera
  Intron number 7 from transcript GSVIVT01035304001 (locus G SVIVG01035304001) derived from phytozome v7.0 (chr-ID chr4 ; pos 224539 to 236645)
aaggaggttttggaaattcttcaacagtgcaatcctcaggaggaccatggaagaaagaaaaaggaccatgaagctacacccctgcttctaaatggcacttaacccaccagttacaagcatagcgacaagggatttctatttttatgtcattactatagtgggatttcaaagaaatgggcttcattttttaagcttctcattaccagcaggagtcccactgccgttagcacctttgttagtagttcttgagttaatccctcattgttttcatgcattaaactcaggaatgcatttatttgctaatatgatggccgatcatagttcaataaagatttgaagtgggcttgtgtcacgcccaaaatctggttaacccaaaactcgactcgtgacctcagttcaaaagtttgaccctaagagttactcctatccacgttggcaatcaactaaaatatcctgaattttttttctatttttcaataaagcgtttaatcccaaataaatttattaagttaagatttactgtaacatattattttatttttccaaaaccaactatcacactatctcctgttcacaagtataataaatccaccaatcatctttctacccaaaaactcaaatatttataataatctccaagtaaaaaagaatatttccaaaaatgttttacaaactaacaaaatataatttaatttacaaaagtccatataactcaaattagcacatgtcaaaaaggtaatatacatctaaaaacaaccattattatggttcttttgctttctggaacacttcctaatcttcctgtggcccctcaaaaactatatttgcatataaaaattttagaaaataaaagaatgagcatttccacgttgcttagtagggtgttttacacccaaatgagttacacattctaggtcaataaaacacaactatataccaaaatataatgttacatttacattatacacactaaaagaaacctcaactatacaaatttaaactaatcaaaattatcatttttcttattcaataatatgccaataattctaaatttacaaaataaataagccattttagtcttgaataatatattcaaacatacacttgataaataatacaaatccttcttccaaatgcaaccatgatgcaaatgtttacacgcaatcacgtaatacactgtcattctcgagctttcaccgaaagatacgcatccgtacccaaatacactctccattcagaattttctcagggtaaacttttgggtctttcaccctaaggatctcactctcttcttaattcaccatctctagggtcattccatttcttatttttcttttcatttcatttttgccatcttcggggtcttttcattctcatttccctttcacacaacgatttctttaatttttctttttcttcacacaaccatgatgcatatgaaatgcaatcaaatcatattttaacatccataaatttccaaaacataattttatttactcccattatgtttcataatttccaacaattcacacaacgatttttcttcactttaatcaccacaaacatcaaagaaaattcataattaatttatatagtatcaaaacatagttttaaaccttagccacataaattctatttattcttgacatgcttaataatttccaacaaccaatataaccattttttttttcaattaaataaccacatataaccaagaaaattcccactaatacaaatattaacaaaaacgtaatttatgtcataatttatttatcttcaataatctcaataattttaacactcaatacaacaattttccacaattaagccacctcaacattcgggaaatttttttcaataattcaaatattaacaaaatcccaatttataccatcaatttatttatttctaacaatattaataattttaaaacaataaatttaaccatatctcaatattacaaaatttcaacaaataaattccattattttcaacactaatatatcatcaagaaatttatataatttctaatatgataaaaatcacaaaaaatatattaaccaatgttccaaattagcaaagtttcataaccacaacaatccggtaaattctatcataaggacaacaattaaataccaacaattctaatatttttatcttgaattaaacttttatccactttccatttaacattttcaaagcaaaaccaaatcatttcatatatttagagtttccaaaaaataacttaatgaaaactatatgacgatctactataactcaacaactcacccattttcatggagttttttgaaagtaaataaaagcaaaatgaaatgccctaaaaaattcgagagagaaatttaggaaaaacacacccttacctgtacaataaaatccaaccgtcaatgataaaaatagatgtcgatttaatacctaaactttttctaacattaaagtaaatatgatttcatgaatttcacattttctatcatcttgacctaaatccaatgggattgatcacttttttctcattccataattcaatcccatgaagatgattcggtcaccaaccatttactaagttgtgacacccattttctacaccaattcaaacactccacttttgttaataacttttagccaatataaaaaaatgaacctaccatttgatatataaagcatgcattttcttttaatgatgtcatattttgaattattttttatataaacatcattaaattcatttaagagaagttattttatgatgggatatactttctactttttatttttaaaattagaaaccactatatactctcttttatctttcttttacacttgaattctttaaggttttaggagcttcaaaaatgttatatgcacaccttccacataatctctagagggtaaagtggatatataataggtataaaaagcaactctatcaagtagcatgtaaacaatttatgacttaagagaagatattgttacgacaaaaggcatattccagcttattatttgaaaaggctttaaagaggatattcagtggagaataaatgatttgtagatttgtggttagctaaaatgtgttcaaggtagtatatgcatacctttagtgagttaaaatggctattaaacacgagttccctaggtagatcaatcatgagtttaattaaccacgtgactaataagtatagtattaaatacattacaatttacaagtaacccttggagggaaaaactactaatatggtgaatcacatgtcaagaaagtagtttttttttttaatttattttttattcttcttcatattttcaagttttcaaccaaaaaaaaaagtattacgctcaaccacttgtccagtggttctacttttgtgaccacctaagctttattacaggaacttttgggtatcccgaactctcttaaattatgaagccacctttttttatggacttcaaccaagttttaagcataattttcaagtaaaatatatctcaatttaatcttttaagcttttaacaactttagagtacttttcataataaaaatgaggctcatggtggtatcaaactaggattacccaattcttaagctaaatagctcataatatttaagaagtcttctcatacgtggttttagttctacctctttaaaactaattgagatagtcatatttgttattataagctccttgggtaaattatgaataagttaatttcagcttaaaataataaattgagcaaataaacatgtaataaagttgaaactcatgaccctcctactgaatgaagttttaatattatattggataattaattttttttaaagcttaaacttaagatttgcatcctcgtgaatattgcattatgctttctaataatatatcacatacttttttagattttatgttagacctgtgattacttctctaaatcaatttttcagcatattgtatatatgtacttattaggaagaatcaattatcattgaatgcagaaatacaactcctcatagtgtctctttgcttatttcctctacagctttgattagttgaatttaaaagaactcccgggtgctttcacaaaatgtattgaacttcaaacctgcacaaagatagaaaccatatcattgaaataattaaatagatcaactaaaatcaaagtgctattgtcttatttaaaaataaatataaaaaatcatgggctttatgcaaaaacgatagttgcgcaaaactccttattgggaatactagataggtgccatgtgtcatttcattcggcaccttcttccataaccatcaaaaatgatctttgttccggaagaaaacaagagttttgggcaaatataatatatttgaaaaataaattcataaaatagattttcaatcaaaataattttcaagttagtgcatgtgttttcaaaatttgaaattttccactgtatgtgaaaattgtggaaagtgtcttttaaaaagacactttcagtataaacccaatttttaaaaaattatgaaagacatccaagtataattccatttttttttttttggaaattatggaaggtgtctcttcaagagacactttcagcataaatttgaaatttttcactgtttgaatgaaaattgtgaaaagtatctcttgaagaggcactttcagtataaacccaatttttttaaaatgtaaaagagacacctttcccaattcctaaaaaatggaattatactaaaggtgtctcttgaagagacacctttcataattttaaaaaaattgggtttatactgaaattgtctcttgaagagacactgtccacaatttccatacatagaaaaatttcgaatttatgttgaagagagatatctttaactttaaaattattttcacaattttatggaattatggaaagtgtcttttcaaaaaacacctttagtataaatctaattttttggaattgtagaaattgtctcttgaagaggcaaattcatgaaacattcaaatttatcaaattatggaaggtgttttttcaagagatacctttaatgcatattggattttttatcatatgaaaggtgttttttcaagagacatatttaatacatattggattttttatcaggtaaaaagtgtcttttcaagagatatttttaatataaatttaatttataaaaatgatagaaggtgtttgttaaagaaatactttatattaaatttaattcttttaaatatatatattatgattttgaaaacggtggaagatgctcttcaaaagacacctttggcaaaagttaagaaagcccaactcacgggtaattctgccgacagaaaaaatgataggacgtgacctttgatgtgataaatgaaaaagggtatgttggtcccgtaccattgccatcaattatgagcgcgcagcaggtccgcaagttttttccagtcaacggatattttccacattcatttcgtattccacgcagacttacgaaagcaaccttagcgagtatgggtggacgcattttcctgataagcttcatggaatctttaagatgaaggaggatgctacttccacattctttaaccgagcgtgctaaacacgctctctaatttttctatattcttaatttctaatgttgtatatataatattttttaaatataatagtaaaaaaattattttaatttattataattttaagagtcaaataaaaaattaaaaaatacatagacaaatagacctttagcaaaataatttgagcttaaaataataaattgagcaaataaacatatagtgaagttagaacttatgacccttctactaaactaaatggagttctaatattatattggataattaatttttttaaaagcttaaacttaagatttgcatcctcgtgaatgttgcatcatactttctaataatatatcacatacttttttagattttatgttaaacctgtattcacttctctaaatcaatttttcagcatattgtatatatgtacttgtttggatgaatcaattatcaatgaatgcagaaatacaactcctcatagagtctctctctgcttatttcctctatagtttgattagttgaacttaaaagaacccccaagtgctgtcacaaaatgttttgaacttcaaacctgcacaaagatagaaaccatatcattgaaataattaaatagatcaactgaaatcaaagtgttattgtcttatttaaaaataaaaatcatgggctttatgcaaatacgatagttgcgcaaaactccttattgggaatactagataggtgtcatgtgtcatttcactcggcactttcttccataaccatcaaaaatgatatttattcaggaagaaaacaagagttttaggcaaatataatatatttgaaaaataaattcataaaatagatttttcaatcaaaataattttcaagttagtgcatttcaactacttggacatccaaatagtcttaaaatgttttatttttttagcataaatttaaaaccgtaattaataactataattttaaccatttaaaaaaaaaaagaatttctaagttggtatgtttcaactacatgaacatccacatggcatgataataatttttttttaaatgttttttacatcacaaaattgtaattagtaactactattttaaatttttttaaaacataaaatcacagttggagactataattttaagtatatctttaaaatttatagttaataatcgtagttgccgattatgattttaaatttaaatttaaaaccataattgattattattattttaaccatttaaaaaaatcaaaattatagttagcaagtacagtttgtgacatggatacacatgtagatgagacactctagtttgaaaattattttgaaagggtctactttgtagaattttatttttgcaaataaattatttttcctcaaaactcaaatctaacttgtttagaaataaattcaattatacactttcctagtttttctcttccctaatataagaccaagtccgtgttatcacttttccacaggaatattcagtttcagtcttcatcaatgctgtccattcccttagctgtgcattattccaatgccagttttctaccataatttagtccaggatgtggaaccactgctggatcatgctggatcctgttgtgagacttgaccatcaacatcccttctctccatttgtggggtcctgcccacttaatcactactttggaaatttcgctaacatccaaatctcaacaacccaaaaccacagacttctgcatccttccatccatctttctttaagtaaaatagacacccatttggtctttctttcactttctcccaagaatactaatcttgtctgactgattagtttcatcagagattattcaagaaaaagaatatcacattttatatttgaaaaaaaaaagtactgaatatattagaaagatatcatccacgaaaagttggaaatgtaatcttgtacaaggaaaggaaacaagggagagtcttaaataaattgtttccataagagacctaatgaccaatgtcattaggggtgtttaaaaaaaattaattaatggtgattaaatgtttaaaaaattatatttaatgcatatttttatgatgacgaagacttgcaaaagcaacctttggaatttgtctggaccatttttctgataagcttcatggaattttaagatggagaatgctacctccacattctttaaccgagtgtgcaaaacacgctctctctaatttttccatattcttaacttttaatgctatatatgtataaaataattttaatttatcatgatttaagaggagttaaataaaaacttaaatatttttaaaaagaaaatttcaatatgatacatctattttaaaattatcttttggatagatattttataaattattataaattttaaaatattttttcaactattatacatctcaaattatttctatcatttttttaatttcaccttatcaagtttataagatagaatatagagtatgacatggatttaaattttataatcatattaaaatattaaaaaattatcaacaatcaaatagtttcatatatatatatatatatatattttcaaatcttattcattgtaacttcattctatttatttatacccttttaccttagtttcaatgcttatatattcatcaaacaacctaaattttattttatatatatttaatgatttagattttttgttatatatatatatatatatatgaagggtttatcccatcacttcatgagtttcccttactccactccatgaacaatatcttgaaagtgaagttgactttgctcatcctgcaagacttatcctcaagagtcaagaacttgaacctgaaccttaggataaatcttaggataaatcttataccaccatctcttgtccgggttgttccctaacgggagacattattagttttttttttttttttttttatcaaattattattctaacaccatttttattaatgtgaaattatcatcccttattacttttccctttctgtcctctcccttctctcctccccaacctcatttcctaattgcaccctatttttatttttctttcctaacccccaccccacattttagcattatttttcttttatttttatcttcattttcatctctacccatccaaccccccaccccatgtaaactttgttttgtttttctttttatttcttttatttttttcacactcaattatttttcatattcttcttatattttaaagcaaaataatttctttaaataataaattataaaatgattttttcaccaaaagtatattatgtaaaatgattttattatattcaatgttttaatgtgaaattcataactcaattttttaaaataaaaattattattaaaattttaaaataaacaatatttaattggaatggtcttttaaaaaatatgtttgtttattgtgttcaatatgattttttttgtaacctaaacaaaaatattgcatataactagagcttgattaagaatatgagcaatgtaataattatttgtgttagtaaagtaaagactcataaaacaaagtatgtaatcaagagcctaaaaaaaagtcaaacccaggttgttgaatccccacctaggccgccgatttttctttttgatatatatatatatatatatatatatatattgtcattagatgattgaatttcatcattcattgtatttcgtatgtgatttgtaatcttaatcaactagaatttatgttcaatatgttgagaggaggttaaagagagttctttattaaaaatggtatatgtgaaaaaaaaaaatatgataaaaaagtgttacgtttaacaaaagagctattgcaaatatcaacctttttttatattctttaaccccactttaaccaaaggataatataaacttatcacaagattatgaaaagacttgtctttattcatgatatttttctttaacagttcaactcggcaccttcttccataaataaattatatttgctttggaagaaaacttgagttttgaacaaatataatatatttgaaaaaaaaaatccataaaatggatcttcaatcaaaataattctcaaaatagtgtatttgtacttgggcatccaaatagtttgagaatattttttatgtgataaaatcctaattgataactatgattttaattttttttttttaaatataaaaccgctgttggtaactatagttttaactattttaaaagaaaattcaaaatcataattaacaactatagttttataaggtggatatgttagctcttttcttataatgtgtgctcatatataattatatttgtgtaaatattatttaaaagtatcaattgatagataggtgaatcaattgattgggcatccaagagtcttatgtatggaagactcaaattataaatggggagttagaaaatttaatttatatgaatgtggtgtttgtaaccccatcattatgaaatttattttgtacattatatttatgagtaatagaggaaaatgaaaaagtataatctatgcatttatataaatgcattcaagttcataactcaccattactcattaatttgtacataataggtgtaaataatgagtataactctcatatagtcttttataagaagactaagatgttgtttgttttttggctgaatagaaaaaatcaaatattttggctttttttattaagctaaaagtaacttgttgatactatccaacataggtaaagtgaacttattatcaataagtttagtttaatgatgttggttgatgtcaataagttacttttagctgaatagaaaaagcaaaaatatttgattttttctattcagccaaaaaacaaacaccacctaagagatgtacaactttttataagttaaggtctcaaatcacattctcattcttatgtcattttgttattttattttttaacaacatacaccacataagtgacccatccactatatgagagtagtgagttgaagactttgataatacaattcataaaatgattcaatttcacttcaaaaatgatattggtattataaatcaaggtaagaatatgatcattattttaatatttatatttattttgttttatgtattcaaaattgttttttttttaaataatgatttccgcataaagtttataaaagtttagttaacaagatacctatgtggatgagatgcactaaaattattctgagatggaacctatcttgtggaattttttttaaataaattatttttgttcaaaacttagaaaaaataacttgttgaaaactaaattcaactatacactttcgtatttttctttttataagatcaaatccacgttatcacttttccactagaatcctcatgattaattgtagaattcttgagatgaaatgaaatggttgttgaaacttcagttttcaaacttgatcaatgttgtcccttcccttagctgtgcattattccaatgccagtttttctccacaaacttagtccagagacaagattagattccgtgtggaaccattcatgtgtggatcccgttgtgagacttgaccatcaatatccttctctccatttgtggggtactgcccacgtgatcactactttggaaatttgactctcaaagacccataactacagattttccataaaaccaaaacgtgatgtagactaattggcgcctagcgttgacccaaagtgaagtcttttctcttgtctggcattttccacatttatttatgattaccatttaccaagacttgcataagcgacattgggaattggtgtaccccaattttctgacatggatttacaacactcatatatttatatttttattgattctcatttctcaatgtcaagaatagatgttaatatttaatacctaaactgtttctaacattaaagtaaatatgatttcacgaatttcatattttctatcctgtggatgagatgcactaaaattattctgagatggaacctatcctgtggaattttttttaaataaattatttttgttcaaaacttagaaaaaataacttgttgaaaactaaattcaactatacactttcgtatttttctttttataagatcaaatccacgttatcacttttccactagaatcctcatgattaattgtagaattcttgagatgaaatgaaatggttgttgaaacttcagttttcaatcttgatcaatgttgtcccttcccttagctgtgcattattccaatgccagtttttctccacaaacttagtccagagacaagattagattccgtgtggaaccattcatgtgtggatcccgttgtgagacttgaccatcaatatccttctctccatttgtggggtactgcccaaaggcaattaggataagtttctttattgactattcaatgccctgtcacattgatttattgtccgccccagtgcccaatggcccattcatattgacttgactttcaaataccatttaaccgttggttttcatctttcccgcccatcttcctcccaactcatagagaagcggtaaggaactcaacgtcaccaaa

SEQ ID NO: 12944 - DNA, 6932 bp, Vitis vinifera
  Intron number 1 from transcript GSVIVT01028463001 (locus G SVIVG01028463001) derived from phytozome v7.0 (chr-ID chr7 ; pos 7971775 to 7978706 reverse strand)
tctccatctcgtcaatttggttctgtcttgttgcggtaactatttgtttttgttgctgtttttttcgttatttttcgtgtttggataccgggaaaatggagaggggagggaagttgtgattggtaggttttggtgttgagtagtgtctctttggttgctgatactcaaaattttgaatcttaactgttttttaattgttgcttgtgtttatacaatgtttggttgttgatacaactgaggaaaagaagataagagaaaggaaaattgtggattttatgttttgttgttgtgtcggttcagtttggttgctagaaaaaggtaggaaagatattaaaccaaaatttgaactaagactctttagttcgtttctcagcagccgaacaatgggtttgtcacttcagtagagaattttcatttctagcttcacaattataggaaagtcaaatattcagaactttggtttctctttcttttcctacaatctatctgctgttcgatggcaatctcagtttggagtgtaagtgctggctctttagctgagattgaagggtgaatgttttaggtgcaacgtcaattctggatatttatttcttaaatgctttcttggattcaaacctttttttagttagaaaggaaactggatcttgcttctgatgagaacggagattattgggaaatctattaatgtagaactaataacaattttcctgatgcattgcttatacagtccttgatttcaggtttactaccatatctcattttgcattaccctttaacgtttctgtagttttgtgatcatgtcaattaacattattatttaaaaaagatatgtgctgtgcatgtgcccttaatttgtccaaaacctgcacaaaaatataaagactgaaagttagcccaaagtatcaagtacttttgagctccctcaagtttccttcatttagttgaattcacattttgcccacaagtttgatccctctgtcggtacaggattttttgggcccactttgtttttgtaaataggaagtttgcatgtgcaagtgggatgaggggtcctctatccatcttttggtgcatttccagattgcttgggagcttttttcctttgtttttgttcttttcgagtttagttgggtttgacaaagttgctaaagaagcttatgtttggctggcatggaaattttttggcaaaggatgaagaagggcacaaggacggctccagtttgcttgaatcagtgtatttggaaggatcacatgatgacttttgagagggtcgtactattggccctgaaactaaaagacattggcctgatgactataccttggaaagagactataccaacatgaattgttcattcctttacttaataaataactgttcaggacccttctttttttaaataatattctattttatcctattgggcataactcttacatcccttatttacttgaattacacccctattggtgaaaaatgatcatctcatcatttggtgcttctttctcctcctaatctttagatttttcttttaaccaagaacgtttcagtcatatcttttgaacacttgttgcaatatcctcgctcctaaggttttttagcctttcatttttgcttgcatttgtctcatccatcattctttgttgggatgtacattttaatacatttatgttatgtcaaatgaaaatgtgctagcatgtattccttaatttttaatccattagctccaccttcttcattaaaaaatttatgaaagtcccctcagtgtcctggcatgaaatgttgaaattttattgaaaatgtttttgaaaaatatttgcaagcttttcggaaggaaaacaaagaaacatgaaatttttttctgaagtttaaaagaaatatggtattgaggtaatcttatatgtaaataaatacatacatggatagtcctaaatcctattttttgataagtaaaacaaaagcataccattttctgattttaaacggtattcctttcaaactttgaatatcactagccagaaaaaggtaatagaggttggggggtatataagatataggtgttgagatagagtaagatgttgactattaagagagaaaggtatgcacatagagaggctgctattttatataagatagaaatttaatgatggctttacagaagaagaaatatattttaaaattttgaaactttaacttaacttgaagtagtaaaatatatggattgatgatcaaaatcatggtttgagtattgggtcaattcatgagacctatgctctccctcacaacatagtattattgatacaacttggtattggttgtggttgttccattttgatacgcaaaaatcatgaggtgaaagccttgtacaatgaaaaatacaaatgacttataacacattttagcacattggagataacaatgtacaatctctctctctctctctctttctctattgctttctcttgattggcaagaaagagtttacaaataagacgcataagggagaaaaatgcacattttgtaatttgtaatatgattactaagtccccaaagggatttcctttggggaggtggggcattggagaaaaagatgcaccttgtgaagtggtcgacattgtgcatgtagaagagttaggggggttggacattagacctctttttgtgttgaataaggctctcttgtgcaaatggagttgatgatatgcaactgaaagaggagtgatttgaaattaggtcattagtcgaagatatggggaggaagagggaggatgatggtcctatgaaataagagatgggtatagggccaggctttggaaatctattaggaaggattggaacaactattatagtagatcttcatttgtggtgggtaatggaaggagggtgaagttttgaaagagtaaatggtgtgaggttgaattgttgtatgtttttttccttttttcatatgccttaccactgcaaaagtggtttggattgcagatttatagggtcagacaagagaaaggggtcattggagcccttgtttctctggacctttaaatgattgaaaattgaacaatgtaaaggatttattttcaaggttgtaaggagtggtgatagataatgaggagaaagacgacctataaaaaaaaacagaaatgagggtaaagacaaggtggtatggatgaacttaagaaacgttaagttctcagttgagtccatatatgttgttgtggaactagggggaatcgatttactttccaatgagagtaatttggaattcatgggtgctttctaaagttcattttttcgcttgggaggctagatgcggaaaggttatgaatctagatcaactttagaaaaaaggatggtcattggtcaatatatgttgtctttgtaaagttgaagaagaatccatggatcacatcatttttcactgtgccaaggtaagagtcctttggcatttgcttttcgctttgtttggtattcattgggtgcaagttgctatcattaaatagattttcttagagtgacatggttcctttgtgggaaaaagacactagaaagttcggaaagcgactccattgtgcatcttttagactgcatggagagaaaggaatcaaaatatgtttgataatgaagagtaattgaatcaagcttcatgaaactcctttttaaagaaaattgttttcatgagtgaagatgtgcatggatataggttctatgtcttttatttgattttgtagattggttggattcttcctaagggagggagttgtctcttgtgctctctcattttggttgtgcctttaggcactcattgtatacattctatgtactatggtgcactgtctttttcttgcttttaatatattcacattgtttgcttatcaaaaaaattatgtcagtaactaatatttaaatctttaaatattattttctcctttactatgaaaaaatccttttttcatagaagagaacctttctgtaattatgatggtttcagttttctcaaagagtatattcatcatcagctatagttgcttgacatgaaggcatctgtcagtactaaaaccacttgactgaatgttgatttgacttattagtgtgttggactacaaatctgaactggactatgccaatgcaagtgtatgttgtgtgattcatcttggaaacaaccaatactttgaaccatgacttgtgtattggcaaaatatcaaatttcttaataagtttgatattatgattgatgctctgatgaagtatgccgatattttagttctgaactctagttctataattaggacttcaccttggatcagttaggttggtttgaagaagctaacccaacctcacttccgattgaaggttaccaactcaaggctgtacttgagtgggtggagttgattgacatgcttcaattaggttaataatatatatatatatattttaaatgcatttctttttttgtatattaaaacctcaagtagattggcaaataatgaagcagacctaaatagttagtttaactaaataatgcatctatagaaaatagttgaaatatattgcaaaaacagtattaaaaaacttgcattaagtatgtaattaaagtaattatgaaattatatactatagatgacaaacattgaattgaattaattttcctatcatgtttataatttctagaagagttggccaactatttgcattctattttgctttgtctactctattttcttctttatgtattgaatgtggtgaaaaatgttaacattgattggccactgccaaacttatcaaaaaaaaaaaaaaagttgattggccaccaccaaacatcttaggtaatttgttacagcttcatatttttgtgagttttcaagaagaaaggagacatttatgttctttacaagtaaaaacatggtcatgaatcattatgacataaatcatgtgaaaaattatacatacatacatacacacacatatgtatgtatatatatacatacctacatctgtgtgtgtgtgtgtgtgtgtgttatattgggtcttaacccaaaattaacccaacttatgagcagttcacctttcatctatactactgttgtttccttgtcccctagtaagtagttttctctttaagcaggtaattgagcaaaatgcgtctatccactacataaatgaattaattatatttgggagaatttgattaatctacatcaagatttggtgaaattagagagacatcacttgtgtttgaaaaaggaatgacctcatgatattagcagggtgatggaatctgcttacattatcccaagattttgtcaagatatgcattttacctctagtgaagcaaataaactcaaaaaacaagcaaataaacaacaaaaagaccaatttagtgtgaatattgttgtctttgcctatcatctatgtagataattttagataatttctactttttgatcaactgtcattcttttttttaccattcaatgctgtgtatattcttgtttctgattaatagaagggcttccacccattaaattaccaatttaacccaaaaacttaagctattaggtaataaactaattatgtatatctagctaatttggttcaaagctttaatgccttgcctaatatgtgggtgtctattgcttacatatgagttcataaattgggaaaataaataagcatgagctttgagctcattgcctcttgaaactggagctttgatatcattatagaccataaagttgattcaaaagtttaagatttgatattatgttagatggaaaatttaatctaaaagaattgaccaataaaacatatattttatagacaaaaacaaactatgatataaaagcgcctaatgaaaagagtgtgtaccccaccctatgtgcacaagaggtatacaagtaaagtagcgccaaactcttcacccaaaaagtcgatggagctaaattagttatctacaatttagactgtcaatgagccctaacaatgtacaaccgtccatatccaacagaactctccaccatttccaaaggcttaatgaatgtctagattttgatttgaatgaatgttcttcaccctttaaaaaacaagcattttgctctctctaagtgcatctagacgaacaaataaaagccaatcgttagaccgtcgttaaacctcccaaactttcaacccaacaagagatttttaaatgaaaaggaaagaacccatcgtaccccaaaaatagcaagcaacatatctcacaactgcctagatctataggattggattaggatatgattggctgattctttattaattttatgaacgctgcaccagttagcccatgtctgccttctcctcatgagcatctctatggttaagattttccccagcattgcctcctgcaagaaaaaacaggttcttaatgggcaccataatcccgaacttattaaataggaaatagagtcgtctcctcggcacaacatttcattatataaaacggaaagttcctgttcaaattcagattataaccaagtttgtttatcttttccaaattgttattatgagagcattttttttaaaatccctttatgggcatatttccttttccaagtcccatttatagaaaaactattattttttcagtctttgtggagaatccactctttccttctcaaattgaattcagggaaaaaaatttcaaattccttccctgaaaagaacaagactagcttcttcatggtctatcttccagaataattcatttagctaatttatatttcagctttttgacctctcctactcttaatgattatgctatgtggaagtaaattgtgtctccattcatatttcttgatgcatggcagaaaattattagtgctctttcatcatgtgacgcttaatatatcctctttattcttcagggcatccattattgcatatattcctgtctccaaca

SEQ ID NO: 12945 - DNA, 10572 bp, Vitis vinifera
  Intron number 8 from transcript GSVIVT01031760001 (locus G SVIVG01031760001) derived from phytozome v7.0 (chr-ID chr3 ; pos 4142702 to 4153273)
ctagtgatgtaagtctgcctacttgagtttactttttggtgcttattgaatattcatgtacagagtttgcacacttattgctctcttccccgtattttggatatatctcttaatttaaactttcttacaagccacttaaaaactatgccaaattgggtgatctaactaaacaactatgtcactacataaggccactagattgcctgccattactaagttaggaccgtatgattggttgccattaatgacccttaaaagcatgatgtgatgtactaattaggatttatcatttatttaatatgattccagtttcacttttatctatcctattccatgcattacactattgagtattttggcctgacatcttttaaattgcatatgatttaggtgtattaggagttgcatgaaagatccaagttatggattcattgcaagtagatgatttgttcatagtcggttcataaacttaggcaatctatttgaggttgtagtgtactacctcctaattggagggataattagtcttggttatcatgataagtgcatcagtgtgtatggttagttatatactaaacaagacttatggtgagtcataacataaaactattgggtagtcgtgactttaccaagctgttatactatgtggtttctcaaccttgagagactattgagcttgtaccaaaatttacaatggttttgatctatggatgagatcctaaaatgatcatgtattccttatgaattagatcactgttgatggaaaccaatagtaataggtattcttaatagtaacactatgatatcttatggagtttgtgataatgtgtctcattgggtgattctaaggaaatgtgttcaattatattgtggccaaatagttccttaagtggaacttgacataaattctttgtgagttagaacatgttagttgattacacaataggaagatctataattgaaggatggtaaagataatcttgtgaaaatttggaaagtacagttgtgcatacagctgtaccacttaattataccgcttagttgtgccgccagttgtaccaccagttgtaccgcacaaagatgaaaatatcggtaatcatggatatatcggtaacttgattttacggatatatcaaagaaatatcgacgggtattttggaaaaaaatttcggtatgccaaaatttgatcaaaactcatggaaatgtaagaaaaacctcatagcaatgtaattagaaatataatagacaatttaaagttattttattgaagaatttgatatatgtatgatataatttgcgatattaaatgtaattatatcatgttgatcgataagaaatgtgaattttgtaattgtacactcattatgaagcttcatgaaagacttgatttcattaaatatcaataatttgtacatattacattgcaatgaccctttagttctatgaaaatctactaattcattcaagatttaaaaaatgtactaattaattacgattgaaaatataaaaaaaaatttgaaaaaattgggaagctactaatattgttaattaagttaataaattaactaaactaaattaattctatgaaaatctactaattcattcaagattttaaaaatgtactaattaattacaaatgaaaatataaaaaaaaaattgaaaaaattgggaagctactaatatttgttaattaggttaataaattaattaaactaaattaattctataaaaatctactaattcattcaagatttaaaaaatatactaattaattacaaataaaaatataaaaaaaaattgaaaaaattgggaaactactaatattgttaattaagttaataaattaattaaactaaattaattatatgaaaatctactgattcattcaagatttaaaaaatgtactaattaattgggaaaaatgtaataattcatatcaatgcggggaagctgggagccgtcggatcaacagcaggtgcagggcgccaattttttcaaaaaattagcgaaaaatcgccgaaataaaccgaaacaaaaggaaatttctccgaaattttccaactggaggcgattttttcaaaaaatcgccgatatttctttttttaccaaaatttcttcgaaatttggtgaaatttacgaatatttcttttatcgacatttcgcccccctttttcgtttcgccgacccccaaaacacaaaatttcggcaaaaaaaaccgaaattttcatccttggtaccacatacagttgttttctatgctaatattatttcttgattttttgagatactttatcctaaaatcaaggattagatttttttgaggtagataacctcaatcattcatgtataaatatcgatgtaataattagtttgaacagtgtcagaaaaataaaagaagtttttttttttttcttcttccccaaatttcttcatggtataagagcgaattctgaaccattcaattcgtccatgaccaaatacgaaatgactaccaaggactcctcaaccttagaagtgtgctgagaagaaagtagaaagaaagtcatgttgagggcacaagccaaccaacttgtcaccgagggttcagccttagcggcttggggtactcccaatccttctaacaacaatcagccaagaaaaaagagaccttggtgtgttcactgttgaaaaccaggtcatactaaggacatgtgctagaaaatccataggaaaccaacgaattggaagttgtcacatcctcaaaatgatagagaaagctgaggacgccgtgtcacaattgaggacaacctagtaccacctaattccagtccgttcaacaaagagcaattggaattattgcaaaaaatgtttaaccaatcccagcatgtggcaaattcctcaaattctatcttcgggtctggattcttaactcaaaaaaggtagttttcttgctgccctgaaagtaaaaagggaaaatttgagtcattggattgttgacttatgagcttttgataatatgattggagatgccacaattcttcaaaattatacaccttgttctagggattatatgattcatatagccgatggtcctctcttaaaggtggtcggtataggttctgttgtcatatctaaggacctaactcttgactctgttcttttggttccaaactgggattgcaatttgttgtccattagtaaactcactcaagaaaagaaccgtgttattaaatttttcccaaaccattgtgttttttaggattagaattcagggaagatgattggcaatgttgaggtgtgttcgaggctttatatcttcaaagtgactgattatattgaaagacaacctcaattgatggtgaaaaaaaggtctttttatgtctttagttctaataaagatagtgatgttatgttatgatattatcgtctaggacatcctagtttcttatatctcaaaaaactccatcattattcactaaaagtccaaatagttttcaatgtgaaatttgccaattatccaagcatattcgcatgccctatctaattcaaccatacaaaccatctcatcttttttccatgatacatagtgatgtttgggggccatataagataaagaacataatagggattagatagtttatgtcctttgtaaatgatcatactagaatttctttgatattcttgatgaaagaaaaatcagaagtgggtcaaattttcaagaaaaatttataacatgatccagacccagttccatgccaaaatacaagtgttgaaaactgacaatgcaagagattatttcaattttatcctgggggaattcttattaaaagaaggtatagttcatcaaagttcttgtattaatactcctcaacaaaataggatagccgagagaaaaaatggacacttgttagaagttgcaagggtccttatgatctcctcctatgtcccaaattttttttggagagaagttgtacttacgacaacctatctcatcaatagaatgctttcttgtgtcttgagtttccaaatacagtgcaaagtctttctcaaatcataacttaacactcgacccatttcctccattccactgatggtatttggttactcagcctttgttcacattccccaacaacctcgaagtaagcttgatcttagggccactaagtgtattttcctaggatactttccaaaccagaaaggctataagtgttagtctcccgtcacaaaaaggttctacacctccatggatgtgacattctttgaaaattagttctattactccaaaacagatattcaaaaggagaatagaattcaggaataccagttttgggaaacagaaattatgatcaaacctcaaacatttgagtctattgttgttcacaactctaaccttatttctcttgctcaaagtgtctcactccaaaccactgaattcgtagacatcgagccaagtactcctctttccccaaaccaatcttagactgtcaataacaatgagttcattgtctactcaaggaaaaagaagaagtctcaagaagatatagagcaacaaacacatcctgaactagtacatgaaactaaaccgaattcaatcctagaagagacacactcaggtgacattaattctaatcctaatgagtcagaatatgctgagctcaatttgccaattaccaaaaggaaaatagtaagatcttccacaaatcatccgatttataactttgtattctataagagtttgtcgccaggttattaggcttttgttactagtcttacggaataattcctaacaatatccaggaagccctacaaatacctgaatataaggcaaccattgaggaagagatttgagctcttgaaaagaattggacatgggagcttgctgaacttctaaagggaagaatttggtcggaagtaagtagatcttcatagtcaagtacaaagcagatgagaatgttgataggtgcaaagctcagctagttgctaagggatttacgtagtcccatgaaattgactaccaagaagcctttgctccagttgccaaatcaaacacaattcatgttttgttgttgataactgttaatcgagattggcctcttcatgtactggacatcaagaatgccttcctcaattgtgacttagaagaagtgtacatagaaattccttcaggtcttgagattgagacaaacattggcaaagtttgtagactaaaaaaatccctctatggtctcaagcaatctcctcgaacttggtttgatcgtttcaccaaggccgtaaagaggtttggttactctcagtgtcagtctaaccacactctatttgcaaaacacactgttgaaggaagaactgtcattatcattgtttatgtagatgatataatcctgattggagatcatttagaagaaataagcaagctcaagagttttcttgcccatgagttcgaaattaaagacggggggaatcttaaatattttctcgggatggaaattgctagatcaaaaatgggtattgcggtctcccaacgtaagtatgtcttagacttgctaaaagagactaggatgcttggttgtaaacctgtagacacacatatgactacactgctaaattgggaatggtcaaaggaagtgctccaatggataaaaggagatatcaaagacttgtggggaaaatcatctatcactctcacacaaaaccagacattgttttttcggtcaacgtagttagccaatcatgaacaatcccactgaggaacatatgaaaattgtaatcgtattttaagatatctcaaaatgacttcaagaaagggactatattaaaagaacacagaagagaaacattgaaattttttcaaatgtagactgggttggctccataattaaccgaaaatttagagttatgatacatggaatttgtgaaggaatgtggttaaagagactcttaaatgaattgaaaattctagtagaagattctatggagatgttttgtgacaatcaagctgccctaagcatcgctaagaacctggttcatcataatcggacagagcatgtggaagtagatcgtcattttattaacaagaagatagaaaaagggacgatttcattggttcacactccaacaactctctagacatcaaacattcttaccaaggcgctttttagaaccaactttgaagatttgagatccaagctaggaatgatcaacatttactacccaactagaggggaagtgtggaaattcggaaagtacagttgtgtatatagctgtaaccctagttgtaccgcatataattgtttcttattctaattttttttcctgattttttgagatactttctcctaaatcaaggattagattttttttaaggcaaatgacatcagccatttttgaatagacatcgatgcaataatttgtttgaatagtatgagaaaaataaaagaagttttttttttcttcttactcaaatttcttcaaatcttgatatgttgatagcatttatcttattagattatgaacgtcagagtatggggagattgcatacaatggataacaggtcatggacccgaatactttgtgtctcgttattatttatatagggtattagagtgcagttgactctttatagtgagatattgagttaatttcagaattgaattatgaaggagtcagtattgtcttatgggttctagtggtccccgtttgagttcatattctttgatgacacaatttatgatggttgaattaattcttagttcacttatgtgtataagggtgttttggtaaatacacaaggttgcacaagagttaatgagcggtctctttgaattagactaattgattaattagaaccctattgggttaattaatcaattaagaccctttgagggctagattaagtgatctaagcctaaggtggactcaagtcacttaagtttaagggaaacctataaataccccctttaggggtaaggctttactattgcatttactattctctcccatacattctagagagagagatcaataaccaccaccttcctagacgtccaccatttgagtgccaagattcaagaacaagtcattgggtgaaagattgctaagttttcgagatcatcaataagatttgacactaatcttcattgatagaatttgatctgagaacatctagatcttggtaagtacaccataccccgtaatctagatcctaaaatttgtttttataagcatatttgcttccacttgctaggatctagtagacctaagaagattacatgcacctaattgatcaagggtcaaagaacaaaatgatttgaaattcccaatagaatcaagagaaactaattttcagggtttctaaggagggtgcctccttagttaagttttctacaaggcttttagccttgaaatagcattgtccttgagatttggagctaaggaacaccttccaaggtggatttctttgcttaggggagcaaatcctattgattaattagatgatgagatggattttgttatgtttggaggcttttgtggttttgttgtgttaatatgggcaaaatggaataaatgcctatgggtaaagtggaacaaatggaagttttggctttggaatttggttgtagagtggatcttcttctgttcatttatttgggtaaagccactaagtccatctttcaaatctaagttggtttgggagatagggaccacttttacaaaatatttgcttgatgggaaaaaaaatatctctctaggaaaaaactcatgttcattaaaagtactcttgccagctgtacttttgtatctttatgtttgctcttgtcatactagtacaaatccaacaaaggttagaaaagattcaaagagatgttttatattgaagaggaaggtttaagaggtaattgcatttggttaattgggaaactatgtgttctaaggggtatgaaggtttgggtatttggaatttacaaatattaaataaggcttggttaggtaagtggctttggaggttttctgtggacatagataagctatggaagacaattatcgtggggaagtttggggacaaaggtggttggtgttttgtggtgagaagaggggtgataagatcaagtctctagaaagctattcgaatagggtggggtgcattttttttttcttgaacttgtatttctttaggtgattggtttaactaagtttaaatatgataattggtatgcagactttgcacttaaggatcattttttggatcttttttccatcaatcaaaacgaagagatcttggtggcagattcctggtatgtggaaggtggttatagccattggaatcagagtcatcaggggttttctatggttttggaaatgatagaactcttttatgcttattgttaggatgtgattgtgtatgttgataaggaggataagttagtgccaaattatgttaaagatagaagaatcttcatgaaatcttctattagcttttgagtgcatattgtaatatctctttcccacgtagaatggtttgagtttcaattgtcctccacaaatttgtttttttttttttaaataaaaataaaaataaaattgtatgagaaaagattcttactccagaatagctcatgcaagagagaaagattgtagtcaattggtgttgtttgtttaagtaggaagaagaattggccagctacttatccattgtataatgacacaaagttaatgggttttattattctcaacctttggtattatttgggtgcttccaaagataattgaggataccttgtgctgttggtacagaggaatagtaaggaaaaagaaagtttggtttacaatcgtatgttgtttactttgatgtatttggaaggaagacaatagcaggatcttgatgtcatggattaatcagaattgcagcagataaatgtttttatgaatgcagtcttcgccaagcaagatgatgtaactcttctttgtttgtgtggattggaagatcaaaaggagaaggaggtgcaggcctttcttctacatatttcattgacgttttgggtattacataagacattgagagcattaccctttttcttttcttttgtcttcttggttttcaaatacatcctgtgtgcatggattctgcccttttggggcttcttctataaaattttacttaaacaaagaattaaatcaatcagctaatgagaccaagttgggcgttagctaatggtcttgcctcagcaagtatatgaaggaatctcccaattatatcatgattcattgtgtctgagctttcagtttgtgcaacatggtgttttaccttgttgggccatctagaatccagctctatgtgaccaaggatgtgtttcttggattgcatggggctttgggggcaatagacgcaaggtggttaggatgatgatttccctttacttattttgcactacctagagagtgaaaaacaaaagaatctttaaaggagtggacaaagttagttgtgaaaagtctctttcttaaagcattgtcttcatggtccaattttttggtgtagtggatttttcttttctaaatttcctagatgtttagactcgatcaatctaagtgtagtaactagtttgtattttttcccttttgttagttcttggtgtgccttatatacttcctgcattctaggttacaccccttttatttgctagggtcccaaaaaatcttttcattttatttaatttatttttttggttttttatatctcttttttatattattatgcatgtttgacaaccaattttcctaaaatcttttgttggaatgcatgatatagtgatatacattgtgggccagaatcctatgagcttaagcttttagagaaattggttatcaaacatggtattacagcctcacttgatgggaggttatgtgttcaaatattaccatatgtttatttcttcaatttattaagcccaaaaagaggctatttattaagcccacatgtaagctcaaaggaggctacaagtaagggagggtgtttgagtgcatgattcactcacacaaatatgtgtaaggccaaaggaggctacaagtgaggaagggtgttcgagtgcatgatatacattatgagtccaaatcctaaaagttcaagcttttaggaaaatcggttgtccaacaagcacacacacacacacacacatgtaagcccaaagggggctacaactaagggagggtgttcgagagcatgatatagattctgagtccaaatcctaaaagcttaagcttttaggaaaattggatgtccaacacacacacacacacacacacacacacacacacattcgtacacgtaaaaccttcctacattcgtacacataaaacctttctctttttttctttttcttttttctcaatatttttgctagtttcttgtgctcgcatattttacctataccttttttcagttgttgacatgagctaatactattggctcacatggattagcctgtgattagatcagcaggccactcttctttagtgggataaccatcttttgggtttgatatgtttgctaatttaaacatgttggcaggtgaactttagctcaggccgttattttggtggaaa

SEQ ID NO: 12946 - DNA, 6818 bp, Vitis vinifera
  Intron number 3 from transcript GSVIVT01036514001 (locus G SVIVG01036514001) derived from phytozome v7.0 (chr-ID chr1 4; pos 22931785 to 22938602 reverse strand)
acgcatctacgttccagagaaaggtttatatcattactactagttacatgaggatattattcctcttagtagactcaatgattattttgtataaatataaaatgcatgttaaggaatactaacctatgacactaatatatttaatctttggttatttgtttatattttgccattttatcttgtatctgcaaaatcaacaagcatgtttttattgcatatttaccattgttttaaaacccggactggactatccggtccgaccgtcggccggtgaccttttcggtttggtccacccttttgggccgatgacttattgaaccggccttgaaccgtcgaaaccgatgattagactggcgaattgagtgaatcggccgatttgtagtgaatcgaacaattcatagcatgtcttttttttttccatgagagatagcgagatggtgggaatgggagactgttggtcgacaatcggtagtcatgctcgagctgtcgccaatggtgaggtggccactggtcagggtaggcgcgggtatggtaagagagagagagagggaaagaaagaaaataaaagggaagaaatggagaagaaaaagagaaaaggagaaaaagcaaaaaaaaggagcaagcggctggaagaagaaaaggagaagaagaagagaaagagggaaaatgggagacaactggtgaagaaacaaggggttttagggttttgttttttaaacgaagggtggaaatcaagtatgaaaatggatggtgcagatgggttctttgaaaaatgggtgtaaatggacctaaaaattggattatctaaaaaatttgggtttttaaaaaaatatatttatatttatttttgtcatttaatttgagatagtaaatataaaaatgaaatattattaaaaattttaattttatttatatatatatatatatatatatatttaattactcataagtatttttattttatgaaaaattttaattatatatatatttaatttcttctaaatattttttattttaataatatttaaattatacatttatggtgttcctggtttgactgcggttcaaccatcggtttgtccagtgaaccgtgaatcggtaattttttcggttaatgaccggttcggttctgaaaatgttgatatttacactacaagttttggttagtcaatgcttgtatggataattagaaatatgaatcaaaatgttctatttatgtatcatcaagattttaaaaattattcaaatcacattatggtgtatagttgaagacacctcatcttgctgataatgtatttcctgttaaatttttatttttggtttcgtttttccttgttctgttctgctacaaaattccatttgtttccctatcatctaaactagttcattaatttgcaataactgacataatgatacaacttctaatattaactgactatttctcaggataaactaacattatacttttaaacttaataaattagaaatgtgaatggaaattttctgcgtgtatgtaattaagtagtaagaagtattcaaatcaaagaatcgtgcaattcctaggaaagtgaggatcatatgaaagagaattcaaagagactttttgtggggaattatgtgggaaagaggaaagatccatttggtaaattggttaaatgcttgtaaggataagaagtacggaggactggggctaagaagattggagggtcttaatcaagccttgctaggcaaatggttgtgaaggtttttcttttgagcgagagagcttgtggaggaagatcattcgttgaaaatcttttcatgtttcacgaggtgttcttcataaaactattcatgtttcacaaggaacttttgtttaaggaagacaaatcttggatgcggtgttgatagctaatgagatagtgaatgagaaaaaggtactttggagaggaagtggtagttttcaaaattaattttgaaaagacttacgatcatgtggattgtggttttctagaccatgtacttgaaaggaaggtgtttagttctagttggaggacttggatgagaggttgtttgtcttcgacaacttttgcaatcttagtgaacgaaaatgccaaaagttgggtcaaagcaattagaggtttaagataaggagatccattgtcccttttcctcttcaccattgtagctgatgtgttaagtagaatgtttttgagagttgaggatggtaggttattagaaggcttcattatgggtaggagtaggattagagtgtctcatctgtaatttgcaaatgacacgatcttttttttagagcatgtttggaagaaatgcaaaatctaagataattttattagttttttgggatgtatttggacttaagatccattttgataagagtattgtctttggtagcaacttgggtcaggatcagatcactaggttagccttgttgtttgattgtaaggcctttgattagcctttcccttatttgggtctcctattttggggaaacccaaaaacatgtatattttgggatttggtgattaagagaatctcgcaaaaattaaataggcagaaaaaattctttttgtcattaggtggaaggataactcttatccagttgtgcttgtctcatttccttagctatttcctcttcttttttaagatacctctatcaatggcgttaaagattaagaaattgtatagggatttcccttggtcaagggttgggtagcacaaaagagactgtctcattagttgggacatggtgtgtaaatccaaggttgaagggggctttgggtttgagaagatttctttaaggaattgtgctctattagggaaatgaccatgaaggtttcttagggaaagttttgctcttctgaataaggctattctgagcatctataggactcattctaataggtgggatgctaatattatagttaggtggtcacattgttgttctcggaaggccattgcttaggtcttttaggattttactagatatactcattttgtagtgggtgatggggcacgaattcgattttgggaagattttgaaatggggagatcaacctttgtattctcaattcccaagtctattcaaaattgtgatggctaaaaaccttcctatctcattaattattggcttcacttaccctttctcttagaactttaatctcttgtttgtatttatctccattcgtcctaaatgtgagagcttggtcattatcttcattagaaatatttatagtaaagtcattctttttagtcttatccaatcaatctgattcagtttcgttctttacaactagttttgtttggaaatctaaagtcccatttaagctcaagacctttgcttagttagtgtcatacaagaaagtaaacaccaatggcacaatacagttgagaagatcttacaaaacccttagtcctgatgtttgcttgttgtgtatggagagtggaaaaatggtagatcatattttcttacattgtccattgacttgggtccatggcatagacttttaagatcaactaagttggattgtgttcctcttaggagtattttttatatgatctcatttaagggattgggaagctccattgtaggcaagtttatttggcaaactgtttgtctcgctttgatttgggttgtttggcaagaaagaaatgttcagattttttaggacaaagcgagggtttcagaggctctttgggatgtcattcatttgtttgcctccttttgggcttcttgcatcatagcatttaaggatgtggttcaacttgattagtttttagtgtatagtttgaaaggtgtgggttagcaaggagaggttgtttggaaggacattattcaattattgttttctgtatattcccatgtggtattttactattgtatagtcttagtactttggatgcttcaacatattttatgattagttcgttgtatttttggaggattcctcattctttttttgtatttttttatccttaatttgatacatttgttgtttctgataaaaaaagataattcatggaaaatttagggagatggaggggggatgaactactagaggggtgagagcttcttttgggatgaacatatggaaatacattagaaaaaggtgggaagagtttagtttcagattagctattccaattggaaatggtaaacaaacaagattttagtgggacagatgggagggggagtttaagttgaaagacattccctatgctttttggaatagcctcctccaaaaatgctatagtttcggattaatgggatataggaggagtcggaggtggccattgggaggttcaatttagaggacccttccaagattggaagatagatgaaatgacccaatttttggagcttgtttacccattgaaagtgcaagaaggaggggatactttactttggaaagatgataggagggaaaacttcaatatcaagtcgtattatagatccctaagtactgagaataatttagtattcctagcgaaagagatttggggatcctgtgctccacttagaatgtgtgtgtgtgtgtgtgtttttttttctttgcttgggaagcagtttggggaagatcttaacaataggtatgtttggggaatatttgatgtgtagtcagaaatgtcaagcattaattaatgtttcttatctcaatgttataaatctgattgcctaaaagaaaaggtattgtatggaatagttttctcttgtggggttgctttgtgttgtattgttcaagatattccatgcaccacaaatcatgctatcaaagttatgatgaggctattgaactcttgaaaggagtgaatgagcaaataccatgatacaataatactgtgggagccttttttgttatttaggtgatataagaaagtcaagataagacaaaaaacctccttatgttctctatttgacttagagaaagtatataagaggttctatagaaatgggctatggtggtttttagaaattaaaggagtattagatagatacgttgacatgataaatgacatgtaggagttgtgactgctacgagacaactgaatctttaatcactatgagcttacattaggggttagtgtcaaccaagtttaccagatatgatttagagttcagtatacatacataaacttaaaattgcttcttagttctaattcaaagtttaaaggaaattcgtagttctaattcaaagtttaaaggaaaaaaatgcatgacaagggttttccttgccctaggagtgtttatagatcctagtggtaaagtgttgcgagatttttctaaatatgttggagagagttttaccattgaggtgaagatagtagcagttttggaaggtcttctatagggccaggttctaggtctctccaatctctgagttgaaggagattgctattgttaatttgtaggtgactaataaagaaagaggtgtgtggaagtatggtaagtgataagtgccttcacaaaattgatgatattgccacaaactttggatgctttttctcttgagctccatggttagctaatcatgtttcatcatttagcaaagcaaggagctaagaaaccaacttctttttgttattttttcctccctgatttgtgtagatcacttgtatattattctctttcctttgagctacaacttagtatgcatttctgttggagtggtttatacatatttattttgttttgatcaatttcttcttttttttttttccttttctttttttgatattttggacggatctcttgtcctccactatacttatgaattcatttcaatgtattttttttagtaagaaactcttgatattttaatttatactagaagggttcatgtgctaagggcatgatgacataacttgccttacaaaccaaagaaaatctctttgcaatttctcaatcttagattctattgacattggaatcttgtaaagaattacaagaagtttctataaagtctttaagtttttaattttaagaggaaattttctattttccttttaattctgttatttggaagatttaggaattttaagaatgaaataagattcttaataagttactatctataagttaggtttctttttcatggttttattaagttttttaaagcatatagataaggctaactgctgtaaaatgaaaatggatgatgaataatattaaattttttgcaaacctggtaatttctaatggccaaactccattatttttcttttaggtggtactcctaaaaggttttagtgagactttgaagatttatttatttatttttgtcttcaattttacttttctgaatgccataattttattcctcattcatttccttaaatcctaaaacattgatgccctagcccacctagcttgtagacaaccatcttatggttgtcctatattagttttacccctgaggcatgctttcttaaaccttgatgtgcatgtacataatacattaatattgtcttgctcatgggcaacttgctatgtttttcccagttgtacatgactagatggaatgttgttgaaaatttgtaatgagtgcattgctgcttgatttgcttgtggatattttgcctggttaatagccaataggttaggaatggtgtaatgtttatattagaaggtgataggtatgttgtgctggaaatcattattgtttatttggacctgttagtagaaagcatctagaaatacttgaattacaatctaaaacacctgtctcccccttatccatatatcatcagtattatgcttataccaagaaatatacttccaagtttgaaatgtgtttatctgtccctcagcttgccgtgga

SEQ ID NO: 12947 - DNA, 2363 bp, Vitis vinifera
  Intron number 5 from transcript GSVIVT01021028001 (locus G SVIVG01021028001) derived from phytozome v7.0 (chr-ID chr5 ; pos 15070484 to 15072846 reverse strand)
cttatttccaaacaggttaattctatgtacctctttggtgagagttttctttgccatcttaattctctatgttcttctctgaggatatttttctctgccatcttcgaacaggttaattctacctacctctttgtgaatagttttctttgccatgttatatcactatttcttttttattcttctcttttcacaatctaatagatcactctctatgtgaggtttgcctatatttcccttcaaaactaatctcttttccaatttatacaattaaatagaactagttcctgttgtaagaagaatgcatgcaagttctagtttcttcttatcactctttgcacccatttgagtagatatctatctcatgcatcatacctacatttgatttgttaaatttctgttggcttgggcggtattctctgatatgtagttacttaatacattatgagttatctggaattttgtgccaaaagatgttttatttctaatgtgaaacaatcatttatatgttttcaggacttctattatttttagcagtctaattgcagaaggttttaaaaagataagattttagcttgctaagaaatacctcaatgggtcgaccaatagtgcacatggattgactgaaggactatgcctgtggatgggcatatgattgtgtgtgttggtagcaaatatccaaaagagcaattctttatgattgaagcatcaatatcatggatccattgaagaatgatgctctcaacttattcattttctacaaacaaacttcttaagcaccaaaatcctttccaaaagcttttaaagattattttaattttaccaaaaattgatctatgtatttaggtcagttgcccatcttaaggtagtttgggttgatgactgttgaatgtccagcacaactgcagtaacttgtcttcttctgagcttgaaatgaaatgaattgacttgatgaagtgactctaaatatagatgccatttacaaactctttttggaagatgaatggctaaaactaaatttggacattcaaaatcctagaagactatttttggcaaagctttatcctgtttttacatgggcatttgttaaaattgtgcttctttggttttctctggttatggcaggattttcaaaaaataaatgaaaataactagtgatgttatgagttttgtgtggcacgtgaattattggaggtatattatcaaactttttagtgagcacacaataattcaatagcttgttcttgttcaactacattagtgaagctaactgtgagtaattactggaattcaagctcagtatttactatcacagatatatgccttacatattagtagcttccgtggttacttggactgcaggttattttctgtaggcaacataaaccctaatttacttgacaacttaggcttagcctgttacaaagatttgaaaccaatacaaattaaaggccataaacacgacctagtttaagagagaaaataactaatagatcaaatctcaaataagctaaaatgaattgctaaaaattgtaataagctaaaatgcaagtcaatgagcctcttacgttttcattcgatggctcagctgtgagcctgttgcatccaaaaccatacctcaatcttgatcacaccatttatggggttatgcatgatttgaactaagctgggcatggaccaattattgcttcaaactttggtgtcaaactatttttcctcagtacctcccctacagtattgtcacttaagagtttaaccaccaagttcaggatggattggtgtggttcctctacgcctaggacaccagaatatcgaaccatgaacgaagagaggcatgagagaaaagcatattggctagtgattgtgaggacccaattcttgactggaagggacaccaaaggcctctacccttccatccgatagagagcaggggcagagcttttggttttttcagttaatattaattctaatgtccttgtccagttgctgtatcgcaaggggatttttgctgtcacatttagtttgcttgtgtaaatttacaaatacactcagtttctctgccaattccttcttgaccatccttttccttattatgttctctgtctttcatgttagttttagagcttatttctgatctgacaagtaatggtttctctacatggaactttaaataattggatactctggtgcattgacactttcttggtcattgtatctaaatactctgccatttttgcttattcacttacctcttaagctagtgtatactgtgcaaattgaagcatagtattttcacttggagatgtaattgaccattctgtcaaattgcagcttcttaagcccaacaaaataagattgggaaactg

SEQ ID NO: 12948 - DNA, 14685 bp, Vitis vinifera
  Intron number 1 from transcript GSVIVT01004895001 (locus G SVIVG01004895001) derived from phytozome v7.0 (chr-ID chrU n; pos 16494809 to 16509493)
caagcccattgggtactttcatttccttggttggatacctattatgaggaatttcattcttaccccaacctgacctgacccaaatatttttaaagggttcaggttcaagcttcgcttttatttgaggtgaggcccaaaattcaacagcaagccacattggttgaattcaagttaaaaataaatttgtgagaacccaatctttgggtacatgatgattaaatttttagcttaaatatcaattacaatactttaagttaaacaaattgaaggaaaaaaagaaaaaagaaaaaccaatttgtgtcccatattaaagttttcaaaaaattaaattattatttaatataaaataattaaaaacaactaagatttgttccaaaaataataatttaaaaaaaaatttaaacaatttttaaaaataaaatgaaataaaaaataatttttagaaacacaagtaggaatttttttcacctatttttctttaaaaataaaaataaaaataaaaatatgggtctatttaattatgttttttaaaacttgtttttaagttaaagaataaaaaatagtttttaaaagaaaatttcagaaaatatgccaaatgggtcctaagatttcttaattagggttcttctataaaagatgaaaaatattaaaatttggtttttaaataatataatgatttatttaactctaggttaaatttctttcaaaataaaaattattgaaaattttaatattcttattctggtcaatatgttacaatgataaatacttagatattatttttcaaacttatggtaatcttaaatcataattaaccaaattctttaaactactttctaattaaatttccctttaactaattataaaccattttctcaaaaaaaaaaaaaaagttggttgtaatatttatttattataacattgaaatttctatttataaaagtttatagtaaaatataaaaaatttatttaggaggcattgggatatacttctcaaagaaaacaatttttttttttcttttgggtctttcgtctgtttaggatgaggttaaaaaaataattggagggtccaactaaaaatataaggccactgggtcctttcattccaacaaacaaaagactaaaaaggccaactaaaatgcaagcccattggatactttcattcccttggttggatgtctattatgaggaattttattcttagcccaacctgacccaaatattttttaaggggttcaggttcaagcttcgcttttatttgaggtgagacccaaaattcaagttgggcaagccacattggccgaattcagattaaaaataaatttggcacaacccaatctttgggtacatggtgattaaatttttagcttaaatatcaattacaatactttaacttaaacaaattgaaggaaaaaagaaaaaagaaaaaccaatttgtgtcccatattaaagttttcaaaaaattatttatagtttaaattattatttaatataaaaataattaaaaacgcctaagatttgttctaataataataatttattttgaaaacaaatatttaaaaataataattataaactttttttaaacaatttttaaaattaaaatgaaataaaaaataatgtttagaaacactagtaggaattgttttcacctttttaaaataaaattaaaaattaaaatatgggtttgtttgattatgttttttaaaacctttttttaagttaaaaaataaaaaatagttttaaaaaacaatgtccagaaaatatgccaaatgggtcctaagattgcttaattacggttcttctataaaagatgaaaaaaaaattataatttggtttttaaataatataatgatttatttaactataggttaaattttctttcaaaataaaaaattatttaaatttttaatattcttattccagtcaatatgttacaatgataaatacttaaattttcaaacttacagtaatttaaaattacaataatccaaattccttcaattactttctaattaaatttccctttaactaattaaaagcgattttctaataaaaaaaaatggttgtaatatttatttattataatattgaaatttctatttataaaagtttacagtaaaatataaacaatttatttaggaggcgttgggatatacttctcaaataaaacaattttttttttcttttgggtccttaggctgtttaggatgaggttaaaaaaataattggagggccaaataaaaatacaagcccattgggtcctttcattccaacaaacaaaagactgaaaagacccaactaaaatgcaagtccattgggtactttcattcccttggttggatacctattctgaggaatttcattcttagccaacctaacccaaatacttttaaagggttcaggttcaagcttcgcttttatttgaggtgagacccaaaattcaatagtaagccacattggctgaattcaggttaaaaataaatttgtcacaacccaatctttgggtacatggtgattaaatttttagcttaaatatcaattacaatactttaagttaaacaaattgatggaaaaaaagaaaaaagaaaaacaaaattgtgtcccatattaaagttttcaaaaaattatttataattaaattattatttatcatgaaaaatcattaaaaacacctaagatttgttctaaaaataataatttattttcaaaacaaattttaaagacaaaattttaaaaataataattaaaaaccttttttaaacaatttttaaaattaaaatgaaataaaaaataatttttcgaaacacaagtagaaattgttttcacctatttttttaaataaaaattaaaatatgggtctgtttgattatgttttttaaaacttgtttgtaagttaaagaataaaaatagctttgaaaagaaattttcaaaaaatatgccaaacgggtcctaagattgcttaattaaggttcttttataaaagatgaaaattgttaaaatttggtttttaaatattataatgatttatttcactataggttaaattttctttcaaaataaaaaattatttaaaattttaatattcttattctggtcaatatgttataatgataaatacttagatattatttttcaaacttacggcaattttaaatcataataatccaaattcctaaaactactttctaattaaatttccctttaactaattaaagcgattttcttaaataaatggttgtaatatttatttattatagtattgaaatttctacttataaaagtttatagtaaaatataaacaatttatttaggaggtgttgggatatacttctcaaagaaaacaattttttttttctttagtgtccttgggctgtttaggatgaggttaaaaaattaattggagggcccaactaaaaatacaagcccattgggtcctttcattcaaacaaacaaaagactgaaaaggctcaactaaaatgcaagcccattgggtactttcattcccttggttggatacctattctgaggaatttcatttttaacccaacctggcccaaatatttttaaagggttcaggttcaaggttcgcttttatttgaggtgaggcaacaaattcaacagcaagccacattggctgaattcaggttcaaaataaatttggcacaacccaatctttgggtacatagtgattaaatttttagcttaaatataaattacaatactttaacttaaacaaattaaaggaaaaaaaaaaaaagcaaaaccaatttgtgtcctattttaatgttttcaaaaaattatttatattttaaattattattttatataaaaaaatcattaaaaacacctaagatttgttctaaaactaataatttatttttaaaaataataattaaaaattatttttaaacaatttttaaaattaaactgaaaagaaaaataatttttcgaaacacaagtagcaattgttttcacctttttttttttttaaataaaaattaaaatatgggtctgtttgattatgttttttaaaacttgtttgtaagttaaaaaataaaaaatagctttgaaaagcaattttcaaaaaatatgccaaacgggtcctaagattgcttaattagggttcttctataaaagatgaaaattattaaaatttggtttttaaatattataatgatttatttcactataggttaaattttctttcaaaataaaaaattatttaaaattttcatattcttattccggttaatatgttacaatgataaatacttagatattatttttcaaacttacggcaattttaaatcataattatccaaattcctaaaactactttctaattaaatttccctttaactaattaaaagttattttctaaaaaaaatggttgtaatatttatttattatagtattgaaatttctaccaataaaagtttatagtaaaatataaacaatttatttaggaggtgttgggatatacttctcaaagaaaaccatgtttattttttcttttgggtccttgggctgtttaggatgaggttaaaaaaataattggagggtccaactaaaaatacaagctcattgggtcctttcattccaacaaacaaaagactgaaaaggcccaactaaaatgcaagaccattgggtactttcattcccttggttggatacctattctgaggaatttcatttttagcctaacctagcccaaatatttttaaagggtttaggttcaagcttcgcttttattttaggtgaggccaaaaattcaacagcaagccacactggctgaattcaggttcaaaataaatttggcacaacccaatctttgggtacatggtgattaaatttttagcttaaatatcaattacaatactttaacttaaacaaattaaaggaaaaaaaaaaaaggcaaaaccaatttgtgtcctattttaatgttttcaaaaaattatttatattttaaattattattttatataaaaaatcattacaaacacctaagatttgttctaaaactaataatttatttttaaaaataataattaaaaattatttttaaacaatttttaaaattaacatgaaaaaagaaaatttttgaaacacaaatagcaattgttttcacctatttttttttaaataaaaattaaaatatgggtctgtttgattatctttttttaaaacttgtttgtaagttaaagaataaaaaatagttttgaaaagcaattttaaaaaaatatgccaaacgggtcctaagattgcttaattagggttcttctataaaagaggaaaattattaaaatttggtttttaaatattataatgatttatttcactataggtaaaattttctttcaaaacaaaaaattatttaaaattttcacattcttatttcggttaatatgttacaatgataaatacttagatattatttttcaaacttacaccaattttaaatcataattatccaaattcctaaaactaatttctaattaaatttccctttaactaattaaaagcgattttctataaaaaaaaaatggttgtaatatttatttattatagtattgaaatttctatttattaaagtttataataaaatataaacaatttctttaggatccttaggctatttaggctgaggttaaaaaaataattggagggtccaactaaaaatacaagcccattgggtcctttcattccaacaaacaaaagactgaaaaggcccaactaaaatgcaagcccattgcgtactttcattcccttggttggatacctattctaaggaatttctttcttagcccaaactaacccaaatatttttaaagggttaaggttcaagcttcgcttttatttgaggtgaggcctaaaattcaacaaggcacattggctgaattcaggttaaaaataaatttggcacaacccagtctttgggtacatggtgattaaatttttagcttaaatatcaattgcaatactttaacttaaacaaattgaaggaaaaaaaaaaatttgtgtcccatattaaagttttcaaaaatttatttatattttaaattactatttaatataaaagtaattaaaaacaactaagatttgttctaaaaataataatttatttttataaaaaaaatttaaaacaaatttttaaaaataataattaaaaactattttgaaacaatttttaaaattaaattgaacaaaataatttttagaaacacaaatagcaattgttttcacctttttttttttaaataaaaattaaaatatgggtctgtttgattatctttttttaaaacttgtttgtaagttaaagaataaaaaatagttttgaaaagcaattttaaaaaaatatgccaaacgggtcctaagattgcttaattagggttcttctataaaagaggaaaattattaaaatttggtttttaaatattataatgatttatttcactataggttaatttttctttcaaaataaaaaacttatttaaaattttcatattcttattccgattaatatgttacaatgataaatacttagatattatttttcaaacgtacgacaattttaaatcataattatccaaattccttaaagtactttctaattaaatttccctttaactaattaaaatcgattttctaaaaaaaaaaatggttgtaatatttattagtattgaaatttctatttttaaaagtttatagtaaaacataaacaatttatttaggaggtgttgggatacacttctcaaagaaaacaattttttttttctttagggtcttgggctgtttaggatgaggttaaaaaaataattggagggcccaactaaaaatacaagcccattgggtcctttcattccaacaaacaaaagactgaaaaggcccaactaaaatgcaagcccagtgggtactttcattcccttggttggatacctattatgaggaatttcattcttagtccaaactggcccaaatatttttaaagggttaaggttcaagcttcgcttttatttgaggtgaggcccaaaattcaacagcaagccacattggctgaattcaggttaaaaataaatttggcacaacccaatctttgggtacatggtgattaaacaaattgaaggaaaaaaaaaaaaaaaacaatttgtgccccatattaaagttttcaaaaaattatttatattttaaattattatttaatataaaaataattaaaaacaactaagatttgttctaaaaataataatttatttttaaaaataataattaaaaactatttttaaacaatttttaaaattaaaatgaagaaaaataatttgtagaaacacaagtagcaattgttttcacctattttttttttttgaaaataaaaattaaaatatggttctgtttgattatgttttttaaaacttgtttgtaagttaaagaataaaaaatagctttgaaaagcaattttcaaaaaatatgccaaacgggtcctaagattgctaaattagggttcttctataaaagatgaaaattattaaaatttggcttttaaatattacaatgatttatttcactataggttaaattttctttcaaaataaaaaattatttaaaattttcttattcttattccggttaatatgttacaatgataaatacttagatattatttttcaaacttacggcaattttaaatcataattctccaaattcctaaaactacattctaattaaattttcctttaactaattaaaagagattttctaataaaaaaaatgtttgtaatatttatttattatagtattgaaatttctatttataaaagtttatagtaaaatataaacaatttatttaggaggtgttgggatacacttctcaaagaaaataattttttttttctttagggtcctagggctgttgaggatgcgggtaaaaaaataattggagggcccaactaaaaatacaagctcattgggtcatttcattccaacaaacaaaagagtgaaaaggcccaactaaaatgcaagcccattggatactttcattcccttggttggatacctattctgaagaatttcattgttagcccaaactgacccaaatatttttaaagggttaaggttcaagcttcgcttttatttgaggtgaggcctaaaattcaacagcaagccacattggctgaattcaggttaaaaataaatttggcacaacccaatctttgggtacatggtgattcaatttttaccctaaatatcaattacaatactttaacttaaacaaattgaaggaaaaaaaaaataacaatttgtgtcccatattaaagttttcaaaaaattatttatattttaaattattatttaatataaaaataattaaaaacaactaagatttgttctaaaaataatattttatttttataacaaaattttaaaacaaatttttaaaaataataattaaaaactatttttaaacaattcttaaaattaaattgaaaaaaataatttttagaaacacaagtagcaattgttttcacctttttttttttataataaaaataaaaatatgggtctatttgattatgttttttaaaacttgtttgtaagttaaagaataaaaaatagctttgaaaagcaattttcaaaaaatatgccaaacgggtcctaagaattcttaattagggttcttctataaaagatgaaaattattaaaatttggtttttaaatattataatgatttatttcactataggttaaattttctttcaaaataaaaaattatttaaaattttcatattcttattctggttaatatgttacaatgataaatacttagatattatttttcaaacttacggcaattttaaatcataattatccaaattcctaaaactactttctaattaaatttccctttaactaattaaaagtgattttctaaaacaaaaaatggttgtaatatttatttattatagtattgaaatttctatttataaaagtttatagtaaaacataaacaatttatttaggaggtgttgggatacatttctcaaagaaaacaaattttttttttctttagggtccttgggttgtttagcatgaggttaaaaaagtaattggagggcccaactaaaaatacaagcccattgggtcctttcattccaacaaacaaaagactgaaaaggcccaactaaaatgcaagctcattaggtactttcattcccttggttggatacctattctgaggaatttcattcttagcccaacctggcccaaatacttttaaagggtataggttcaagcttcgcttttatttgaggtgaggcccaaaattcaacaacaagccacattggctgaattcaggttaaaaataaatttgtcacaacccaatctttgggtacatggtgattaactttttagcctaaatatcaattacaatactttaagttaaacaaattgaacgaaaaaaaaaagaaaaaagaaaaacaaatttgtgtcccatattaaagttttcaaaaatttatttatattttaaattattatttatgataaagaatcattaaaaacacctaagatttgttctaaaaataataatttatttgtaaaacaaaattttaaaataataattaaaaaccttttttaaacaatttttaaaattaaaatgaaataaaaaataatttttagaaagacaaatcggaattgttttcacctatttttttataaaaataaaataaaatatggatttgtttgattatgttttttaaaacttgttttgaagttaaaaaataaaaaatagtttttaaaagcaatttctaaaaaatattgcaaacgggtcctaagattacttaattagggttcttctataaaagatgaaaaatattaaaaattggtttttaaataatataaggatttatttaattatagattaaattttctttccaaataaaaaattatttaaaattttaatattcttatgctagtcaatatgttacaatgataaatacttagatattatttttcaaacttaccgcaattttaaatcataattatccaaattcctaaaactactttctaattaaatttccctttaactaattaaaagtgattttctaaaaaaattggcataatatttatttattatagtatttaaatttctatttataaaagtttctagtaaaatataaacaatttatttaggaggtgttgggatacacttctcaaaaaaaacaatttttctttctttaggttccttgggctgttcaggatgaggttaaaaaaataattggagggcccaactaaaaatacaagcccattgggtccttcaattcaaacaaacaaaagactgaaaaggcccaactaaaatgcaagcccattgggtacttcaattcaaacaaacaaaagactgaaaaggcccaactaaaatgcaagcccattgggtactttcattcccttggttggatacctattatgaggaatttcattcttagcccaacttggcccaaatatttttaaagggttaaggttcaagcttcgcttttatttgaggtgaggcctaaaattcaacagcaagccacattggccgaatttaggttaaaaataaatttgtcagaacccaatctttgggtacatgatgattaaatttttagcttaaatatcaattacaatactttaagttaaacaaattgaaggaaaaaaagagaaaagaaaaaccaattagtgtcccatattaaagttttcaaaaaattattgatattttaaattattatttaatataaagaatcattaaaaacacctaagatttgttctaaaaataataatttatttttaaaacaaatttttaagacaaaattttaaaaataataattaaaaaccttttttaaacaatttttaaaattaaaatgaaataaaaaataatttttagaaacacaaatcggaattgttttcaccaatttttttttataaaaagaaataaaatatgatttgtttgattatgttttttaaaacttgtttttaagttaaaaaataaaaaatagtttttaaaagcaatttccaaaaaatattgcaaagggttcctaagattgcttaattagggttcttctataaaagatgaaaaatattaaaatttggcttttaaataatataatgatttatttaactataggttaaattttctttccaaataaaaaattatttaaaattttaatattcttattctggtcaatatgttataatgataaatacttagatattatttttcaagcttacggcaattttaaatcataattatccaaattcctaaaactactttctaattaaatttccctttaactaattaaaagcgattttcttttaaaaaaaaatggctgtaatatttatttattatagtatggaaatttctatttataaaagtttatagtaaaatatgaacactttatttaggaggtgttgggatatacttctcaaagaaaacaactttttttttctttagggtccttgggctgttgaggatgaggttaaaaaaataattggagggtccaactaaaaatacaagcccattgggtcctttcattccaacaaacaaaagactgaaaaggcccaactaaaatgcaagcccattgggtactttcattcccttggttggatacctattctaaggaatttcattcttagcccaacctggtccaaatatttttaaagggttcaggttcaagtttcgcttttatttcaggtgagacccaaaattcaacaagaaaccacattggctaaattcaggttaaaaataaatttgtcacaacccaatctttgggtacatggtgattaaatttttagcttaaatatcaattacaatactttaacttaaaaaaattgaaggaaaaaaagaaaaaagaaccatattaaagttttcaaaaaattatttatattttaaattattatttaatataaaaaatcattaaaaacacctatgattttttctaaaaataataatttatttttaaaacaaatttttaagacaaaattttaaaaataataattaaaatccttttttaaacaatttttaaaattaaaatgaaataaaaaaaattttagaaagacaaatcggaattgttttcacctattttttctataaaaaaaaaattaaaaaatgggtttgtttgattatgttttttaaaacttgtttaagttaaaaaataaaaaatagtttttaaaagcaatttccagaaaatattacaaatgggtcctaagattgcttaattagggttcttctataaaagatgaaaaatattaaaatttggtttttaaataatataatgatttatttaactataggttaaattttctttccaaataaaaaattatttaaaattttaatattcttattctggtcaatatgttacaatgataaatacttagatatttattttcaaacttacggtaattttaaatcataattaaccaaattacttaaacttctttctaattaaatttccctttaactaattaaaagcgattttctcaaaaaaataaaataaaattggttgtaatattaatttattataatattgaaatttctatttataaaagtttatagtaaaatataaacaatttatttaagaggcgttgggatatacttctcaaagaaaacaatttttttttcttttgggtccttgggctatttaggatgaggttaaaaaaataattggagggcccaaataaaaatacaagcccattgggtactttcattcccttggttgtgcctattcggaggaatttcattcttagcccaacctgacctagatatttttaaggggtttaggttcgagcttcgcttttattttaaatgaggcccaaaattcaagttgggcaagccaattgggccgaattcaagttaaaaataaatttgacacaacctaatctatgggtacatggtgattaaatttttaacttacatatcaattacaatactttaacttaaacaaattgaaggaaaaaaaaaaaaaaaaaaaaccaatttgtgacccatattaaagttttcaaaaaattatttatattttaaattattatttaatattaaaaataattaaaaacacctaagattttttctgaaaataacaatttatttttaaaacaaattttcaaaaaattttatttgtcgaaagtttgttaaacctgtttttcaagttagaattttttttaaaaaaaataattggaaacaatttttgttgtaaataacaaaaaaaaaaccgttttaaaaaatattttcaagttagtttcaaaatttatatattgtaatagattttaacacttaataaatttttttttttaaaaaaggtcactaacagtgcatttgatagtaattttagaaattatttttaacctaaaaaatatatatatatatctatattttttaaaattagatgtttaacaaaattaaaaaatacttttaaaattttgaaaaatcattattgtaatttttttaggaaacattagattggtaattctcctaaagacactttcagaaatgcttccactaaaaacatttcgagtaaaaacacgagcccaatagtgacaatagtgacaaagaaatcatgcatttgtgatcatcctcttaaattgcaatagtgatagacaaacgtatatcatgttcacacccccctcaaacatgttcctgtacccaccttgggtgtgagagacaaattatagtattagtgacaaataaatcacacatttttatcacacacctatggccttatacccatgattgacaaatcacacatttgctattacatgcatgtagccctatacttgccatgaggcataaatcatggtagtagcagacaaatctcaatcctcccaaatcatagtagtggtagataaatcatgcatttgtgattatacataattagacaaataaataaatgggggagtgatttcaactcgagacctctaaataacctaaatctgattctattaagtaatcaattttcctcaaagttttaagttatcaagaattggacccatattttgtatatcatattctaacaaaagcaatattagtctaggttaggctagtctacataggtggtctaaaaatattcttggcctatgacctccaaaccgatttctcctattggcaagaaataagtatagtgaccaaagaacttggtataattgaaatgtaagttggcattccatgaattgtttgggggaatataattgaatttcattgattcttgtatttgggagttcaagccaggcaagacacaataagattttgtgagcatgttaggtacattaaaaatcaatatatgaagaagttcaaatatgatcattaaaaaacaggaactagaaaaaaggtattagaatgtgcagtaaattgcaagaaacaatcttttgtgtttgacttgttcaaaggaagggatgtaagcatggaatcctataaatataccagctttctggttgtcttaccctcaaaccccctcttattatgggatgttagttcctttcctttccttaataaaaattttctatttactctaaattcttgtttcatgcaatattgttttctagttggaaatttatgtgacatggtcaatgcacaactaacatgattttctatttaagatgttttttttttttaaaaccaatgattgcataagaataactcattacaatttaacctttttttaatgtctagc

SEQ ID NO: 12949 - DNA, 2314 bp, Vitis vinifera
  Intron number 3 from transcript GSVIVT01001737001 (locus G SVIVG01001737001) derived from phytozome v7.0 (chr-ID chr1 0_random; pos 652653 to 654966 reverse strand)
aagacttgatcttgctaaaattccacaaggcaaaggtttggtaatttcaattgacattattaatctaacaatagtttattagtgcatagatgcattttctcataccaattatattatttttattactattagtctactactactgtcattgttatatatattattataattcattttcttataagtgaatagatctatttggaagatgaattaaatactcgatttagttgctaagaagaataaaaaaaaaaaattagggtaatcaatgtaaaaccaaattaatgaataaccaatgatttatgatttttgcataccctacaaattttaatggtgagactccattatttttcttctaagacattaacgtttccatcttttatcctttatcttacttttcctatcttttattttacttttccccattaccataatttttattatttattttcctccttaaatcctaaaagattgaaaccttagtccacctatttgattgtatacaaccatcttacgattgttctacatcacaattatgcaattacttgattggagttgacatagagtattttcaaccaactttactaaggggttcgatttagttatacaacaacttgactggtagtcaagttagggtgtccagctcaattatatgccactagactagtagtctaccacattattttggcacgtcaggtttgcctgaagcttatttcaactcgaaactaagagccattaagaattgcttcttgtttttagctttagctagaagtttaagtgaaatcgaaattagaatttaggtaattttctgaaaaaaagggtatttaggtaattttggagattagattgtttcttattataattatttagtagttttaaaattatccttaaaagaagtttctaaattaatatttttttcttataatttgtatttgattcttttgaatttagaagtcttctttatttttttatttttttatttgaaacaaaagatgtatttattatggttaaatagaaacatgagaaagatgagtagtcctccctaaaattatgaaaaactggatcaaaatatgattgaactcctttgccgtacaaggaatttatacaaaattttataaagtaaagaaagtttataaagcaactcttataacaagaagtttataaagttatagtttttttttttttttttttttttgcaaatttattttcttttaatcttttgaaaaatatttaatagttttagaaaaggaattaaaatgttaatatattactacgtaggttatgtttacagtttattcaatttttagggatttcttaagtttataaataacgttaattgatgtaaaatgagatgaatgatttattattattattattatcattattatgcttgactccattatttttcttctatgtgagactcctagaaggcctgaatgagactctaaaggtttcctaatttttttttctttatttcttattttcttatattttatttttactttccttgattgacatacattttatttcttgctccacctatcaaaaataaaaaaataaaaatttcttgctcctcttcttaaatcctaaaagatcgaatccctaacccacctagttgatggtggactatcatcttagggttttcctacatcctcaacagcaattgtagggctactaagttatggtagcaactatttgaagggaaatggttattgattgtgagagattaaagaatgcgtttgtaattgcaaaaaccaaaaggaaaaaaagaaagaaaatagaaaggaaaaaataacaaattgggagaagaaagaaaaaacttctagaatcactctagttgtcttccagtatcattcatttctatatcttctctcaatccactattctgctgtaatattaagtcttctctctctccctctttctctcccactaactctttcacagtatgtgtgcaacatgtgataagtagcagcagttaaattacagtttgcttcttattggagttaagaatcagtaggaaaacaaaacaataacaaattgcaaaagagttgtctttagctctttattctgtgtaagatacggttttcacttttcatgtaaggagagagcattttttttttgtttttttgtttttttctgttttacttttaatgcatattgtatacattgtgtgtattgggtgcatcctttcttaggtgctattaatatattttctaatgttccctttaaaaaagaactctttcctttctctttctccttattgttctcttccgattggtaaggattgctgaaaattttgactttcaacttagatcac

SEQ ID NO: 12950 - DNA, 2923 bp, Vitis vinifera
  Intron number 5 from transcript GSVIVT01003119001 (locus G SVIVG01003119001) derived from phytozome v7.0 (chr-ID chrU n; pos 7434150 to 7437072)
gcttcgaaacctggggtgactgttagaaagaacccaacggtaaaacagtaacttaactcccttgctcgaattgacgaaaacacccccctccgcctcccatcatttcatatttccccttttctttttctttttctttgttttttttccctttagtagtttaatttcctcataagggtttgatgcattttattttctttttttcgtcagaggtaatcatgtagcctagaagacataaaaagtataatgaggcatccgaatgatattattgtaattttgtcaatcaagaatgtcatattacttatggagatataaataattttttatttaaaaaaaaatatttaccacttcaaaattttattcattctcaaaaatatatttttaaaaaattatcatcctcgtttactattatagaaattaaatctttttaaaatataattttgaattcatctaaacaaaagagcttttttttttaaatattttggatttttattaaaatatataaatatttatatatatatatatatatatatgaaagattctagatcttttttcaattagttgtgtactcttttacatgaaaagcatttaggatatttgaagagaatatgaaagaattttcggatttgacaggtaaaaaaagggcatatacctctttcatggcatacaacccacctttattatgacttcaaaactaattttttattccataaatgctaagaaaaaaggtcaaaaagacgtggcgtttggatggttatctatttactttttttttttaattttggaaaaaaaaaattgagattcttagcttttaaatctaaacactaaccccaagagaacagaggaggcctgctttggaaaattctagcagctcaccttttgtacatgcttcaaattccaattgaagagggttaaagttcaatcaaattccaagaaattcttttcctcctcactttcttttgaggtactaagggggaaaaattatagataaattcaaaggaaaataaccttttctaaagatgagcagagaagctgtaaaacctgtagtaagcgtgagtgtagaaaggagactgagttgattgtgtgtgtgtgtttgtgcttgggaggtggtgatggtggtccggggccttggtggtagaaaaccaaaaggagagaaaggaaaagaaaagaaaagaaaggaaaagaaaaaaaaaaatggaagatagaaaaaagaaagagggggcaatgggggatggtgagaaaatgaaagagaaaatgtcaacggttatgaaaatgatgctctattcaactttgagagtttgaatcaccaaaggattgtgtgtttttcttttcccctttctcaaattctgtgcacgtccccatactacagcctttcgcctcagcacctcaacccctacgattcaatagaacttgggaaaatgataagtcacccaagtgatatcgtatcaaaaaacctttaccatgaaccattgatgcatacaagtaaataacaacgaggtcaaagtccaatgggacgggtgttttcagagattttcaactaaatacaaggatagaatttaagtttttcaactaatgaaaaggatttgatatcatgtataatagaagaagccattctatgtattaatcatttctctgactaaaattgagaaaagtgtgtgcgcatgggaatcaaatggaaaggaaaggaaaggaaagaaggaagaaaaaatgagcaaaaaccggatcattgtaattgagagagagcctatgaaaaaaaacccaaaattacaagagttgatgagagtatattcatgagataaaggctaaagggggcctagggattaatgaaaggaaggggttgggttgtgaaggtatatccaagcttttagaaagtatatgtaagttgcagggttaaggtacaatacatgctatttgcctagtaaaaaagactgcctctttttatttccctcggttgcacaaacagacaaaccaaaagcttctcttctattccctcctctctctctctctctctcaagtctcaagactctcaacacacttgcatatgtcatcttccatcagggaatctcatctcaacagtccttccttttcccttccaatcctaattattaccaaccacttcttttctatgcttttctctctttttccccttctgctgcaaatccccatacaaacacccttttttccaccaccctcatgagtattacaccattcaatgataaaggagtacatgggtaggacatattttcatggccctcttcaaacattaactgtaactttggtgtttggctttacttatccacagtgaaaactcatattcactgatacgaattgttcaaaacctgagaagggataagaataatggaagcagcagattctgaatcatcgtaaagaaaagattaccgaaggaaaggataagagaaggtaaccaaagagagacccaccagaactactagtttcttacacagcattggcctaaaaattttcattaattcattaaggataccctctattttctggcaattttgtttctcatttcaattcataagagtttatgctacaggtaagcttcaagagggtttcacttttaaccatcttgttgctgatctttggacaccaatagccaattaagattgggggtggttgtagattttatgaattatatcttttaaagaactaattcttatctcaacattaaccaacataccattttagctttccatctaacttctttggcacccatatcaagaggttataaggtaaacttagaaattttgttatcatactcagggagtgatattcttaatacactagtgggtagttgagatcatcttggtgaacagtgttggatcagtatgttttatgccatgtaacttggatgaagaacaaaaacatgtctcataacttaaaaccagagacagaacatcaa

SEQ ID NO: 12951 - DNA, 391 bp, Vitis vinifera
  Intron number 4 from transcript GSVIVT01001075001 (locus G SVIVG01001075001) derived from phytozome v7.0 (chr-ID chr1 1; pos 7310556 to 7310946)
cctggactactcagcagttttctggaaagtaagtccaaatggattgcccatggtttcatattgctccttatggtaggccattatagcaaaatgttccaatcgtataaaagtatgtcttgcttggcttcttaactttgtgcatataaataatttatttgtaggtttctgatgaatttataatgaatataatgagttttgaagtatgacaccacattaaaagactattctgtgaattatattttaaaggaactgcttctgtccctctatgtacatatatccaatattttggagttaatgagtcttgtgttttagttttaaggatgtgaggtctaacttccattctaaatgtttcattctaattgaatccttgatttgaatattaggaagaaag

SEQ ID NO: 12952 - DNA, 1730 bp, Vitis vinifera
  Intron number 8 from transcript GSVIVT01010319001 (locus G SVIVG01010319001) derived from phytozome v7.0 (chr-ID chr1 ; pos 19445960 to 19447689 reverse strand)
gtggagaagcaaatccttctgtcttgaaaagtctggtaatgcagatagaaaaaccatatctttttttatccgcattatggcttttggcatatgcaatataaatcaaaagttgttgcaccctcagaagggttacttattttagtgttcttttaactttcttgtataaatactgtctattattgtttgcatgtatgatattaagtctctcttccatatcaatttatcatcattattgtacatgctgtttcataaacattttaaactgctttgtttatgaatctgaagatgatcagagcaaatgatacaaagaaggaaactagtgataattcttactattattgtctctctctatcattaatttttttttcttttttctttttttttgaattccacaaactgcagtttgttgtaatcttgaatatttattagctgttcttgtctcttgttctactgttggactgataatatagctcatgcttggatttgatgggggtcccaccatttttcttgcaatatcttcttctttttttttttttttcattttgtgcaacaaggcctttatatttatacctgttcttctcaagatcaaatgcctgttcagtcagatgtcttttaactgcatcatgaacagttttaaattttagaagaatttttttaaacaaaatagtatgaccatggctggagatatgaaatgaagctcatttatgtgaaaagataattctgaaaagtgatgcattaactatgtgggtagcagcattccaacactcatgggaaggcagttaatgtacaatatgggagaaattgattctgcatcaagaacttgtgaaactcttgattggaatttcttaagcttttaaaagaaaatgtaagtttagtgagaaattgataagtgtttacttctttttattttttaactatgttttggttacaaaacaaaaattgtttgtcaaagatcatcgatatgatgactgacaataatgaaacagaggagcaaagaattgcaattttctgggattactaaataatgcatttattttttaaactcagtatctatgtcccaaaacatatcagtttataatctctattagatcattaatcactttcttgttgtaacaatatttttcctaattttctatgtctgaaagtcttttgtgatctctagcttagaacatatgctatgttccagaaagataatcaacaaattgattatttttcaacaatcatcaagttgatcttttcataacttgagacaaaattctcatgttccagcattaacagttctatttttccactttttagagaatattttccaattagttggagtctgagaatttggaatagcttgagatttcttgttgtcatttgatggaaacttttggaaattaaatagtgctcagttcaaacttggttacagttgttggatcctgatgctatgttgtttggatttgactatagtagatgaatgctatctaaattcttcgtttctgtagctaaagttaggaggtaagattaaatgctttaagggtgctcattgcagtaatttatgttgagtgtttttacttgaaaggccttttttggcaaattatgaatgtgcagatataacatgggtatggttttctatttgctatgcttctttcaatggaagtacatggaaacctgttgaaattgatttttttccttatcatctaatcttagattcaactgcgccataaattggctcgattgctcag

SEQ ID NO: 12953 - DNA, 16175 bp, Vitis vinifera
  Intron number 6 from transcript GSVIVT01034489001 (locus G SVIVG01034489001) derived from phytozome v7.0 (chr-ID chr1 8; pos 20503165 to 20519339 reverse strand)
attagagaaattgatcaagacaatgtaagtttttcaggttataccatactttcatagttaaatttctattgccttgcaactgttctagtaggtaggtatccatgattaacttttgcatgtcaacctctttttcttatctaagcctccataagtatgatagatggtattacactaaaattcttcttttgggaggggatctctttcatttggtacttaattaatacaagagggcctttaaaccttgaaattaaggagagacattagaaaaagtggtaggatctttctgagttacacaaaaatagaaaagttaaaaaaaaaacaaaaaaaatcaactagaggagattgttcaaaaatcctctcaaattctctatttagtcaatttgtaaattttgatattttcctattagggtactttcatactattgagaagagatgcaaggatgaaactaagtaatcacacaacttcaaattttgataaatataaattagctataaatgaagcttccaaccctttcaaactaaaatccatagcccttgaataaatatggtcataaaaattgtcaaaactctagtaagaggaaccttatgtacactatgttaggaattttgcctaaaatgtaatatactcaacaattcctcaggaaagcataatgtatgactagttgaagtttgttgcaacaaatatgggctattaagggagattgaaacatcaccaaattcatgttggccattttgtttcaaaattaagatattctttgtttaagagtggaattgggaactttcttctattaatgcattaaagaaccattcttgagttagcattattaatctttaagccagttttaagtgtaaattggttttctgaaaccaaaagcgtaagtatgttggaagacttgctactacttggttctatataaaacacattaaaagtataatgtcatagttgtagtctaagatgtagggaatattatactaaaatccaaaacttgttagaagactaccaagttatccctccatgacagtagtcaatgcaaggaatctgaaaggactataaacttttctcattaactatttatactttgtgaacaaatacagactgaatttgtatttttgtctatataatttgaagagtacaatatgatatttatagcctatacaagatatattcaaaaggaaactatacaattgtcaacctaatctagaataggaattaaatcataattgcaaatcataatcccaaatttggctccccaaatttgattttttctaatttatatcctccatagaagatgaagaattaagatgaaatgactcatggttttttgtaatttttatttccttagcttattggtttgagtcatagtcctgttttgaagaattatgagttgtctcttttttactttgttacctagagtagacatgaagcttagctagttatcgtcctaaaataatactaagcattataggatcaaggcttcttgatggattagattagaccttctcaattcgaaaaggagcaatttggaaaggggggatagacaaagttccataaaacttatcttcacatacactctctcccctgaagaggagtagggaaagaaagtttgtttttttaaaaaaaagtaatgtcaaaagtgacacacatttttgttgaaatagggtcataccatttctaccatttttgttggagagtaccctaaaagcacacatttaattgcacaaggatctcatttacttatgagatggttgtgcacatgaacaaatgcagtgcaaccgaacacctttagaggtaatgaagtgaacaatttagtgtgtggataaaattgctaaaaaacatccaattgcgtttgaaattgtagaatctttgtaggcatatgatttatcaaatatgaggctataagaacaacttctccccacaaacattttggaaccttagtggtaaacataattgcccttagtggcaaacatgattgctcatgctacttccaataaatgtctatttttccttttagcaattccattttattgtgatgtgttaaaacatgttgatcggtgaataattccatttttcaaaaaatactctcccaaattttttgaaaaatactctttttcattatctgttctaagcaccctaatttttgcttgaaattggttttgaaccatagcaaacaagtctttaaaaattttttccacctaatatttttcctttagtaaatacaaccaacaaaacgagtgtgatattcaataaaggtgacaaaccattttgttctagaaatgttagtaacatgtgaaggaccccacacatcactatgaatacaaacaaaaggtgcaaattttttataaggttttataagaaaatgagacctacggtgcttagccaattcgcaaacctcacattgaaataaagatgaacctttttctttaaacaatgtaggaaagagttttttcaaataataaaaactaggatgccctaatctataatgccataaaattatttcattctcaatagtttgagaagagactttatttactacttgagtttatctttctataacgacattattagtaaagtagtacaacctgtcaacttctttagcattgtcaatattcatcccttaagccaagtccttgaaatcacaatgagtagaaaagaatttagctacatagttattgtctttggtgaacttactggcggaaaacaaattacaagaaaggttaggcatatgtaaaacaaaatttaatacaaacattttataaataggcataaatctctttcttaccattgaggacaaagacctatcaactattcttaccttttggctaccagaacatggagtactatatgatgaaaataattgtgcacaaccaatcatatgattttttgcttttgaatctatgatccaaggagctttacttcaaaagaaacacttaaggtactaaagaaattacctttttgagtaagagagtaggaaggattaagagttggattatttttttattagttaataaacctgtgtagaagctctagttgttcatttgtgaagggtcaagtctcagctcctccaaggtcgcttgattgtgagttttcaacttgaaaagcatggttgtttttcaagttagcaagcttcctatgaattttatagtatatttccttggtatgtctaggtttattacaataatcacactagactttagccttttcttctcattcccttagaatttttcttataaacaacaaggacaatttcaaatgctgctatcaataagattaagttttctgaattttagccaatttgttagttattcatcataacattcatcttgatttcttctcttctaacacatgcaaaaacctctcaacatatgagagaggttctcttataaggattatcccatttgctttactaatctccaagtttaatcctaccaaaaatccaaaaacacattatttttccaataacctcttgaactgggtggcatctctagcattctcccattcggattcataatactaatctaactctttccaaagacccttaagaatactatagtatttcgtgacaccctgatcttcttgcttagtttaacgaatttaggttttaatctcatatagtttagatgaattgcctaaatatgagaatgtctcattgactatatccccatttcttttgctattgataataacacataaatctgtccaatttctagatccattgagttagcaagccaagccatcaccattgagaattctaccttccatgtttgaaatgcaaccacatcttcttttctagtgcttgtgttgctccactgagataacctaattttcctttacctcaaataaacatttttattgattgagactgttgcaagtagttctatctatttagtttgtgagatgtaatatgaagagaaggattttcatgggtagcaacttgaaatgatcatggtggttgctcaatgtttgacttggatgtagcttagtcacttacaccgaacatgattttgaacaaaatatgaaaaaaaaaatatatatatacaaatgaatgggtttatagatcaaaagaactgctctagtaccatgtaaacaaatatggactgaatctatattttttctatataatttgaagagtacaatatgatatttataacctatacaagataaattcaaaagaaaactatataattgtcaacctaatctagaataagaatcaaatcataattgcaaatcacaatcccaaatttagctccttaaaataatgagattgattgaatcaaatctcctaaaataatgcaattctcaacatactcttcttagatatttggcttattcacacataatcacaaagtaaaagaaaagaaaaaaaaaaaaaccttttagtcaataccatttttttttttggtaatatataatcatattactaatagaagaagattttgtatattattttctttggatgaaaccactaaacttaaattttttttctattattatatatagctaattgagagtatattttcttcatagatttcttgaataaattaatccatagatttaatacaccctacatctaacatactctaatcctaaatcttaggatcatacataaaatgcaacacgtaagagccttgaacatattaatcattttatgatttagagaagtttctatgtaacaaactagtcaagcgttacattttatactagctatttagtgaatctatatggttagtgaaccttgtttaacacaccaagtgccaatgcattagttgtgaggcaaaccacctttatgaccaagttaggccacactacaaatgtaacaattatgcatcgtaatcgactgatggaatgttaatttccatttgtgattgtaaactacgttctagtttagaaggagcttaaaaccacataatcgtataaatgcccagtattatacacatagacacattaatacataactcatgcattaaaataagtataacttatctaaggtatgcaataaatttcctaacaaaaatttttattaataagataaaattctatatagagtgagattcaatgcatacaatcataaaaaagagcaaaaaagtcttatatttcaatagacttgttggaaaaatccatctaagatgtatattggttattaaagtagattttgtggtacacttgcattttgcctacttctcaattatgttatgatccctgtgtgttcctaagtgctctcacttgttctctattcatctcttatgcactattcattatcaaacttgatgaagctgccactaaggactttatgggaaacgaaggctccttattaaagaggaaaattctagttgatacccatagtctatttagtgcttataagccatgaccatgtcctactataaaccactattacaccataagatagaaataatatactaagacctaagataagtcatctctttgactatgagttagtgtactacaacttcaaaatggatagtctatttttttgagccaactatgaacaacttatcatcttgtatagaacctatgacttagatcttttgtgcaaatcctaatgtacccaactcctatacaatgcaagtgatacaggaatgaacactcaaataagtaataacaataatggatggaaaagtggaaataaaagtcacaatatataaacatattaatgaaaatttattttatcacatcatattatgctttaaagggctctatcctatactagttgttacactaggaactcaatccaagccttaggtcttaaaggggtgtatacatttaaaattgtaggtgcaatagaaaataatagttattaaaatttctagagtattagaatctcctacctttggatttgtttattcttatatccattttctagttgtagtaagaactcttgaatgtagaacatattcttgaagaccttatgatcttccactcaatggctttcttttggattttggtaatagagaagtatgggattttctcaaaagggagtgatgtctaggtttttgtccaatagtagaagacaatccattaatataaccttaaaaaaggtttatatagacttgtaactaaggcccaccccatgggcttgggttaattagcccaaggagatccaattaataaaatagcctaaaatgaaaacccacaatccatttaataataagtcctcatgcaaccttgtgcttacacaaaaacactattatgcacacttttaattaagtactaaaatatttcttcaaaataaatgccactaaagagtttgagcttgagtaaggaccattaagactcataaaaaaatattagctctcttagaatctaggtttaaagttaacatctcactatagatagttaattgcactatagtattctatgatactaaatcaagatagaaaactcgggtctttgacctattatccattccctatgaactaatgtttgtaatctaataaggtaatattaatcaacctttcaagattacctcttaatctttaagtcttggatcctcttatatcatgatcattggcatattctagtccacaaaagacatatgtcaaattctattgaaggaaaaactatgttcataaactacataatcattccttaggatcaatccatgagatatcatagtgtatttattgagaatatttgttgtcacctacctaaaccactagtcacccaatccatagaaaatatatgatcatcttaggatatcactcgtaggtcaaagtaactaataacctcaatactaatatcgtattctctcaagattgagaacccatgtaacattgtatcttggagaattcatgacaacctaatagtcactagtaatgacattctataggtcttgttcaatgtgtaaccatatacattaatacactcatcatctaaaactcatcctaatgactaaaataaatcatttccccaactatgaggtagttaactacaacttttgatggttcctaagtccataaactagtcatgaactaactcattaatttgtaaggaacctaagaaaataaatgctaatcttaatagagaaaacacccaagaagggaagggggtgatgaattggagtttaaaattctttttcaaacacaataaacttaagcacaagaagtaaaaatataaagagataagattagagaaagcaaactcatattttatagtggttcaacactttcttacctatatccattctcctcaagctcctaaccaagtgagggttccactatacttaaagcttcaaccaagcttctaaccacttttacacttagatttcggctccaattggctcttacacaatcttttcaagtctctactcacttgaaggttttaacactcaaatagtaagtttgaatctctcaacctagctcaacaatgactcaaatacaactcaaggttaggatgaatcacaaaggttcactaaagaatatgcaaatggagatttaatgcaccaagaaaagaataagagcttttaaggcaagaacaagtaggtaaacaaataaatacaagtgttttcttcttcataaataaaatgaagctctcaatttttaggtttttaacttcgaagagccaaaatgccaaaaagtatcattgatcgatcaagctgggggtcaaccgcttcactagccattggagcatttaatgcttggtaggtgactgttaccctcgaccggacattgaccggacctcgatagagaatgaaaggttactagaagagagagaatgttttttggatctttcaaccgaacctcgatcgaaaaggagtaaccagtcgaccgatatactagccggttggccaatgcctcgactggttcaccattttttgctagaaaacctatcttttttttgtctttttgcttctaatacttaggcaaggtctttaggtaaattaatgtgccaattttgaaacgtttgttataggttcatttgataaaactcagatttagatggaaattttactttaatgcataaactgagtttttaaagatgcatgaaaatatatgaaaatcctaagtgcacacatgcattcatcttacataggtttttatgattaaaagtcttctaattgtcttgatcgtgcatctattgggtcctttgataaatttccaaattaacacctgaaattctttataattcaaaccaattagtaacttaaccatggtttattatcatcaaaacatgattaggaaaacctttaggttaacaatctccccattttttatgatgacaaaccttggttatctaggagaaaaaaaatctctccctcaaaccaatcatagatctacaatcaatatttaagaattttaaaactaagacgatcaagacatattagagagaatttgcaacaagaaaacaatgtaagtcatcaaatatataggcatatcatatatcataagtcaaatgtatcaatcagtacatcatatgtccaatatgtacgatctaaaaaaatgatatgtatgtatgagtcttctatctctagcctcctagatcttaaaatatctctccttttggcaacataaaaaaataacaatgggatctccaacgaatcaaggttgaggaagtggaggtagaaacacagaacacaaatagactatcatctcctcatgttgacattccaagtgatcctcaatatgatcaatcctctactggagatactcaaatagcgaagtgaagccaacctgatactgattgatacgatcctccatgaagtaaaaagatgtatcactaaccacagcaagctcctccatgcgagtgccaaaagagctgatctgagtagataagtccatccatagagcatggtcaagagcgaaaggtgcctacagaggtggtatctcagtatgggtagacttgatgaatgcaagtccgaataaggaaaactcaatgtatgacgattgagtggatggaccctctacaaaagtgagctcagagaaggtagtctcaaactaaacacccccggtctgtgggggagtctttgtttggagtgagaaaaagtcaagctcaagccctctttgttgatggccactctgagggtctacttcaccctccatctctcgaatctctacctcctcctcaactccaaaatacgactgtccctgtcttcgggccaatgttggtgctctctctgcttttcttacctaagaaccatctagggccttctcaaatttcatcatccccatgaattgatcatcatatgtattatatgtactggaggccttaaaattcgtctttctactcaagtcaacatcggcattattgaatactttggtaaggaaactaccataggggagtacgcaagttgtattctcgcaacatgcaatcatgtgcatcatcatcaaatatcctaaatggattcgtctcctagtcaaaatggaatctataaggaatgtctcgtaataggagaccttatcttgatgtccaccctatgagagaaaaataaaacacaacatatgatgtagtactctactgatgatcgtcaagttgtgtgctcagggttttcccatcccgtgggcatctaaaagtctacaaatactctaaatagcctctctagactcaaaacccggcacaatgggtcatatcttagacctgtatactctaagtccaaccagagcaatatcaaagatacgacagatgctatccgggtccagacgaatctcaactcctctaacagtaaatgctatcgggccaaccatgttgtaaatcgccctcaagaagaatgcttgtaccaatgtcggaaaaatcagcttagaaatagtaatagctgacaaacagcccatcctcgtgaacaatccctcaaatccaaagtcctgaagttggagaaaattgatgtttctctcgagaattactcatctctaagaaaaatgttgtttgtaccgttggtaatcctccaaggtactaaacaaggcggtgtcaaaccactcattccagcatgcctcgggctgaaacaactcagttgggtgcttgccctttgccctagctgcaattgactctcttctaggagccatggaagtccaagaaaagtaggaaaaatgcaatgaggctcacacctgaaaccttaacaatctgaaatggatatggattgatgtcaaagctagttgtgatgcactgaaggaagagaagatgacccaaaatgaaaaccctagccttcaaagccctcaaatctctcccaaaatcaagtcaatcggtatgaaacgcactgaaatcggtctctagaagccaaaaccagtgaaaacccttgaaaaacgaaggagaacaatgtagaaaaaaatgtacatgagcctcttaatattcatagccctgatgaatcggtcaatcaactgaggatcggttgactacctagtcaacacagttaacaatttttttaccgtccaattgttgcacactttttaattttttaagcctctttgcctttttcaattgaattcctcaattttttatgctcaatgccaagggaattagatttttggttaaaaattgaccattttctaagtaaatgtttatatgatgcatatgacatgaagtttttgcaatcaaaaggtatatttatcaagaattcattaagcaaacatcatatcataatgaaatcacccctcgttgtcttctaatatcaagaaatttttcttcacttagaggtttactacttacaaatcacgtgttatgtcacatttttgtgcatgatctctaaaaacgtgatgtataatctctatatgcttagtcctagagtgttgcatgagattttttgatatacttatgatactagtattatcacatttaataggcacatgctcaaaagataaatcaaaatcactaagtgtttgtttcatctaaaggatttgtgcatatcataaaccggttgctatgtattcgacttctgttgttgacaaagctaccgaattttgcttcttactatgccatgaaacagatgagcgtcctaagaaatgacaagtgccactagtgttttttttttcaaccttacaaccagcaaaattgacatctgaaaaaccaattaattcaaagttatcactcttaagataccataagcttatgttaattgtccttttcaaatatttgaggattctttttatggcacttaagtgagattctttaggacaaaattgaaatctagcacacaagcatacactatacataatgtcgggtctactagcggtcaagtgtagcaaaaaacctatcatgtctctatacatagtggagtcaatggatttacctttctcatttttatcaagcttaatggatgagctcattggagtcctaattgttttgacttcctccatgttaaaccttttgagaagatctcttatatactttgcttgattgatgaaggttccttcctttagtttcttgatttgaagcccaagaaagaagttgagctctcccatcatgctcatttcaaactcattatgcatgcacttagaaaattcttaagagatacattaatagcaccaaaaatgatatcatcaacatatatttgaactaagagaatatcattttctttggtttttatgaaaagtgttgtgtcaatttttcctattttaaaaccattttccaaaagaaatttgttcaatctttcataccatgatctaagttcttgtttcaaatcataaagtgtctttttaagtttaaaagcattgttaggaaagttgaaactttgaaagtcgggtggttgttcaacatacacttcttcatttataaaaccatttaaaaatgcacttttcatatccatttgatataaaataaagtctttaaaacatgcaaaggcaattagcatcctaatggcttccaacctagctacggagacaaaggtttcttcataatctattccttcttcttgattaaaaccttgggctactaaccttgatttgtttctaacaactataccattttcatccattttatttctaaagactcatctagtcccaataccactttgatttgaaggtcttggtattaattatcatacttcacttttttcaaattgatttaactttttttgcatatcaatcatccaattttcatcatctaaagcgtcatttatatttttaaactcaatttgaaagataaaagctagattattgcaaatgtttctaagaaatgatctagttcttaccccactagatggattacctatattttgatcttgtgggtgattgatgaaaaacttccattctttaggaaagtcttggcttgattcaccttgcacttgttgaggaaggaatagtgaaaatggtgatcattcttccttgggatcctctccattttcttcttgttgtcttttatcttcaatttgcaatcttcccatgtaggtctccaatcctaaatcatcatcaacattctctcattcttggaaagaattgttagatcataaaaaataatatggatggattcctctacaaccatggtttttttgttgaaaattctaaaagttttacttgaagttgaataaccaaggaaaattctaacattcgattttgcatcaaattttccaagattgtctttggtgtttaatataaaacatttgcatctaaagactttgaaataactaatgttaggtttcttgtttttctaaagctcatagggagttttcttaagtatgagtcttaataaaactctatttaaaacataacaagaaatattaaccacttcgacccaaaaatattttggaaggttgttttcatttagcatggtttttgccatctcttaagggttctatttttcctttcgactaccctattttgttaaggagttctaggagccaaaaaattgtgatcaattccatattcattgcaataatcttcaaaatcaacattttcaaattctcttccatgatcacttcttatacaagtaattgcaaaacttttttgttttttaactttattgcaaaactttgaaaactcataaaaggtttcactcttttgacttaaaaataagatccatgtgtatctagagaagtcgttcacaataacatatgcataagactttcctccgagacttggtgtcctaaagagaccaaattaatccatatgcaataactcaagtggcctagatgtggaaatgaagtttttgtttgtaaaagagttttttatttgttttctcacttgacaagtttcacaaactttatctttttgaaaatttattttggaaaggcctctaacaagttcatctttgttgagttggaaaatgaggtccatgttagcatgtcccaacctcttatgtcataaccaactttgatcatgcatgcttgaaaagcatctatcatggtcatcatattttgaaatatttatagtgtaaacattataacatatatggcctatgaagatggttttatcattttgaatatcaatgataatgcaatgagatgcttcaaaaatcactttaaaacctttgtcacaaagttgactaatgcttaaaagggtatgttttaaaccatctactaataaaacactttcaatgagagaagatatgtcattaccaatgttgtcttgaccaatgatcttttcttttgcgttgtctccaaaagtaacatatcttccatttttctttgtaagaaaagcaaacttggattcatctccaatcatgtgtcttgagcatccactatccaagaaccatttatccttctttgaaccctacaacacataactcaagtttatttaggtacccatatctttttgggtccttaagggttagtgaccttggaattttcaactcaaatctttttaacttttgcatttgaattctttagagaaccatttcttaaaaggcatgtactactaatgtgtcattttccacaaaaattgcaagtagtggaaggacttgcacttgtggattcctttacaaaatagtttttaaaatacttttaattctttgaagatttgaaccatagcccttgtttgtcaaaaacatatttttggctagctagaatcatttcaaaagatttttgtccacaagaaaagattgaaagagatgaggtcaaccattcatttttctttcttaaaatctcattctctttttcaatatgagttttaaaaacttcaacatttaaaaatttttattttacttttccaagttctttttcaagttgttgaactttcttttttaaagaagaatttttcaaaccaagtttttcaagattttcatacaattcttgaaaagcatcatgtatatcttcatcgctaatgttagagtttgcctcatcaagttcatctattgccatgaagcacatgtttgccacttctttctcattttcttcttcggaggattcatattcactttcactccaagtggtcatcattgttttcttctttctcctcttggtttcactcttgtaaagagaacaatcatatttaatgtgtcccgatttcttacacttgaagcataacaagtccattttctcttcccatctctccttgtcatcatgagatgaaaattcctttttagagaagtctcttctaaaagtgaacattctttccttaaacctttcaccctttatgaatttgttgaactttcttgtgatgagagctaagacttcatctttttcactttgtttttcttcttcaacttcttcttcttccttagttgtagctttgagagttatgctcttcttccttttgtcttcctcttcttgtttcttctttgccaaattgatctcatatgtcatcaatgatcctatgagctcctccaaaggtagcttagttaagtctttagcttcttgaattgcggtgacctttgtatgccactttgatggaagcgacctcaagatcttcatcaccttcttcgattcattgtaagtctttcccaaagcttcaagaccattgacaatgtcagtaaacctagtgatcatctcaacaacagtttcattatctttcataaaaaacaatttataactatgaacaagtaaattggtttttgactctttaacttgatttgttctttttatgagttatttcaagtaatctccaaatttctttagccaatttgcattgacaaattatattatattcatttctatccatagaatattgaaaagcataaacaaccttaacatttaattggaattttcttctatcacactcatctcattcttgcttaggttttggaaccatgactccatcaactagtttcgaaggaaaagttgggctatcttcaatgacatctcatacgtctaaattggttgattgtaaaaatcaagtcatattttaagttctcaatttaaatttgttttttaatttcttttattcttgattttcttataagtctactatatgtcttttatatcattattttcactataaaatcactttatagcagggaaggagggtgaataggtagtccttattatatattgaattttgataacattaaatttaattcaagattgatattttgtaggtccaaagttagattttaggatcaaagatcaattcaaaaggacatgcaaaatgaaatgaaaaggattaaacataacacttggtctatgtggaaaaacttcttccagaaactctcaaataactagagttgttaactaataaagttaaattctaaaacaattcaaattttgagataattgaaaactaatggattaagcatgacattgattgatggagtcatgcatttttaaagacaactttgaaactacgctaaggcatattcaattggtcataggagctagtccatcggtcttaattaacttagctaccattccaaacaacatcaagggagtgattaatcatccttatggaaccaattgatcatctttctaaaaatgtataatttaagttgcatttacataattttttgtgattcctcatgttaaatttagtcatgatcttgtgcatgctatacctacttgatatgtcagtgattcttgatgagatgtatatatctacaaccaaagctagacactcaaattcaagttagtctagaaaagtatgtgttgcacatggaattctacttgtgcctaaaattgctaatctaaccatgcactattattgtatacatacacatgcatataaatctattttataacttataaaccgaagtatattttttctttaatgaaaattattaatcatgttttacaacttataaaatgaaatatctttttgtttagtaaaaatctttaatcctaatattacttatcttgactatattttatagg

SEQ ID NO: 12954 - DNA, 3189 bp, Vitis vinifera
  Intron number 8 from transcript GSVIVT01024467001 (locus G SVIVG01024467001) derived from phytozome v7.0 (chr-ID chr1 6; pos 2995516 to 2998704 reverse strand)
atttcagtcagagctttctgcaacatctgttccatgtaagtatctacaagtttatttgtgcatcactatgttggtgaaaatgctgatggtagtttaacttttgtcaaaatgtaagtcaatccctttggttgtactggatttttgttaatgatatgccaaagaacagaggtggatgggtggttcatgggtgcatggaatcttgacggtagtaagaaaaaaaaataatccatgttgattaatttttatatttaaaatcattggatgataaccttgttaacaatgaattaatgaaagatttataaacatagttttgaaggggtaaaataaaatttgatcacaaatatgatttttatttcagagtgatgcaaattatactactttttcaagtaccttttttttggataggcaaatgagaaaatatattaaaagcacctaaagttgtgtctaatgtatgcatgcattcattcattagaagaagaacttttagtcctgtacagaatcccatgggctttggatcttgtgagtatttgctgattcagacattaatgggtcacgcatataacactcacaaacacacacataatagaaaaatatagagaaacaaaaaataaaatttaaaatttaaaattaaaaagctaaaaaaactaaaaagaatggaaaaactctatggaggctttaattgactctaaatgaggttctttgagcaagcttcattggactttaaataaacaatttttttaaaaaaatttcctaggctgataaatcttcaaacaaattaaaaaagaaaacctcaatggagactaaaaattgagtttaatcatttgtcataaccaaattgagtttttttcttccaacatctttggttccttggaatagttatttcttttacatgaggaataatcattcgtgcaccaaatgtaccttaaagagttagaaacccctaatctaatcactcagcattttcttttttgtttctcaagaacaaaccattcattacatgaatttttatgtataagagcaagatgagaaatccttccaaaaacacaaaagatgatcaagaatagaagggagtgattttttagcaccaaatccttgtgtattttttggtcagtctggaaggaaagaaattttttagcttttgcgaatggggagctttcgcttcaaagattgaaatattcttttgtatgcaatctttagtcttgggtcaaggtttctttagttttgagcccttcttctcttgtaagttttttagactggttaggctctaagggaaggtggtgtgttgctttcctttccccttaggggtgtgtctttgggcttgtttgtatactccccgtatacttggagggcactattttttggtgcttcctcttttcgtttaatatacttcctttttatctatcaaaaaaaaaaaaagaatagaagagagtgatacctgacaaaagcaataagataactatataagtcaatgatgaaccaagaacatatacgaaatattggaacagattacaactcaaggggtaaagaatcccctacaaaagaaaccatgtgcttggctccacgttttgctaatttaaatgaaacatcattagctaaatggctagttgatagtgcattatgcactaatagaagcctggtcagtcctctcacgagagactggtcaacctgaactcaatactgaagtctgaagcagcctcatccactggagactgaaccttcctactcaaaaaagggacaggtatgccaaccagttgacttgcagaaccactgtccaccagcagcacaaaatatgcagggcaaaaatgaaaagctcctcataagaacccctaacagctataccaccttatataaaaggtgaggcacaccagagaacagctttggcctacaaccagggctttaattgcttgagtaaaccactcaaggcttcccctttggatcttcaagatttcacaaatttcaacggttcttgagcacataacctcctagtttgaccgaggtgttcactttaggtgccacacaacactctcaaccttacagaagattatacaacactctggagattgctaacatgaacacaagggaccttgctgtaaaacactaggttgtagcttatgtatcgttgttagatgggaccttattcttaattttatgtatcatttttagatgttctaacaaattgaagctaaaatgtgctgctagtttcctttacatgatgaaccatctgaaccaattaaaatttaaaaaagagaagaatcagcaacaaagaggagaaaatcataaaagagaaagaaaagaaaataatggctattgcaagtgtgcttccctatcctacttcctagtatgcaaatgatctttgacacccactcttaatgattcgtctgtttgagtgtgctgttatctttcctaagctagggggtgatgatgtgaataactgagggtgcttctaggtgatataaatcatttgggatggagctgttgcaaaaaatgggtatcatatacttgatgagatttaggatatctagtgttaagcaacttcaattttttgcttcacttgcaatgatgtctcctgttatctttaatagcctactcttttatggatttaaaacccacataagatgagtaaaaacacaatccatcatttgttcatggttccagatgcagcaggtatcctttagaaaaataaataaagatgcccttcacctgctttccagttttcaagaagtaattcttttgtagcttgctgctgttggagtcgttacctgctgtgatcctggtgcctagggagagcttggagcagctctcttaaaccatttgcctatggttattttcccttcctacctggttgtgccaccaagtatttggacttcagaaagagaaacttctttcaaagttggaattttaacctgctttactgtcttggaatttgtgtctggaaactactcctgtccatccattttaagtgtgatccatatgaagatgtcaacccccaggctcaaagctcaaaaaatttttggggtctggagacaaagaactacaaatcataaaggaatttggcatttgaaaacacatttaaatgaaatatttctttcatgcagtttggtatattcctgaaattgtaataatggaattattatttgcttatttactttttcagatccagagaaggctgtgtgtgctgttaccggattg

SEQ ID NO: 12955 - DNA, 11224 bp, Vitis vinifera
  Intron number 1 from transcript GSVIVT01036559001 (locus G SVIVG01036559001) derived from phytozome v7.0 (chr-ID chr1 4; pos 23458646 to 23469869 reverse strand)
attggctaagcaatttttatttagttaattttttttttaaatgtcacaattatttttatctttaaaacatttattaaaatatagacaccgactacaaaattcaatcctaccataataacaattatagcaaatttccatttttctactattaaatacataaatcaagtgctactccaaataggccaataatcaatcactaacttagtccgagtcttatgctctccatgctttaaaatttcctgaccttacagttgagaaagagataaatttttttaaataaaataaaataaaatgaaaataatgtaaaataattaataataataatgatgatgactatacattctaattgtgaagaatgttttaaaattaattattttaaattaaaaagcttatttttaaatttaaaaaaatgtaagcattcgagtaataatattgaacatatttattattttattttctagaaataaaaataatgaatttagatcattttatgataaatttttaattttttgttttgaaaaatagatacataccttgtgtattcctcaaatttttaaaaatttgagattttttttaagaacataagatcaattttttgctttttgtgtaagagttcttatatttttgttaaaaaaaaattatattttatataagggtttttatttaaaaataaataaaaaatataaagtaaatgtcacattaataacacatttcataatttatttatgaagatatttttttaaaccaattatttttgttttttgtttgtttgttttttttttttttttaaaggtaacaaatcaattcaggtgaaaaaattaaaaaaaaaaatcataatccccaagcacctaataacaacttgaaatttattagcttaacgatataaggtctttacaaatcatcccattatctcatacgttttagctcaataaaaactccattaattgccattaaataaaaattaaactaaatgaaatcaataaaaattaaaggtaaaaaaaaattaaaattaaaattctcattattaaaatgtggcccttttatatacttctctttcttttcccatatttatattttcacttttttcccttttttcatgaaattgataaaaaaaaatacaaattaaattaaattaaaagaactcaaacacaacattttaagggatcttgtgaaatcttatgaatggtttgagtgctaggagaagaatgagaactgagtgctaaaattttaaaattgaaagtcaaatgacctcatgctatgactagattcgaaaagggttacaatttaaatttcaacatagaaacaactaaatggctcatctgagtgggactcaatgatatgattgtgtcttattgtggctaccaaagaaaagaaaattgaaaactaatgctctatttggtaactattttttgaaatagttttgaacaccaatttttgttttctttgtatttttttttttttatgttttataaaataaaagtttgtttaaggacctgaaatatttttaacttatttttaagtattttttaaaaataatttttatatctagtgctttttttaatcattctcaatatttgtataatttttttaaataactttaaaaaaaaaacaaatgaaaacaactaaaatatattatctgaaaataccatattttctattttcaaaaataggaaacataaaatagttttctggtttccaaagtgttttcttggttttttttttataaaaaataaaaaactatttttgaaaacaatagccaaacaaaggctaagtcttaggaagtattttcaaaaatagtttttgtggatagttttttaaaacaattatataatgttttgtaaaataaaagtttgtttaagaacttaaaatgttattaacttattttacatgttttaaaaataatatttatatgtagcgttttaattttaatcattctttatatctgtataattattttctaaaacaaatttcaaaaaataatttaaaacaattagaaaatattcttaataaacatcatatttttgtttttaataatagaaaaatattttttattttttttattatcaaatgtgttttcctattttttattctagagaacaaaaacattgttcttaaaagaatagttatcaaatagggcctaagacttaatttaggaagtattttcaaaaatagttttaaacaatagtttttaaaaactattatgatgtcttataaaacaaaagtttgtgagaacgtaaaatatttttacatattttttatatttttaaatatgttttaaaaataatttttatatgtatacatgttttttaaccattctttatatttgcataattatattttaaaataatcattagaaaacaagtgaaaacaattaaaaatattctccaaaaacattatatttcttgtttttaagaacaaaaaaaatattttctattttttgttgtcaaatttttttcaaaatagttatcgaacatgtcctagaatttctaatttagacttttttttagtgctcgttctttttttctatcttttccactttttcccatattggctatttatagaagcgagaaatacattgcaacatctagcaattaggacatttagaatgtcacatcacttcgcaaccttggatagttgcaatgatgaaataactaaccttggatagttgcaatgatgtcaggtgtcatgcatgctatgactattggaaccttggtggctagtgtgtttcacttcctaaggagttaacataacagtagtaaagcttgcttgagaaagaaaatgagaatatgagagttgagagtaagaaaaaaaaattgagcaaagcttgggtaaaggggctcaaatcttctacttgaagattagataaagagaaagagatagagataaagagagagagaaaggtgtttgaggaggaaaaaatggaagaaaacatgaaaaagtacaagaaaatggaaaaaggggttgggttttgcaaggctaggagcctagtaaacttagtggtccttaggttgagtacccagtgaagcttagttgaaccccaatggaaaaatctagtgaactagcttttgtgttttcctaatagtttgcaaaatgagtagaaaggtatcttccatctagggttactaaccctttcaacatgctctttttaagtcacttttggccctatttccttgggaaactcacataaatctattaagacacttgataaacataataaatttattactcttatgtatgacatgttatgagtttgtatgatttaacattaagagttaatttccttcatctctaatgagatttggattaaatatatctaacacctaatagtttgaaatttcatcaaatacctcatttatcctttttttttttgttattttcatttatctcccctcttacttaaaataatgaatgtattttgataaaatttcaaaccaataaaggtgaagtatatttagtaaaccctaaggggaggtgagtgaaattaaccctttaacattattaataatatttgttaagattttaactagattaatctaagttaaagggggtgaataggatgataatccctttttacaaatttaaattatgtgaatgtaagagataattatatgcaaatatataataaatatgatgaaaataattgcatataaaataaaaaaagaatagggaagagaaaatgcaaacactcattttgtagtggtttggtataactcgtcctacatttattggagtcaaaatatatatgtgctctaatggcatatattcaatatcattcgtacaccaaatgacattcaaatcacccaacttaacctatattgatgttaaagccttaaccataagtttaacttgtattttgaagatttatctcaaattcaaaggaagaaaatgttgtaagtacttaaatcactttagattttgaaagatcaagaaatggttgaatgagaaaataagcgagtaaagactcataaactatgaggaaaagcaagacaaggatatcatgggtttgagagatgagaaatgactattatggagtaagaaagaaggcaagaaaacatagaaaatgagacatgaaaaaatattcaattgcattgaaatttagaactcaaaatctggtggcaacatatactttgaattttgaggataaatttggagtactttttaaagtccattttaggtatactatatatcgttttgaacctcaagaattcagaagtccaactctttaaatagtgtacaaattggagttgaaatgaagaagttatgaccatttgaaaacaactacgtaaatctgaagggccatttcaaaacgatttcgaattcaacttgtgaattcaaaatccaacttatgaatttgaaatccaatttaaaatgaccccaatttcgaattcactcactgccactttgatgtttcgcctcctctacctcaggaattgcttctagggcactctattcaccctaagtggccccatatgactagaaatcatcattttattattttttagtcatttttaggtaattattttgtaataagtggccaatgagagcgtgctacatcttaggtaattgatgatattatataaactcctttaattctaaggtttaggaatctttgatcatctttcgaaagtttgacaattttatggggaagaagatgagaactttggtttgttttgttttcttctttattgaataaattgttttatatatttaaattatggatttttaccctattatggattgtgaatatgatatcacccccatgagaggctaaaaagtcaacttagggcttgaagtatgaaaacctaagggttaggaaacctatagggacaatgggtaaatcattataacaatgagattaattatttgttgaattacaatttatcaattttttatcctatctttgtaagttagtttatggaatgatacgataagttattactttatgctagtgattcttgttaactcttaatcattagttatctcaatcttctctatcgttattttcctcaaaacaaagttataaggaatagaacgggttaaaaagccaaaccttaaactagtaatcaatctcattcatttgatgattttaggaatctattttaaaaaggaaaaattaggtttcggatgcagttttgagttatagaattcaagttgatcacaaacgaccaaaaaccctaaaattgtaagatcattttactaaagaaacctttgttttctctatttctacaccttaagttaaattgtggaaagccccaaacttgaatcaattgaattaaaaatcaatattcattttgttattaatttagtttcttttacttagtttcacttcataaaagttacttcacatattgtttttcactttaggattcaaacaaaagcaatttatttatcctagtattgacaatttctataagtcagtccctgagaacgatacccgaagtactacaaatgttgttgtaactttttctctagtttttcttgaccaaaattgctacgttaaaggcttagtattttggataatagagaagattggtcatacatccactctcatcaagctcttaaccaagtgagggtttcactattctgagactgtcaagccaaacctccaagttttacaattggattatagttccaatcaacccttttggacttttggcactaagcactctttacaatcctcaagagataacttactcttaaataatccctcaagtgataccccatacttgagaatcccttagtaatacctcacacttagatttttatttctcaaaggtttacaagaaatgatataagatattctcacaaaatcctagtacaaaatttaggctcaaatgatcaaagataaactatgattgaatggtgcattaatgatatgcaagttttgaaataaggtgcactaaaaaacactccctcaaagctcaaatatatttaaaaaaaaaaacattttatgatgttaagcttatataaaaaaaaaatgaattttgaagcctttttataggagttagaaacttaaactaaccattaggcatggtttgggttcatccaatcaagcactaattcaactaattcattagttgttagcaattaatgcttttggcaagtgactgttagggtttaggatttcaaccgattaaggtttaccagttgaatacatgctactagaagagaaagttgcaattccttacccttaattgaatgcattgtgaagtgctcaaataatttgattttgaggtctgaaacatccaaaaattagtcaatcatttttaaaaccttttagagaagttcaggaataatcttacttaaggttttaattaaaaataaaataaaaaaataaattagtatttgtatgattttttgtacttaagtaaattaaagatcaaatgcatgatcctagtgcatcaacaatcttacaaaaaaaatcctaggcaaagtcttgaaagctcttttctatgagatcttcttctacttcttgattttcctttaccttgatttgtttttataattgtcagtttgaaaaatttcttgtctaaacacattcaagataaaacattagatcaaaccttatttgtactaagattaatcaagacttaatgttacaataattaattttgtgctaataaaaaacgaatatagatactaactgcataagaccatagggagcaaattcatctgatcaggtaaaattcatgtgcatcattctttcctcatatttagtgcattattcaatggtagagaaatcatctaagtttttttaaacctaggagttccatgttttttttttttttttaagttgcattatatgtttgtttgtgagattcaaaattatttttttttacatgggattcatcaactttgactcataattgatataatagataaagaaatttataaaattgagattaatttcttggattatctattcattccccttcttggtactttcatatttcatattacaaatagtaaaatgtaatcatagaagtgttttctttttaaaattgccccaatattattttaaatgttgaattgtgcagtttgaataagttttattccgtttcgcttaggatgtcaagggtcgagaaacattttttatgcgatgattgatgagtttgcttctattatataattaactcttttatgtttagggttttgtctttcgagagtgtggccgcaattaagagcttttttttggaaagttgcaccattgtaactcttttcattcttttcttattagtggattgttgagtatttgtgtactttgtggatgtaggaatcacattgatcgtcgaaccacattaaaaatcttatatttttatttatttctattcatgtatgtacgtgatttggttaacattaaattgtaaagttcttcttctgattattcattttatacttcacattttctaaggtttagaaacgttatatacaatcacattcattgtttgcatctaattcattttatattgaagactcttgaattatctattaaggattttggaatgatattcatcattatcaaatcaagcatttaagtttaattcttctccgatatctaatacttgggtttgttgccttactctacattcatacttgaaatatttaagtttgtcatacttacagaaaactagagttttaaactttgatttttcccttgtattttttaggattctccattttctcactactcatttcttataataatttttttagtatttttttacttttgattttctttttctttttcttttgacacaaagggaggagttaaaatttcatattaaaattgagcacaaaatgatcctaactcttttctacttgatctaagtttattttgaattctcatatatatctttaataaagaacataaagataaagcttcttgattaatataattaatgatatcaccatatgttagggattcatatggcagtgctctatcaaatctctccttgattcttaatttgactccttcatcgaagactctaggaagactgtaagaagagtaaaaaaaaatttgtctttatatagtttcccacttctttaggctcttggggttgtgaagagataagtgggagtcttgcatgcccataggtccaagcccattccaatgggatttaggtggcccaatttagggaaccttaatgagcaccattcacatgtagggggccctcctgcgtatgcacacgattccaaccacttttaacaattgaattttaaattttgttttcttgattttccttgacttggtcattgtcattggactctgcttacagatagatccctcccctcatagtctctcattcattaactctaatccttgacaagatcactctctctgatgctttctttctctctactctctagcaatttttctctccattcattgctaccatcctacacactgtcttcactattaccatcctacataccaccttcactattactcccttccattccagtaatggcaatagtccattccgtctagtgcagtactatacccaactatttgtagccatacacctactacaaccaaacaccttgcatacaagttctactactacaaccatcttcatttctcaagttctactactacagccatacaccttgcatctgagcctattatagtcacattgctcctcccaagtatgttgcaatcttcccttcttatggaggaacttcaaaatctcataaattttctagctatatagtaacttgctaatgaagtacacttaaggtgaggttcttggttgttggatcctagaggtaggatgtcaattcccttttgcaccaaggttaatcttcgagaaggacaaatctacttaacgatggtgttctatcacatcttagtcgcataatccgaaaataccctattccaatttcaattaattttgttgtcttgttttgagctttgtttggttgaagtttacttcttagtttatcagttcaaaataattcatacttctataatctttcttttcaataaagatgattataatctgttatagaaaaaatcttactgataaataaatctttataccatatgaatctttcattttcttgcatcgtaagtctataaggatttctgacattctttccaaaatacatgagttttcttgcatcatcttgtatttgggattgaattggagataatctaggtgattcattttccaatactaatatttgtcttgataaaaaggtcttgaggtattaggttgaaaatttacccgttgtagttcttgatctctagttctagttggagtatagctaaaagaaggtataaaagagcaaggatcttgatttatttccttaattcctagatattgaataacataatccacagggtacagtcccttcccagtcttcaatataataagttgattgagtattcttaatccctttaagagtggttaaattcttgaaatctcattaagatgaattcattacctgacctaatggtaataatttaggaatcattgttgttgtatgcacatcattttcttgaaatattaaagtctctccttctaagggtagagaccaagcatatggaatataggaagttgtcatggctttataatacattttgtaaattattaaaaaatattttgttttttaattccatattatatcatttggtttaaatatttaaaataaaagttttagaaatgaaatcatcatctatacaacttactccataatgatagcaatcgaaatagaagttcataagctattttgattccagatgtcctaatattcaatctccaaaattattatgttttacattattttaacaaacatatatggaattgtcaaagtcaagccttgtcaaagtctagttaaaacctttgttcaactaaatttggggattgtttattttttgaacttcagtattaaagcaagttgttttaagatttaagataatatatatatatatatatatatatatatatatatatatatatatatatatagtttttttaagtaaaattaacttaaaaaaaagtgataagtttaaaaaataaacaattttaaaaatgattcaaatcttaacacaagtagaaaaaataacttaattgatactgaataccattgataactacttttacttaatttaaattaaggtctatttagatagacaaataaataaataaataagcaccacttttgtgcctcactggaccacctgtgggaccactcttcatccttttttttctccaataggatgaattttaagttggacataataatccaaatttcttttacttattttaaaatttttataagtagctaattaatggagttaattttgaattataaatttataagagcaaaaagtcaaggagatgacctggatttataactgaggttaatcagattattaggatattagtttgcaaattaagaaatataagtaaacgatcatttcacatacacttggccatattaaaaaggaaatcatatttaagattaaaacaaaaaagatggaaagatcttattactcattctgaaaagaaaaattcatcatttgctgtccctaacatggaaagatattgaagattctatgtagaggtgccaagcccttggccccttacatgataaattaaactcaatgcctacctcaatattattttgtaatatgcatcttctgtagtaaatgtatatttgcatatcacgtcaaatatttctatgttttgtgccttcgataattttctatagatgttatacatacgtgaactatcatgctattaattgatatggacgctctatattaatttcagtatcctttctgatatttcttttctccatgcccactttatacagttgtcttttccttttccttcttctcctaaaatgtcattaaacatatggagaagggaaagtgatcaaattcattcacattaattttgcacttctggtttgagcgaaaatatatattaattcatttcacttctccctttgtcttcttcacaatccttacaaattccaatcaacttcttccttttttttcagaaatggggcttgcagggaacctgcttttcctattagtttcattaatcttctgtgctgttgcaactgcagattgctccaatgggggctgccaggtttgcttctttctgtgattttgaggacagtgttgttgtaaaataacatggggtttagtatgaggttgaattatgatgattttgatttccatcggtgctttgtaaatgtagcttcacgataa

SEQ ID NO: 12956 - DNA, 6588 bp, Vitis vinifera
  Intron number 2 from transcript GSVIVT01008085001 (locus G SVIVG01008085001) derived from phytozome v7.0 (chr-ID chr1 7; pos 5942924 to 5949511 reverse strand)
agtaagttttatctatttgaattgctttcatattttgaatgccaaaatgttggtccattttaaatcaagcagtctattctgttgaatgatgcaatttttaggtggagcatttgaagcttcagtgttctgattttggcacaaaaggaattggtgaatgtactggaaaataggagtattgtaggaaataattcacaataaggcttcagaaagctaacatggaaagttgggtgaagcttgagcctctcaggcaacttcaacatgtaggccacctgcccaacccgttttatcacctcgaatggtccatcatacttaggaattagacctctctgccttgtcttactactgatcttcttccatatctgaggagtcaattttctggaatagagttaacaacagtcaagagacatctgcagcatcaaaaccccattttccttttatttttcttttcctttgattaagacaaaagtataaaggaaatccaaagctcaattgaatgaagatatccttcacattcaaaacaaacatgttcacattctggaagatcctctggtcttcttgcaccaaacacaccaaaagatgcaaagtggggcaaactaccaaatggctttatgacttacggccctgcctttaaagtttaaacctagtaagaacttttaacaggctcagaaacatccatgaaagaactctagagaaagagagagagagacccaaagtttctgacttatctcacaacacaaacttctttaccagaaagtttcctttctcaaagttcctcaaaggtacacagaagaatgtaaccaaaataaggcatttaacttccagtttcaaagggattgaagcaacttgtcttatccattcctactaatttaagggctcaacagttgtaggaaaaaattaaagaaataaaagaaatacatggacttcaactccataataaaacaatcataaaaccttattgcaagggctggcttccgatgcttctcctcacctaactgctccacttagttgctgcccaagcgtctttagtccttattaactacaataaagaaaattagtggaagggatcctttctgctgaagaggctacaactagaatggttgctgtggacaatgatacacacgctttaatttcagtcaaaatacccatgtcgacacaattcaacaaggtataggtacgagatccatgtcggataaggatatattgcatcggatacaactatttacctacattatctcttttttaatttttttaaaaattaaagttatattgcttccgatacatttatttctctctttatatatttcttaaatttttgaaaattatactagataacaatataaaataaattataacaaaaaataaaaaaattttaaattaatttctaactcttgtaaccaaagtgttttatctctttcttaatttttttaaatataatgaaatataacaattattatcatatagaatttaaagataaatataataattagcatcttattaaaatagaaaagatataataaatatattttccaattacaattaatcatgtagtattatgatttatactactacgcttatatttagtgttaattcattattaattaatgacatatccaagtacccacacccataattgagacccttctcaagcgcattattgtgtcataagattttgggatgcaaatgatctgacatgtagacatacgctgcacccactttgtgaagaatgaagtattaggtttctttagggagtttaaggagttcgaaagaagttcaaatgtcatgttttagttttgatggttttgagtcctaacaaagagggttcaaaggacttgaaagactttaggcccattagcttggttgaaagtctgcataggttcctagcagaggtgatagaaaacaaaattaagaaagtgtcacactcacaacatgcctttgcagggaggagccaaatttgggactcgatccttattgcaaataatgtcattgattcaagactaagagctttataatttgatattgaaagggcatacaaccatattataatttgatattgaaagggcttataacatgaacttgagccaaaagtggataggtggaacaaaatggtgcaaatccttaactatatttttagttcttgtaaataggactccggttggtttctttcaaagctcaaagggtttgaggcaggtggatcatctctccctatttatttgtcctagctctagaggctcctagttgtcttttgaagaaggcaggagagaaaggtttcatcttgagtttcaaggtagaagggagaagtgcagagaggaaggaggtgtcttatctcttattagctaatggcactcttaaatgttgtaatgctagccatgggcaataaagatatctaagttggactctaatgtgatttgaggtagtttttgggcttaaaattaatttagaaaaaaacaagctaattctaatgggggtaatgaatgtggaagtgttggcttctatattggcttgtagaatgggggtgctcccaaccacatatttaggtctccctttgggtggctcttgtaagttgacttcaatgtggcatgtggtggaagagaggtttcaaagaaggcaagcaatatgaaagaggcaataggaagactcactctagttaaaagtactttgtcaagtcaatcgatttatcacaagcccttgttcatcattctaagaaaagtgagtttaacgcttggaaagattcaaagaaacattttgtacaagggagcactagaaaaaagatggtacatgaagaagaagaattggggggtgggcatttggcattaggaatccgtccgttctcatcaagaccttgctcaacaaatgaaattgcaaattcacaactttgtaaaaaagggttacaatagggaagttttgggaaaaagaaggggaatagtgttcttaaatcttgtcatataagggatagttatagagtgggcatgtggaaggtaattagggaaggatgagatgtcattaaaaccatatctagtttcgtggtgggagacgtaaagaatgtaaacttttttgaatgataggtggggtggtgattcaaccctcaatgattattttccctttctgtttgctattgctacttcaacggattcttaggtagcgaatctgtgggagcgtttaggaaatgggatattagagtccttggttcaatagacaatttcatcactgagaactcgaaagaatggaggaatttcttttaaggttttaggagaaagcattaagtaagaaggatgaggatagggtgatctatttagaaacgaagagcggtaatttcttagttaaatctctttactcttttttattgctagggagattagaaccttttttaaggcatttatttgaaacccatgaagtgtcaacgaaagtaggattctttgcatgggaagcaacctgggacaggatcctcaccatagatcaattgaaaaagggttaaagacctttgtaaatagatgttttttgtgtaagatgaggaaaaagcaatagaccaccttccgattcatagtatcccaccaagaattctacaacagctaattttctcattgtttcaattagaatgagtgatgttgtctttttctaagagggtccttttaagttggcatggatccttgtgggaagaaaagaaagaaaacatggaaagttgccccttatgtgtgctttggactatttgaaaggagagaactagcaagtcttttgaagatatggaacaaatggatcaagcaataaaatactctctttttttctttgggttgggggagaggagtgtgtcaaggtggtcttaaatatagcaaaaatgtctatggtagacttggttgattgatttggttctttgtaaggagaggtctttactactttttctctaatattgcgtttttcttttggtgcttgtattttttttttttttttgatagacgaagacaacttgaattgaaaagacgctatgcaccctacgtttacaagtagtatacaaagagagccaaaacaaggttgcaaaaagaaagaaaaaacctagataggtaaaaagctagtcaacatgccaatcacccaaaaaatccaaaaaagagggagagtctaaatacaaaaactgttgagaccactgtagaaaagaccaaaaaaagaggttcctcaagtagggatctgacatctcttcctcttggaacgttcttcggtttcactctccccaaatacaccaaaaaagacaaataggcgccaatctcaaactactctcctcttcttccctagccccttaactttccattttagaagcagatttctcactaagcccgagaacacccacaccacaccaaaagaagatagcaacaaagtccatagctcccttgtcttaccacaatgaatgagaatgtggtccactgattcctcatcgtctttacaaaggctgcacctgttgaccttggaccaacccctcttcattaacatgtctactattaaaatttttccccaaactgcttcccatgcaaaaaaagagttctaagagggcgtacgatgcaccatttttaatagcctttgttaatatattttgcttacttataaaaaaaactaaagaaaatgagtggaaatgtctcaataataggcctactattacactagttctctgaaaactaaaaaatatattgttaggggccaccattaaactcatcaatcaagaaaaaatcacatcattgccttttacaatagcttcctaaaaggatccatgactttccctcacacatttagtcttccattcccttgttcacacacatacttccacacttcataaattatccatttttttttttacaaaaacctccacaatcattctcttaaaagagctagattcacaaagggatgatagtttggcgctaaaaccacaaaaaccactttcctaaaggaccttgcttcataatcaaaaaaataaaacttgaatccctctctaactcaaactcaaaagaagacatattgaaactttctcaaccttctactcaatgaaatataaatatggtaaaggggcactcaaagtactgcacgtcaatgtcctccccctcccatcctccttttcatctttaggaagttaaagccttttctccacaaccataacagatccttacacgcaaggtcagcagctgaataaatgaacttacactacctcacccatcgaatcaactcattagcatttctaatcgaattaacattcaagccttctacctattcaaattacaagataattttccccaaatacctaatggtcagccccactctatggcagcacaatggtcaacagtgtgtttttattcaatcttagcaacccaattttttagcattgcagtttgaattcagaactaataaatttccacgtaaaatttgggttttctagtttaattctatagttgatggaaattagtaagtaaatactatgctcaagaactggtggaatccactagagatgctgggaaaaaagggtgcccacccatttagatttggtgtttacatggctaacaatttgttttacagaaggagccatgtaacattcaggaagccactgtcctcattgcatcattattgcagattggaaactggatactcatgccctgtgttatgtcatttatgtaatctgtccaattcagagaaagctgggagtttttgtttggtagctacagcaaacaataaaatttcttatcaaaccttcataaacatgaatctgcttttttcaagttttttatttttctgggaaaaacatcagcaaattggctcaagacagtaaaactaatgccgaagtccattacaacagtgtcagaattgtgagatgtgcttgcaataattctctacttacagaaaaatatggtgcagggtaagtgggtgtttgtgatcaatctgccattattatctcatcagatagcatggtgttgtatgctttacctttttgtgcaaactgctcaaaagttaattgtaattgattctgtcaaagcactagaattgccaaccgaatatgtttgttcattatgtgtgtgtagaatgactattgcttaagtggtcattgttcaaaaaaatgatactggagctacaattcaatctttgattttggtttttgcttgcttttattttacatggacacgggccttgccttttcttttgttcttcaataaatttgtttattcattaataaaacaatttggtctttgaaaacagcggcagtacatgctcataaaaataaatagtaaatggtaaagtgcttatggtatgtatgtccattgggaaaaaaaaaggtgctctgtggtatgtatgcctcaagacttttaaagatgttgcattggcccctaaatattttccttctcgcctatactggacatttttggtatgcttcgtgtgaactgtgctacacctccctttaggcatttttaatatatgttctcttttgcctagcaaaagaaaaaaaaaaaaaaaggcccttcaatattttgtagttaattctttgctgtgttggtcattagccatgtggcttggttgggcagcttttccattcaatttcatctttgttattaattggtgcagaggcag

SEQ ID NO: 12957 - DNA, 5900 bp, Vitis vinifera
  Intron number 2 from transcript GSVIVT01023687001 (locus G SVIVG01023687001) derived from phytozome v7.0 (chr-ID chr1 1; pos 9288524 to 9294423)
gaggtaggcttttgccaaacacccttgtcattatttttgtcactattattttatgtgttgacttctagcaattggattattgtatggaagtattttgattaaatggtactgtcagtcttttgtcggtaccctacgtctatgaaataattgggagggacttgtttgggctttgtttagttacggagaaaaatgaagaaaaggaaggtattactaagaaagtttttgctggtaattaggtgtaatttacaatcatatttcctttccattagttcttccataatgttttttaattgcatgcaattgtagataaggatgcatggtatttgggtggtgtttttaaatctttttatgtgattaaatagcaaacatgattaatggccgtacttagagttcaatttgtaattatctttctagattactatttcttaccaactagcataagtgattataatgtaaaatttattctcaatctcgtagattatatttggttttagaaaagtactaaagaaaagatatgaaaaatgattttcttataatgaaaaatatatgtaaaaaaattaaatataattaaaattagttaaaatcttatgtatttttaaattatttaatttttatataaaatagttaaaataagttaaataagtttaaaataccacataaaagtaatttatttactttaaatctattttttatttttttccttttatttttattctttgtttttttttcctcatatttttctaaatatcgataattacggatatattgggaaaatattgatatatattttgacacaaaatatcagtatatgaaaaattcataaaaatattataaaaaactccaaaaatgatataataataataataatatattaaagttattttaacaaaaaaaaatgatatatataccaaaggatataatgcatttaatttggatgtattaaaaaatataaaagaaatgtttatatatatatttaaaagtattttttatttaaaaatattaatacttttatttataaatttatatttttcttgtatttaattactataattaaatttaacttattttcaataattttatatataataataataataaattttatttcgtttataaattttattttataaattagtatatataagtaatatgcatttcataaaactaagagcaacgtagcttttttggcaagtgatttaaatttcatgcaaaatactaggattcaagtcgcggtggtgtgtttttgggtttatgatttttctaatctttgtggaagtgaatcccacataggacatggggagcaaaataaagttgtatttaataagagatgctcccttcctatgcatgcttgaggcttggattgtgcttcttgtgcacgcttaaggtttggattgggttttagaccaaatgatgcatgcttctgagacttatataacgatattttcatcttggtaaacctttttgctctaaatttatttcaataaatagattttgagaaactcaagtctattttgtatccaaatccattgtttaagaaaaccttttaaaatgtgaatttggatttaaaattgatggagtttacaatataatgtcaagaattttttggcaataaataaaagcccaaaggcaaccactcaaattacatattttgcacaataattgcttgcctcaattagccatccaggcatcttgcctccaaagttattcatgtacatgcctctcttctctttagttataggtaaatgtagctctaacctcttgctatctcgtagtcaattcttatatatagaaagactaagatgccccgtgtgtgtgtttttttttgtccttgtttcttttgctcaaaatattaataaatattaatttaatttaaatcttaatagattggaatgtcattaagtttttattctatttttattaatgttattaagtattaaattgcttgttttttattgatatctcaatgttaattctcatataaattatttgagactatggtagtttggtttattttaattaagtccataattataagaagtttttaagagtggatttggatttattttgaataataaattaattttggatgttgcagaacataaaagttggaaaagagaaaggaaaaatgatttatgcctttgacgaagttaaaatttcttaactttttctaagaaaacaaaattatcttaagaaaaagtgataaaattgaaaagtaaattggtcaaaaatattgtcagtacaaacaagcctaactatagtaagtttgtatatgagattaataggttctctttgtcaagcaatagaactcctaattaaaattaactttttcatttaagatttgtaagatacttttcctattatattcttatacttttctaaattaaattagaatatgattaacttctacatttaatcgtcatcagtagttaaaaataataaataaataaacaaaaaaaactaagatccaatgattattagtactatcatgtccaattaataaatcacatttcccattagatcgagtgcatgtacttgttataatacattcacttgtttgcttaagatcaccaactcaatgatgtataatcctatcaatagtagcacaagtgtagacttatttgttggtattattgtaccaccaatgctaagaatattttcaattaacaaggagttaaaaataaatcatcattccttgctttgggttcattaaacaatagtatggtttttgtacaatgttatcatgttaattttcattatgagatcatacataacatataaatacaaataataaaataataatatgaaatctcttttaaataacaatacaaaacaaatttaataaaataaaaattctaaaataggttgagcataatctaataatctccaacttgcattcgaaaccaattgtacactttttttatcttcattgtctcgacattttttgttaaggcaatccttgctattgttgtatcatctctttttattatgtcatcaagtgaaatctatgttcgatgtgtttctttcttaagagttctgggctcaagatatgtcttattcacgttatcacaatcatgatgaattttcattggaagttgaatggatagaatgacttcaagttctagaatgagcttacaaatccacaccacttttgtagctatatactccactaccatgatggtctactataatatctcgctttcaatttctccaacttattatttctttacgaagtggaaaatacgacaccaaaagtaggtattctatcaacactttattgtaaattagtgtgcaacatcaaataattaaagaaaaaaagaagatggtcgataatccatctatacatttcatgctctaaatatgtgatttacattgacatatacacaaaggtataatactactatggagatgataaagaattgaaaattgacacttgattataggagtgaataagctatcaagccatatgtagcaaacctttcaatatatacaagtgagcaattccattcctcactcattgggaagccatgtgcaacatgccttgagatatatacaacaattgtcattcctcgatcattaggttgagcaacaaccatgagatattcatggagaaaatatgataataggaaatccttgtgacaacaatttacattccactaggtttgcatgcaatagttgtttatcattcccccttaagagtgaacaaaatttaatgaaatctgaacttgtaaaaaaaactaagaaaattgaatcttaggcaagacctttgtaaaatgtcaactatttgaagatttaaaagtagaaattgagtgactaaaacaccaaatatagcattttcttgaaaaaaaaaatggtagcgaagctcaatatgcttagagcaagcataaaaaatgaggtttatggttgtataaagggaacttcttatatatatatatataaacattggataactagacatatattttcaagtaaaagatacttttttaagggatatttggttaaaaggggcaaaataagttggtattcggaaaaataacctctgcctttttaaaaccttaaaaaaaaaaattaaaagagaaacctttgaaattcaaaagagtagaaaagaagagaaagagagcaaaacgaagggttcttctattttgaatggtaaattagaatgtatgctttagtcttctgatttttatttttatttattttttttgtagattttcgtactattgttgattctctgtctaaaaggattctaaaatgttcatttgattgaagtgtgattttttttttttatccagtttttgaaaaaacacgggagatgaaaagaacgaaacaaagtggagaaggatcttgaaaggtacgtttattactttcaaatagtttgtttttcatattttttttatctctttattgatttcatacatgtgcttgaggtgtgtgtgtgtgtgtgtgtgtgtgtgttttcatatggttttagaaaaaacgcggaaagaagtaatgggtttatatgttcattttttgttaagcgtaaatataagagattttcttaaatttgttagtctattcctctttgaattcaaaaagaaaatttttgtatttaattagatttcatggctattttattttgaagttttgctctacttgttaagattttgaagtgtgatattatggcaattgctctgattttatagtgtagaaaactgttcatatggttcttgttgcatgtgtacttttaagcataaatctagtggaaaagtaacaaatgtgttgatcaattgtgttcaaaagagctgaaacataattagagaaacaaaatatgcccccatttttatttctcctccctagtgattagaagaaaccttgcatttgtcctacgaaggaagatgaatttgtttccttaaaattcccaagtggagatattggaggtgttgctgaagtctttttccatgagcattcgtgtcaaatattctctttttgtgctgtttaacctccaattaatggaaccaatttgatagacatgaatagtcattcttttctattaatgaaaaaattggagatcattgcagtctttgccaattgggtatctagttttcagcagtttaggaaaaagatcttttcctatttacagttctcttcccaagggataagaagttggtttaaccaaaaatctcaattttaataaaacaatttgcattccttgcctactacagtttccatttcacttgtatagattaagaagaaaacacctgccctcccttggaggtaaacaaacattaacatgcaccctatcaagttctgaacccagtttgcttttactatatcataggtgacatttgctaaatctaaaacccaattggtcttgcaatgcaaactataacattcaaatagtaatctccaacaaaagtcatggcaaagaatgatactaactgatggttgaaatattactcacaactaaaatattgagtgagataaagcatatgcatagccaaaatactcaaaatacttctaccatatcctttttgtaagtaatatgatttatacctagatatggatgtgaggaaaagtaatatgacatggattcacaattagttcttgaaatttaagcaaaaataaccaaagtgtttgaactcatggaaagataatgttagatttgataaattttctgcatacaattttttagcataaagatacttgaagactctaaagataatattcatgaacaaaatgagatgttgaaacactccaaaactcttaaacaacctagatatatgtaaacttcacttgaatctcccacgttattgacaaaaagtaatacatatataacatatgatttaccaaacaagtaagaggaaagaaaagaaagaaactttaacatatttattcacccatagaagtatagggaaacaaaa

SEQ ID NO: 12958 - DNA, 954 bp, Vitis vinifera
  Intron number 6 from transcript GSVIVT01034544001 (locus G SVIVG01034544001) derived from phytozome v7.0 (chr-ID chr1 8; pos 19639438 to 19640391 reverse strand)
tcctttgggtggtgatcctcgggttttggcaggatgtaagaggctcttagttttggaattttatatttttttccaacaaaatttgatttgctttatcatgatgatttattagtagatcactttatattagaccctccttttcacaattatccctttctgttacctgttttgccatggcctttacggacccttggcagactgcaatttaatacatgtatatgatttctttttattagatggaacgataagggcctgtttggcaactgtttttgaaaacaattctgaaaaacaatttttgagaatacttttttaaagttgtcctctaatgttttgtataaaaaaaggttatttagaaatttgaaatgtttttaacctatttttaatggtttgaaatatgttttaaaaataatttttatatatggggctttatttttaatcatttttcatatttatacaattattttttaaaatacctcaggaaacaagtgaaaacaattaaaaaatgttctctgaaaacaaacatgttttttgtttttaagaacataaaagaaaaacagttttctgattattaaacatgttttcctgtttttcttttttattttttattttttattttggagaataaaatattgttcttgaaaacaattgccaagcaagacataacagttttatgtaatggacaaattaatgttttaactagggctttatgcaaatcggtgccctgctattaaggttacctctagaaacaatgtacaaattttgttttggtgagaagtgagatacagatcaagatttcaatctcttgagacaaaggccttcaattcccaagctctgttttaactatttcagaaatatggttgatattatcagcttggtttctctttgtttttgtttttgtttttgttttttttgtttttttcaattagtaagtacgggtttttataatttttagat

SEQ ID NO: 12959 - DNA, 3323 bp, Vitis vinifera
  Intron number 1 from transcript GSVIVT01007932001 (locus G SVIVG01007932001) derived from phytozome v7.0 (chr-ID chr1 7; pos 7424532 to 7427854)
tctggccgagaccaggtcctcaagaccatccatccgtaagatctcccttccaatttctgaagtctcttttcaattcaccgttcttgactacgatttgggtttgtatggatcgtttgtgatttgtgattttgattttgccctaaagtttagggttcttgttttcttcaattttttgtctgtgcttaaatttttactttcatttatcgttttttttgcggaattttttgtgaatttgtatgttcgtggcgttttggaggcggtgttattgcatttggaagtgaaagtggagggcaggatcaaaattagaagggaagaggaaaggtgtttgagttggtggcattttttttaatgaagaatatagtataaaacgcggagtaaagattgatttgttggaaaagcgtcgaagttctaatttttagtttagtttagaattgaatatctaaatcaaccccgggcaatgagattggtttcttttagttgggaattaaatggctattcatggcgatgtgcacattcagcttctgagtgggagtggggatgggggaggatctaggtttgattccattgtttaatgtaagacatccaattcgaagaatgaagctgagaccagttggtagcactgttcaatttttaaaaaggtttaatactgattgattgcagtgatgttgatcaacgtccctcctgctccccaatgatattctttgctgtatccttggttctggacgcttgctggtctcattttcattttcaagcctgtatgctgctgttatagattaaggcagtgatatttatatttttaggttctggggacctttttctttggaagaaaagtatttgtaacagtaaagcatgtctaacccaactgaaggctgctctaaatcccaactgcttgggatcattgaccttattctctctttttgtttcttgaaaaacaaaggctgtgtttaggttcatatcagagtgataactactttgtttcttatgatcaccttgactgatgtttccacttttagcctttccttttttttcttggtaatgagtccaacttgaatcaatttattcatcctcattggtgcatctgttggtctttgttgtctgtctaaaagactgatagatggtgcatgactacttggtgaaaggctgctatggcaacgctatatcttccctcgctttagccatgtggcggccacctggtgtattcggacaatctgtttggatctcaaatggtagtaaggaacaagaaaaaacatgaatgaatcttaacttttcttgttggatttgtcatggaaatgtaaaaggaaataaataatttttaaaaaagttgtatattttcacaatcttcattcactgcatagaaaaaggaataaaattggagtgtgatatggaaaaaattattgagctttaaatctctattatagttttaaaaggcatagggcacacttaaggcacaaaagtctcctgtggcattggcacaaggcacacacctaaggaaattgaaatgctacttatgattcctatcaagtttataaaatatgatctaaaatccaatccaatccaatcaacaaaaaatctaagattccaaatatttaaagaagcatttaggaaaaaaataatgaaattatgtaaatttcaatatagatttagaaatttcaagaataaaaaccttttaaaaaggaaaagtaaagtaggctatgcacaccattccaacaaggctcacgtcttggcaagtgaggcgctttaactagggggtggttgtgccttgagcctatgtgcacttaaagcacgcctttcacaactatgatttgtatatgaaaaggaataaaattggagaataaagagaaaaactttatttatttaaatttattattttagttttctttactttttgtgtcctccctttacatcctaattttcttttgtttatgcttctcctcaagcttcccatgatccaattagtctaaatatgaaaattagtagttgaagctataaaatgttgcgtattagtcttgtgatacttggagtacacaggtattactaggtgtgatacctttctaacagataaatacaaatgttacagaagaatgagaaattgctaagacagtgtcattcactaataacatatttaacaattttattgaaatgcagcagactgccctgcttaatcattgttcatatgttcctgtttcacactctcgtgttcaaatcacttatatggtagagctctcaagtattgcctgcatttctaagaagttgaacactcaagtattacccaagaatgattcattgctaagaaattgttgtacgctaatggaaccatatttaatagtgctatgttcaattatttaacaattgtatattcagttatttgaataagaatgcagctaaccaaccggcctagctattgcccatatgttcaagttttacacactctagcctctaggtgcaaattgcttgtaaggttgctcaattgggaagcttgcatgttgttaatagttccatgggactcttcctttttagaattgcatcacatattattggaatatattttttgtctctgccagtcttctcactcattgctgaaatgtataattttttcttttcttttctttgcctttttttatttgtggggtggctggacagttacttcccctttaggttttcaatagttgtagaaagcctacaactctagtcaacaagccttaatccaactacctgtatccactacatgagtacttttgccattccctttatctgggggacatcctctggattactgatgttgtcgtataatcccactctttagcaaatttggggactgagtgctaatgacgttaaaatgctgtttcatttttgttggagacacttttacacgtatttaacttgttgatagaaaggggactatatccccttgtttcttctaatatttggggggtaaaatatggttatttatagtctattaataagttaaaaaaattaaaaaaaatggtgattcactgcccagctgccccttctctttgttactactgcgtacatcagaatattacataataaaacgtatcttgccaccaccatatttgactagttgacttgaactccctcgtgctcctgaagttttttcagatggccttcatatgctaaccaacctagtgctaagtataacatagatttatatgaatgagtgttaaaatatggtaaatttaattatttaaattttagggctggcaccccctgtcacaatgattgatacagtgtattctttgttttgtttcacataaatcctttgacgccatgacagggccctagggaagtgtcttcttatttct

SEQ ID NO: 12960 - DNA, 1644 bp, Vitis vinifera
  Intron number 17 from transcript GSVIVT01013527001 (locus GSVIVG01013527001) derived from phytozome v7.0 (chr-ID chr 13_random; pos 2385315 to 2386958)
cccgggctgaatccctaccaggtgagatggactttcatttattggtgttagaaactgttttacctttcattcttggcaagtagagatagctactatcagctggctgaatttttttttttttttttggtagctagtgtgagttttatcatatttgtttcttatccttagactctttgaatgtagtatttttaccaaaaaggaaaaatttttggtagctaggacaagtcattcttcatcctttaaactgtttgaatgacatctactggtagtggtaatttttaaatgtggaaaacttggaaaaccatgcagttcacacacaaaaccatgtgaaatgagatctgttaagacaatccatgtgctactgactgattcttttcatgcaatcctcttcttgtcatgcatttatctcccttttggtttatgcccctataatttatctgagaagatgtaggaaaaggaaatggtatttggaattcacaaactgtgttttcgactcctggttgtaagatctgaacttttctatttcatgtcttctttgcaaccaaatggagtataagttcaagttagagtttcgaattttcatttgcatattaaaaaagaaaaggaaattcaagttgagtttctccttagttgcttaagaaatttggctattcaagggaattccatctcctaaatgccatgaatcctttcccccttttttactttgatatcttttttgcttgtttaattagtttgtttcttcagttagataaaggattggggacaagatgatgtctaaaagtgttcgtttctcacaacagaagacacttgtactggttatctgctgaatgtttgtgctcctgttccttttttttaatttttttttatttatgccatttcctaattctttttcccttcctggtacttttcttgagagtagattgaagggtagaagctcttattaaatttccaactcaaaagcttcgtacatgaaaaagcttagacactttacttaggccttactctcaactaagactagacactttgaaaggtaaaagctcttttttaagctcaataaaagcgtctaagcctatttggttaattttatccaaagagattatgacttaaaaaagagcttaatatggaaaccaggaaaatgtcgcttcttgtaggagctcagttttggcttacaagttcttgcatgttttgtaaaatttttaggataccgatattgccctttaaaaattgcgacttttaaagctaaagccaaaaacaggaacctatcagaaacgaagccttaatgtattagtggaaattaactgaaatagtttataatttaatccctgtttatatgtgtgggtagttttaactcatgaacctgcacgtcaaacatggggaacggagatctctacagttaattttctttctgataggcaaataaaaaaattattttatgtatgaattccttgtggcaaacaaagccgtgtggaaagttttgggtctggattttccactgcaaaattcttggattctgatttgcatacatgagatttacattcttatgtggctgggttttctgaacagatatcatttataatgctgctgaatctaattgctacatttttcttattgcagaccgggaatccgaatccaagcggaagcggc

SEQ ID NO: 12961 - DNA, 7280 bp, Vitis vinifera
  Intron number 2 from transcript GSVIVT01036255001 (locus G SVIVG01036255001) derived from phytozome v7.0 (chr-ID chr1 4; pos 7961774 to 7969053 reverse strand)
caagtatgtgcagtaaagagttataatattcatcaactctaaacatggaattcttggaggatcccgctcttctttgtagctgtttatggcttttgattgtatcaacaagtttttgcaatcaaactagttcaattgatcaaaagatcatgttgctacaggagattgatctatcaagcaagagttgaatttctgttatttttgtgtgtttacttgccattggtagttactccttttgagcccaagttgattggataaagggaatagatccactctttctctaccttttacttgcttcttctctcagttcaattgaattgcttatggtggacaacatgctattaatgccaaatatcctgaggccaactgggaaatagattagggttgtaccatttatttctgctatagcattactaggattggattataggagtaggtcggccttcataatctattttatattttgtaaaggcttttgcatattagagattgtttacttgtaatttgactgaatcactttcaaagattgcaatgtagttttagttgctccacttaattttggctaacattagaagtgggtagattttcttgagacagctacaaatatacaaccttccattgatgctatttatgtttggtcatgttttaatcagtgcattgtttacttgtattttaactgaatcactttcaaagaatgcaatgtagttttagttgctccacctaattgagccttaacattttttttttgataggttaattgagcctaacattagaaatgggtagattttcttgagactgctacaaacatacgaccttccattgatgctatttatgtttggtcatgtactcagtgcataatttagacattatttggatttgatttgcaggaatcataagttggatatcttggccttagttcattatatttataacttgttgagtcctatgatagttgtccctcactgctctccatagtagttgctatagtaggaagtctattgtggaacatgccaattgaccttggtctggttcaggactgtttcttaaggaaggtaagtttgttttattttgcacatggcaatattcttgcaattgatgtttttctggaacttctgaagttgggcaacatgtataatggagaggggggagtgtggtgaggaacatctgaagctctttttgatatctaaatttttaatattatttgttgtgttggctgcaatatgaggagattctgcaagagtttaagattgaagaataggagatctagtatttggaaatgatgataaattaaagactatgcttcttgttttctgttaggattgtgattctttatgagaggaacttgggagaaacgcttctgtttcaattctggatggaagcaccttcagaaaaattgatggtgacagagtgtgaggaactgagcatgaaattgacttttcatgaggagttgcaggtgcattgtatttgattcaataattccagatacagtttgctgcctcttgttcggtttctaatcgttctcttttaattcttggagaatgtttcttaaagctaggagattgaaggtgtggggttgttttcggtttctacatcattctccaaattttgggaatgtttggttgctcagaaaatagaggaaagtaatgctttagcatgcatgttcctgtcatttgggtggggtagaactccagaaaatgatatcagaatttcctctacaatgggagtcactccatggacccattcctctataataaaatagagctggtgggtttcattagtggtcctgagtattctgatctttttcttggtgggtttcaaattccttcttgtttggttgacctaaaaattcaggaatatgatccaatggtgggagatagagctagaaaaggggtagttatgagggttaaaaccaatgtttcataaccggatcgatcattgaactagaaaagttactggttcacggttcactagtcgaactggtgatgtcataaatatataatttatatattattaaaattaaaaataattataaaaataaaaaagataatttatatactatttaaaaaataaaattttatttgaatatcataaaattattcaaaattataatattttaaaattttgtatcatttaaggagtctcaaactaaatagttttaaaaatttcagtacttcaactctcacttgatttaaactctgcttggctattattaggatttgatttgttgtaaccataagttggagaccttgtctttaattctttgttaagctcataataagctagtgatgttcatgggtggaacatatgaaaatggcctcctcttatttgccacaataaataaatctaatgctgaaacatacagattattggtgagcaaattgggggactcttggttctcacttgaggggtataagccttcttcaagaaaggcattatgcctgttgcagtgagcctgcatttccagtgagtgcggcaaaatcttgcttcaaaccaaattatttggatgtggggctgctgaacttaagctctccttatcaggtgctgttgaacacagtcatgatggcctgaaaaagagatgataaataccttctggatcagttggagctgctcaactgggaagcaatcacattgattctttttataagacatatgtgcaagaattatggaaaattgggacatgacggatcaagctctttcttgaagctttaggccatagcgttgtgctgtaatcaacttgtctagtttaacttcacctacaaacagggaacagatttttcatatacattgttagtgcctatctctagtttaaaattgaaagttgatgaaacatgctatacttgaaccatagtcaaccttatttctttgtctttcttcaagctagagtggggtcaacatttgattctttttaactattacagagaagaaagaagctactgtatccagtacacttgctttaaatgatctcatagaagacattttttctacctggatgaaaccttcatccaatagactagacgacagaaaggttgctctgttgggaacttgaggctagtcagcataattatatgccttgatctaggtctatgattttcttattcaaagccatgaggttaggtaatgctataaaagccattgttgtaggcattacagaacttaacagttcaggatggaactctgatagaaaagaaaaaacatcgttcaggatggaacagatcaaaggccaaaggggattttctacttcactaagtgggttgacttccaagttttagggcatgtggaggactatccacttgaaggaaggagattttccttcttactggttacttcataatgaaggcaagttccattggtgggttttctagctttcctaatggttttgtagataaagtagaggcagttacacctgaagactttgggggcaatttttagtgcggtcaggcaattggcccagggtgctttcagcttgtttgtttggtttctagttttttgaagaactccttgttcttccttgctcatacccctctttcttgttttgttctatatatatatattagacttccaatcaaaacaaatctttaatttgtgttcatacatttgcatttgtactatacttatactatgtggttgggaaagaaaggacaaataattagtctcatgagatgtgtctaagcattaaatattgagacttttaagatgtgtaaccattcattctatttttggatggagtatggtttaattagttgctgtgaacagtgatggaggtaatcacaaaaagatgtttcaaaaagaaagtttatgattatcttaggcaatcatattttactaaaatcattctatttataataatttcttaaacgatcttgacaattcattgtttattttagaatttttacgttctttctagtgtattgaaggtgctgttattactattattgactagagtaaagaggtggataacatgtgaataacacaaaaagaagtattgttatcgtcattaacttattattattgttattgactggagtaaaggggtgaataagatgtgaataaacaggaaaaaaaatattagggtctgaactcatatgctctagatggagggagggtctcaattgctgaaaggagagcagaaggccagaaggaattatttaccacttcgaaagctcccttaactcatgattcttaaacttctttcatttgcgagattttcctagttagtactcttcctcgatatttaggctgttgttttataggaggataaaagttactagattttgtttaggacatgagagtagaaatataaaaaggacaaatctcctcaaagttgatgtaggacagcttcctctaagttgtcgactgttttcttctcatcctcatacttgtcagcattataattttgtcaccacatgctcgtatgctataattttgtccatggtttgtgatagttgtcattccaatgatgaagaatctgggtgtgaaaagaaggggtaaaaaacagagaaaggagcaactactcatagaggaaatcatcacaagatggctgtaagtgttcaccatgcttcatggcctataattttagccagttaatgaaaaactaatctttaattatcattgatgaattaatgtctattaataaaatgtctgcaaccaaaggaagaggatgttaagcaggagcgagaagattgaaacaggaaataagaaatgaatgtctattttagaagttggaggaggcatgaatgccaggcaaaatgtgaaaggtacaagacatagtttgatcattaaggaggcaccactgatatgtagttgttttggtcaagttaaagatggcttgtgggtaagtgggaaacttcaatgaacttaggttgaagttgtgggaaaagagattgtagccttcttttttatccatagacgatatctgcttgaacagttcaaaggcgagaaaggtctcttgtaactccaaatggttgagagaatactttcctaagttgctttgtgagttcaatgatacaagcagtttgatagaaaacagttatttgcatggaaggagatgccttggtcttcataactctgtttctgaatgtcttagacaccttagggacctcctgcctgaactctgatggttccacgagaactggtaatcaaattagtttaaaaggccatgaaatctaatatcgatgtgccttaacaggtagagttagttaagatggagctttatgagtaattcttagagtcagacattcatctgttgcatgtatctggacattagaatcaggtaatcacgaatctaagggcatcaggggcatggctttatcattggtatctgtcatctctacacttttgaatgctagattgtatatggccatgtctacaggactctattgacatatctgtttggtagcgaacatactacaaagttacatgtgaagttttctagcgttgagaatctgtgttgtgtcttcatttgatagtctatttggtccttagtcatatagtagatgaagaatttttatgttactgagaaaatagtccatatgagatggatgtgttttctgtttccaaatccctacatttcaagaatggttgccaaagcacatgatgtagttgacatgatgattcaaagaggtgtgaagcttaatgtagtcacctacactattgatggatggaggctttgcgatctgaaatggatgagttttataaataaatagttttattaaaatgaaaatagttttataaataaatagttttttttgggtaaaatatgaattgtaatattataataaaatcataaattatattttttataaataaaaaaaatactattttggtatatgttataaaactatgatttgatttttatctttgctaaaagccagtaataatagtttaaaaataataattattagtaatattttattttaaaaaaaattagaaacagagtaaagtttaatttttgtgtagcatgagccaaaatttgttattacatgcacacatttaaatttaacattcgagtagtataaaatgttttgatttaatatgtaattcattggttactatttaagtctttaaattatttttagaaactactagactcattaataaatccaatatattaagttttatttaatttaaaatttatttttctagtgaaaaaagattgaaaatatatgattctatataaaaagaaataataaagttcttataaataaaattttacccataaattcccggtattagttgaatctctatttaactttcaagttatttttaaaaattactatacttgctattaaatccaatgcattaaccgatttgaaagttatttgtctagtgaaaaaaaaaaaaggaaaaatatgattttctacaaaagaaacaatatagccatcatagaccaatttttattcataaatttttagtattaatagaattcctatttgagtttcaaacatttaaaaaaattagtaagcccgttaataaattcaacacattaaattttgtttgatttgaaatttatttgtctcatgaaattttttttgtaaatatgcaattataagaaataaagaaactaatcaagtcgaattttaattaatgactttatattgttatcaaattcatagctttttagtattaattagatcgatttttgagtttcaaattatttttaaaaattaaaagattttatgtatccaatataatttgatttgaaatttatttacttgatgaaaaatttagggaagttgaaagcaattcaacacttgaaattcaaagaaaaaccatgtttgtattttacagttttttttatttattaatttctccatattttctttttatttttttaaagtaacttttacttattttttaaatattattcaccaggctataaaataattaaaattttaaaaacaattttttatttctatagtatagatgagttgtaaaatcacattggcaaagagtgtgtatatttctattgatggtatcaaattatatttataataaagtagttaaaagaaatggaccaaatggtgatggaattcattactttaataatcttaggccatttttaaaataagtcattttattatattttttttatatataaatcttataaatatattctaaaagtaggaatttcttttctgtacattattacctgcttttatcttgaaaatgggatgagggtgtgtagtgtgtgaagttaggaggaaatctcaagctgaagatgaagatgatgatgatgacgatggtgataaggccttcttcttcttctcgtccttctggtacacaga

SEQ ID NO: 12962 - DNA, 15195 bp, Vitis vinifera
  Intron number 25 from transcript GSVIVT01018783001 (locus GSVIVG01018783001) derived from phytozome v7.0 (chr-ID chr 4; pos 19896483 to 19911677)
aggcatatcaggccccagaaaagattatactccaggtgccttcacacttatggctataaatttgattcaccttgtatttttcaattggttactgtttcatgcccaaatttattagctcatattttttgatccattggctaacaaatgcttatggcatctgctaaatagtgaatatatctattttctcctttggaaatttgctattactgcccttgaagtattgaaatttatttggagttaaaaattcagaatattaccacagcctctccaatttgcagtaaggaaaatgagagcgacaatttagcttgttggttatgctacatgaatacctttcttggtccgagtgcaccatatcttattgacaacttcaactttatttataactctgtcaaagactaaatgactatctcttctttgtagaaaagttctcttttgagtttttataggcttgagtttgtgcactaaagtgagtggttatttattttcctagatcttcttgtcactttttttttccaaatatctgatgtcccccactttgttcatttggtttggcaatatttctcctgaaactaaagctttggctttgatttttgtctacatgtggattggaacatataagcttccagctcaagaggataataaagtccatgggtatttcttcctccatttggaagatgttcaatgttaggtgaatgatcacctttaagccattatgtttttggttttatcttttggaataatagaataaactagattgctcctttagaggttttacattcctagaaatttttatttccaagtttgatttcatgcacctaaaaaaaatgaagttagctataaaaaaaaagccatcttagcttcaattggtggctttggaagaaggatgatatgttcctcccaagacagcattgaaatactatagcaagaagatcgaagagagtgaaggtggtctttgttgattctaagtcccttgatctgtgttccggatgggtaaatgggcgtgtaaaggtgcagatagtggaaagaggtaaaggctatcaggggtgcgggcttggcttctagagacccttgatcattgttataagtggaggggggaagatacttcattattattcctaagtggtttgacatgagctatcatgggtagtaagttgagagagctgggtatagaggaatttgatggtaaaaatggagagggcgagtctatgctccaatgagaagttcagtggggacctccttagtaatggaaggagtcagctatgtggatgttgccaaaaaaaccccaagaagagtggtagaagcaatgtggtttaggttgctgatgctatgtatgtattaaagattgaagaatttctgaactcctttattgataatgaatcggtacacaccatacacatatatatacacaaatgaccttaattctctcctaaaattaggaaactaaatcataaggaaatatcctaaatgatctctccttttttattcctaaattaaagtcctaactttggcattatttcaacactccccctcaagctggagaatatatatcatataatcccagcttgcaagttaagtcttcgaagttaggcctaggtaaagctttggtgaggatgtctgcggtttggtgcttggtaggaacatagtttaatttgaccgtctcactagtcaccttctctgtgataaagtgtctgtcaatctcaacatgcttggtcctgtcatgatgcacggggttctttgctatgcttatagctgcctgattatcacacatcatcagaattggagatgaactcgtttgtcccagttcactaagaaccctttttatccaaatcccttcacagattccctgtgcaagagctctgtactcagcttctgcactacttctggctacaactgattgcttcttactcctccaggtaacaagatttccccagacaaaagaacaatatccgaaagtggaccgcctgtcaatgatgtttcctgcccaatccgcatctgagtatacttcagtgtcacggttctctgtctttctgaagaataggcctttccctggtgtcatttttaaatatctaagaatcctgtagactgcttccatgtgttcctcagtggggctgtgcatgaattgacttacagcactcactgcaaagccaatatctggccgagtgtgtgagagataaatcaagcgcccgacaagccgctgatatctccccctgtctaccggtgtactttctttctcgataccaagtttcttctgactctccataggagtatcaattggtttgcatccaagcataccggtctccttaagaagatcgagtatgtattttctttgagagactacgattcctttccttgatctagccacttccataccaaggaaatatttcaaatttccaaggtctttaacttcaaactcttctgacaaatacttcttcaaattctgtaactcccccatatcatttccagatagaataatatcatcgacatagactatcaatatggccaatttcccggcatgagatttcttgacaaatagagtatgatcagcctgaccttgtttgtagcccagcttcaggactgcttttgtgaatctatcaaaccaggctcgaggagattgtttaaggccgtacaatgatttttggagtttgcaaacctgattctttgccatactttcttcgaaaccaggtggtatttccatgtagacttcctcttctaggtccccatttagaaacgcattttttatgtccagttgttgcaagcaccaatcttgattgacagccaatgagagaaggatcctgatagtgttcagttttgcaacaggagcaaaagtctcctgatagtctatcccataggattgtgtaaaccctctagctaccaaacgagccttgaatctttcgactgatccatctgctttgtattttatggtgaaaatccacttgcaccccacaggcctcttcccaaccggcaaatctgtgatagtccacgtcccattcttctcaagtgcatcaatctcatcttgtactgccttcttccattctgaaatttttaatgcctcttgtattgtgttgggaacctgagtatcatcaagagaagtagcaaatgctctgtaagatggtgataacccttcatacgtaacataatttccaattggatgatctgtacatctcctaacacccttcctcaatgcaattggcaaagtagaatcatcaatgctgggaattaactcctctccagccctatcctcacctatgttctcttcaggaagacttgaattggagtcaatatattggccacatgttgactgtgatccgtgctctaattcctgtcttttcctcctcctgatgtaaacttgtaagttctcattagcaagttgtggggctataggttgaataggcatgggagactggatggtcacgggagaaggaacatttgtgtgctgggctggctgaactgatggcggcatgggtgtggacaactcagtgggcgcgaattgggaaggatttggtgactctgagtgaaaagaaggtacaccatcaagaaaagactcccaaacttgatgttcattcatgctctccccctgaacatgagatttgggatagaagaagacatgttcaaagaaagagacgtccatggtggtgtaaaatcttttgttggttggagaatagcatttgtaccctttttgggttggagaataccctagaaaaatgcacttatttgctcgaggagcaaatttgctacgattttgaggatacacatgaacgaatgccgtacaaccaaatactttgagtggtaaatcagaagaggcggcatgggtgtgaggaaactgttttaagaaaagttgatgtggggattgaaaggtaagcactctggatggcatacggttaatcaaataggtagctgtgagaatagcttccccccagaaatagtttggaacattagaggaaaacataaggcaccgggcaacctccaagagatgtctattcttgcgttcggccaccccattttgttgtggggtgtcaacgcaagaacttatgtggataatgccatgattttgaagataagtactgagactactagtaaagtattcctttgcattatctgacttgaggacttgtattttggaattgaattgattttgaaccatacgattgaaggtttgaaaaatgtgcccgacctctgacttttctttcataaggaaaacccatgttacccgagtatgatcatcaacgaatgtcacaaaccatcgagtgccagaaatattttttatccgggagggaccccacacatcactatgtactagagagaaaacagtcgaaggtttgtatgggatttgaggatatactgttcgagtatgctttgcaaactgacaaatttcacagtgataagatgctggatttttattgataaataatctgggaaacaattttgcaaggtaaacaaagctaggatgaccaaggcgatagtgtaacattataatctcactatctttattgaccttagaatttgacacagaattgaaagactctgacatactctgagactgtacgcaacttgcttgagagacttggttggagaattggccacatgaaaggaggtagagcccggaacacagttcagcactgccaatcatcttccccgatttcaagtcctgaaaaacacacaagtttggatagaatttagtaacacattggagatcatgagccaatttgctaatggacaaaagattgcaatccaagtttggaacatggaggacagagtcaagatataagtctttagtaagttttatagaacctgtctcggcaatttttgactttgaaccatcagcaatatggacggatgaatgaccattacttggcttgtaattttgaagaatggcagcatctcctgtcatgtgatcagaagcacctgtgtctactatccacggcctcattcctcctcgattagcagtgaaggctacaccggtagtactgccactgccaacttggcttaataatttctgtagcatctccatctgctctttgttgaatggactcggctcgggaacagaggtgctctcagagttggtagccacgtgtgctctgccatctctgtcaaaccgtggctttggtttccaatcagcaggtttgccatgaagcttccagcaagtctccttataatggcctggtttcttacaataatcacaccaaggcctatcccgtttctgacgatctccaccactactattaaatgaccgagccgcaagggcagaggcatccaatgttggggcaggttgctcttttgatcccatcatcactttctgtctactttcttcacgtctaacctctgaaaaagcctccctgagacttggcaggggtttaatgcccatgattcggcctctaacatcatccaattccctgtttagtcctaggaagaacttgaacagtctcttttgttccacaatttgcctgtatgttgctgcatcatccgaacatttccatgagtgagtctcaaataagtcaagttgctgccaataccttgtgagtgtgttgtaatactgagtaactgactgctctccttggcggaagtcatgtagagctgattcaatctgaaacagttctgaagtattttcagaacttgagtaagtttctttggctgcatcccatatgtcctttgcagtcccaaacaacaagaaattttcgcctatgtcattgttcatggaattgataagccatgacatgatcatgctgttttcaatcttccacttcctgaaacccggttctgtagtttctggcatgactgcttctctagtgaggtactcatcctttcctttaccgcaaatgaacagcaacacagattgtgaccactgtaaatagttatggccatttaatttgtgtcctgtgatgagaataggagaggaatcattgccaccaaggtttggaatttcagatctgccccctgattctggtgacgtgacgctggatacttgtgatgatgccattccgtattttgtcatggaccggaaaggtagaagaacacttttcaagtaaagatgaaagccttgagatgttttgtttggtaggtaagtggggtgttaagtttatgctaggctcagacagtggtttctcagtggcattttggaagtttcctttgccttagtaggaagagaggtgatgcagctagttgggaaatttcattcgaaggctattgaatgtagccttaatgcaacatttttggttctcattcctaagaagaaaggggtggaagataggactttaggctaatcagtcttgtgggcaattttttttttttttaattttttggatgaataaatgaagcagatatatattaagagcccttggaaaaggcacacaaagtacacatggagtaatacaaaatgcgccataaggcaagcaaagggagggaaacaacaaaccacaacccaaaataaaaaaacaccctcaagacctagaaaaaatcagaaagccctacgatgaactttttgcttgtaaaccaagcctgcttacaacaacctaaacaaagccttggaaactacctcttttttttttttgatagataaatagtaaatagtaatgaaaaacgctaaaaggggcacaccaaagcacacatgatgcatacaatagtcgttgaaaagtgcctaaaaaaggattgggaaaacaaaaaactactccctcaaaatgaactcaaccaatcaatgaaatcaaataaggacatcgatctttctttgataaacaatttggaccatgaaatcaaacaacatagaaacaggactttcaatctttgatcatagagctccacattctctttttcttttttgatgggtgatcaaagagttccatattctcaaacgttcttctatttctctccttccaaattatccattgttagatagtgtacagttttacttttccttttctttccttattgtattgtgggtcccactaacatgtatatatatacccaagtccaatgtgtattattaacagttttttaataacaaaaattagggattctccatttgctctcttttcacatggtatcagagcctagggagaaaaaaaaacctaattattttcgatttattcgtgaatcaatattgggaaacctttcagtgactgtgtttcattccggtcacctttcccatttcctaaagctttccgatcaatcgtatcgccgtcagaaaaccctcaccgccggcgacttttcccgacgaagtccttttccgacaccgaccataccatcaggtgcgcaaggaggagatcttcaagttttgtcaaagcatcggagggagattctcagtcacgcgccggcacgcacgtttcttctccggcggcctgaacctcacatgccggcgcgtggagcactttctgaccacgcgcttccacctccagcctcgcttgacgctgtctagccactctccatctgtgcttgtgccatccgagccctacaagtgcattttttatggtttttttgtctctgccagccctctaaacagcctttccggcgacctccgatgacttcctctccacctcgagccctgcacatgtgttaggaagtgttcttctacccttctagtagtgccacatttgtttttctttactatttggtctctcacagccacggatcctcggttttttcttctttcaggcacgatctgaagtcgtattagggctctctttgatccaaacatatttcgttctccagataagtagatatgactactaaaagttccattttttcctctattatatctggatctcctataattacttcggagaaattggttggcagtgaaaattatttgtcctggtcttcctctgtggagctttggtttataggtcaaggttatgaggatcaccttgttacgcaggaggcggatatccctgaggttgacagagtacaatgaaggaagatagatgcacagttatgtagtgtgttatgacaatcagttgatcctaagattttgcttcatcttcgggcctacaaaacatgctttaaattttggaatcaggcgaaagggctatacacgaatgatatccaacgtctttataaggtggcttcttctattgtcaatgtcagacaacaagacatggatttatctacttatattggccaaattgcctctcttaaggaggaattcttgaccgtgatgcctcttactactgatgttggggatcaacgaatacagattgacaagttcttcatggttcttacgcttattggcctccgtccagatcttgagaccgtccgcgatcagattcttggcagttcctccattccatccttggatgatgtgtttgctcgcctcctccgtatctcctccactcagactttgccatctaataacacttcagattcttctgtgttagtttctcaaactaattctcgaggaggacgcagtggtaactgaggtaaaggccaacgtcctcattgcacctattgcaataagcttggccacactcgtgatcggtgttatcagttacatgggcggcctccccgcactgcccacgtggcccagtcatctgatccttagccgcctcagcctccgagttcctccacatctcagggtatttccctcactgacagtgagtatgatgactatctccgctatcaggccaccaagtcagcttctgttgcttctgttgcccagactggtaatgcttctgttgcccagactggtaatgcttctgcttgtcttacccacacatcttctcttggaccttggattctagattctggcgcttttgatcacatatctagtaataagtatcttttcttttctattactactatctctgccttatctactgttaccttagctaatggttcttaaactgtggctaaaggcattggtttgacacatcctctcccttctctacctctcacttctgtcctttatactcctgagtgttcctttaatcttatctccatcagcaaaatcactcgtactcttaactgctctattactttttctaataaatttgtgaccttgcaggaccggagtacggggaagacgattgacataggacgtgagtctcaaagcctctatcacctcacctcgccttcaactcctgcagtttgcatttccactgatgctccccttctcattcacagtcgcctgggccaccctagtctatccaagttccagaaaatggttcctcgtttttcatctttgttgtcgcttgcgtgtgagtcctgtcagcttgggaaacatactcgtgtcccgttcccaaagcgtttgaataatcgggcaaagtctccttttgaacttgtccacactgatgtttggggtccttgttggaccgcgtctactttagtatttcagtattttgtcactttcattgatgactattcttgatgtacttagttatttttaatgaaaaatcgagttgagttattctttattttctagaaattttattctgaaatccaaacccagttcaatatttctattcgtgtgttacgcaatgacaatgccagagaatatttttttgcaccatttacttcatttatgtcccaacatgggatccttcatcagtcttcttgtgctcatactcctcaacaaaatggggtagctgaacgtaagaatcgacatcttgttgagacagctcatactctccttctccatagtaatgttccttctcgtttttggggggacgctgttcttacagcatgttatttgattaatcatatgccctcatctgtattacacgattagattcctcattcccttcttttccctaaccaaccactttatttccttcctcctcgtatttttggttgtacttgctttgttcatattctcactcctggacaggacaaactttttgccaaagccacaaaatgcatcttcttgggatactccagacttcaaaagggttatcgttgttattcctttgagactcattgctactttctctccgctgatgtcctcttctttgaggactcaccattcttctccacctctgagtcttttcctgtttctgaagttttactccttcccattagctccccacctgatgcagtgccttctcgcttacttcaggtttatcatcgccgtcatcgtgtcgctgttcctcattctttggctgaggtacctgctgactcactttctatcccttcggcttctcctgccccggctctgcctccttttgctgacttacccattgctttttggaaaggtaatcgatctactcgtaatcctcatcccatttacaattttttgagttaccatcgattatcttcaccctattctgcatttgtttctgctatatcttctgtttctcttctcaagagcacccttaaggctctttcccatccaggctggcgacaggcaatggtagatgaaatgactgctttacactccaatgacactttggatcttgttgttttaccctctggtaaatctatagttgattgtcgttgggtctacactgttaaggttagccctaatggtcaggttgatcgccttaaggcccgcttagttgctaaaggctatgctcaagtttatggttctgattatggtgacactttctctcttgttgccaagatagcttctgttcgtctattgctctccatggctgctatgcgtttttggcctctttatcagttagatattaaaaatgctttccttcatggggatcttgctgaggaagtttatatggagcaaccacctggttttgttgctcagggggagtctggtttagtgtgcaggttacgctgttctctatatggcttgaaacaatctcctcgagcatggtttaatcgttttagttttgttgttcaggagtttggcatgtttcgcaatacagcagaccattccgttttctatcgtcataactcttcagggcagtgtatttatttggtagtttatatggacgacatcgtcattacaggcagtgattagaatggtgttcagaaactaaagcaacaccttttcacccacttttagactaaagacttggggaaactcaagtatttcttagggattgagatagctcaatccagttccggtgtggttcttttccaaatgaagtatgctttagacatcttggaagaaaccggtatgttagactgtaaaccggtagacactcctatggatccaaatgtcaaacttatatcaggacagggggagcctttaggagatcctgggagatatcggcgatttgtaggtaaactgaactacctcaccattacttgtccagacatttcttttcctgtgagtgttgttagtcaattcctatagtcaccatgtgatagccattgggatgttgtaatccgcattattcgatatatcaaaagcacaccaggccaatgtgtgttgtacgagaacagaggtcatatccaggttgttggttacacagatgcagattgggctggctcacccacagatagatgctccacttccgggtattgtgtttttattggaggtaacctaatatcctggaagagtaagaaacaagatgtagtggccagatctagtgctgaagtcgagtatcgagctatggctctggcaacatgtgaattcatatggctgaaatatcttcttcgggagttgagatttggaaaggatgaatagatgaagttcatctgtgataatcaagccgctttgcatattgcatccaatccagtcttccatgaaaggaccaaacacattgaagttgactgtcacttcattagagagaagattacatcaggatgtgtggcgactagttttgtcaattcaaatgatcaactagcagatatttttactaaatctcttagaggtcctagaattaaatacatttgtaacaagttttgtgcatataacatatatgctccagcttgaaggggagtgttagatagtgtacagttttacttttccttttctttccttattgtattgtgggtcccactaacatgtatatacatactcaagtctaatgtgtattattaacagttttttaataacaaaaattagggattctccctttctctcttttcacatccataaaaggcattaaggagctgcttcgcaaacttgttttcacttcctcctaacaaatgagccatgcaatctaatagagtttctttgatagggaagtgaatcaccaatgaaataccaaaaagagagcaaaatctgccacatcacccttgcctttttacaatgcaaaaggatgttgtcaattgactcctagcgaatgtgacatagaaagcatctattgaccaatgtccaacctctccgttgtagctgatcaagagtcaaaacttttccctaagttgccttccaagtgaaaaagctcaccttaggtggaacccaagcattccacacaatacctactaggaatggctttaatctccccacttccatgctagagtaaagggacttgatggagaaagttccactttgtttccaaccaacacatcttgtcctctccacctttaactgtcgccccctcttgtagccttgccaagaagtgctccacaaccttaatctcccaatcatttaggcgcctagagaaagtaggagtccaaacacatctttctttagaatgatgccacaagtctaccacccaagcctcctttgaactatctaaggcaactaaggagggaaaagaaacacttaaaggttcattgccacacaattatctatccaaaactttacctttctcccattgcccaaagagaaggatattctacaactaactacctcccacaaattttcatatgatcttctgtaaccaaacatcatagcccttgctcgcttccttagaacaccatcctcttcttcttctccatgttttctgcttataatttgtccttagaaaacctccttttttgttgtaatgccctagttccatttgcatggcagggccttattgagtgaagaaagacgcctaactcctaagccttttttccttctatttgaacaaacagtatccttggtccttcctccccataaaaagttcatttgaatttgttccaaccttaatctcactatccttggcattcagatcaaagacatatagtaaatcaacaagctagacaaagtattcctaattagtgttagtctcccccttttggaaatatattgtcgtttccacattgtcaatcttctacaaaacctctcttccatcccatctcaagcatccaaagaattatgaggggcacctagaggaaggcccaaataagaggtcgggagtacactcaatttgtagcctaactcaaaggccaacccctccaagttctccactctccccaggtatgagcttagtcttagggttcaaaatatcagtcgagatcggtatgactcggtcaagttgtatccgcctcggccatgattggtactagaccgatactcgagtccaatatttggttgactcgtgaataaacttggtgaatcacatagaaactttgaaatagccccgagattatgtccaaactaagctcttcgagtgatgggtgatggaaaaaatgttaatgttggaacgaaaatggtggataagtggagaagatcgaaacccatgaaagtgaagaagtatgggagttcagaccctttgcatctttttagggctattttgtgagccttaaaaaatgagtaatgtgtagagaaatagagagctcaaagttgtcattttaaagggaaaatgggtattgtgcaaaaaaggggaatgggtgtttgctaggtgaataggttataggtatttgataggattacaaatttgggtgggtatttgtttttaaagtagttaatgaaatatgtggtgaatatttgtatttaaatggataatggaaatttgatgggaattaggattatagtaaattaataatgagtatttaggtttacataaataaaataggaaatgaatattaatataaaaatggatatatttgaatatactcattcaaataaaaattctccatttttataattgttttatttagaatatatttgaaaagaaaaatgatgtttattttttttaaagatgattcctagatgtatttttttaatgattgaaaatattattaaaaaattcgaaatatttaatttaattttttttataagcaataaattcactttttattgttttcatcttcaataatgcatatgtaaaattaagtgattaaattaaattttttagatttttaatatttttgtaaatcattgtgaaggtatgcttttatcacaatttgaataattttatatataatagaagtttattttattaatttttaactctatttatttgtatttatttttgtaatctttttaaattgttttgatcttttaaactataattttttgcataccacctgatatcgatgtgcctcggggcttgctgagtcggtgactgatactgtgactttcaaccatgattataattgttggattattatttttttgatattaaattattagtatcaagtattcatggttctaagcactaaattatgaatacttaattgaatgaactcttcacggcaaagctttgtagtacccaagacttaggacccaaacctcaaaatccaaaatctcagatgcaagactggcaatagcaaaagcccaaaacttagtgaaacacattgcatatttgaggcttatgtctcaataaccttgagtatggctctacatctcaacaaggtgaggcttaagtctcacttcccttgtctttgggctatagctgtgaggctgctttccagctctttgccttgaggtgagccttaggggttgtgcctccactgccttttaacactttgatatttgcattatcatggtgggttggtttttgtttttgttttggtttctttttttcttttttttttgtggccaatgagttttatggtgttcttgttgacaatatttgcaacctgagagctattgtaaactcatgacatatttggaaccacattgtctcacaaggggttgtttatagatgaatcttgactgaggttctttaggtaatttgatgtagtaggtttattgtttcttcttggttccttatcatttcctggggttatcttgtaatacgtttgttttatctattgttttattagtttctttgctttgcttcttagaagaccttctcttctcttgatatttcttcttttgtccaatttggtaactaattgtgggttcttttagcacttcagtttcacataaaaaaaataatatggtgatgtaatgcaggtttttgttgcacttcttagaacttgtcagccaga

SEQ ID NO: 12963 - DNA, 5741 bp, Vitis vinifera
  Intron number 5 from transcript GSVIVT01033819001 (locus G SVIVG01033819001) derived from phytozome v7.0 (chr-ID chr8 ; pos 17482432 to 17488172)
agcaacgttggtgaggttggtaatctccccctccctccctccctatatctcattcatcttaaacagccttgagttcattgatatgtggctagtgagtgagatgttggctatatgaaaatggatgcattttcagtattttctgcttcttgttatggaaacgtaattcttattgttgaaataatgccaaagttaggactttaatttaggaataaaaaaggagagatcatttaggatatttccttatgatttagtttcctaattttaggagagaattaagctagattgattttttcttattcagtcatttgtgtatatatatgtgtatggtgtgtaccgattaatatcaataaaggagttcagaaatttcttcatggtatcagagccagttttctgaaaccctaatcccttctggccatctcttattcaggccatcactcattccggccaaatctctctggccatatctcaatccgatcatctctctctctctctctctcattccggtcatcagtccctgctctctttccggtcagtcgaatcgtcgtcagaaaacactcaccgccggcaacttttccggcgactttccggcgacgattttttttacaccgcaaggagcgcctggaggagatctccaatttgtcccaaagcaccggaaccagaaacccatccacgcgccgcccacgcgcgttttttcggccggcgactgcatctcacgcgccggcgcgtgagggcgcgtgagccactttccggcgacgcgcttcctcctccaggctcgcctgacgccgaccagccacccttcctacctgtttgtgcaatccgagccctgcacgtgcctcttttggggttcttttgcttccgcgggccctctgatcagatattccggcgtcctccggctattttttctcaactccagtccctgcacgtgccttgaaaagtgttcttctacctttccggtccatgacaaaatacggaatggcatcatcacaagtatccagcgtcacgtcaccagaatcagggggcagatctgaaattccaaaccttggtggcaatgattcctctcctattctcatcacaggacacaaattaaatggccataactatttacagtggtcacaatctgtgttgctgttcatttgcggtaaaggaaaggatgagtacctcactggagaagcagtcatgccagaaactacagaaccgggtttcaggaagtggaagattgaaaacagcatgatcatgtcatggcttatcaattccatgaacaatgacataggcgaaaatttcttgctgtttgggactgcaaaggacatatgggatgcagccaaagaaacttactcaagttctgaaaatacttcagaactatttcaggttgaatcagctctacatgacttccgtcaaggagagcagtcagttactcagtattacaacacactcacaaggtattggcagcaacttgacttatttgagactcactcatggaaatgttcggatgatgcagcaacatacaggcaaattgtggaacaaaagagactgttcaagttcttcctaggactaaacagggaattggatgatgttagaggccgaatcatgggcattaaacccctgccaagtctcagggaggctttttcagaggttaggcgtgaagaaagtagaaagaaagtgatgatgggatcaaaagagcaacctgccccaacattggatgcctctgcccttgctgctcggtcatttaatagtagtggtggagatcgtcagaaacgggataggccttggtgtgattattgtaagaaaccaggccattataaggagacttgctggaagcttcatggcaaacctgctgattggaaaccaaagccaaggtttgacagagatggcagagcacacgtggctgccaactctgagagcacatctgttcccgagccgagtccattcaacaaagagcagatggagatgctacagaaattattaagccaagttggcagtggcagtactaccggtgtagccttcactgctaatcgaggaggaatgaggccgtggatagtagacacaggtgcttctgatcacatgacaggagatgctgccattcttcaaaattacaagccaagtaatagtcattcatccgtccatattgctgatggttcaaagtcaaaaattgccgggacaggttctataaaacttactaaagacttatatcttgactctgtcctccatgttccaaacttggattgtaatcttttgtccattagcaaattggctcatgatctccaatgtgttactaaattctatccaaacttgtgtgtttttcaggacttgaaatcggggaagatgattggcagtgctgaactgtgttccgggctctacctcctttcatgtggccaattctcaaaccaagtctctcaagcaagttgcgtacagtctcagagtatgtcagagtctttcaattctgtgtcaaattctaaggtcaataaagatagtgagattataatgttacactatcgccttggtcatcctagctttgtttaccttgcaaaattgtttcccagattatttatcaataaaaatccagcatcttatcactatgaaatttgtcagtttgcaaagcatactcgaacagtatatcctcaaatcccatacaaaccttcgactgttttctctctagtacatagtgatgtgtggggtccctcccggataaaaaatatttctggcactcgatggtttgtgacattcgttgatgatcatactcgggtaacatgggttttccttatgaaagaaaagtcagaggtcgggcacatttttcaaaccttcaatcttatggttcaaaatcaattcaattccaaaatacaagtcctcaagtcagataatgcaaaggaatactttactagtagtctcagtacttatcttcaaaatcatggcattatccacataagttcttgcgttgacaccccacaacaaaatggggtggccgaacgcaagaatagacatctcttggaggttgctcggtgccttatgttttcctctaatgttccaaactatttctggggggaagctattctcacagctacctatttgattaaccgtatgccatccagagtgcttacctttcaatccccacgtcaacttttcttaaaacagtttcctcacacccatgccgcctcttctgatttaccactcaaagtatttggttgtacggcatttgttcatgtgtatcctcaaaatcgtagcaaatttgctcctcgagcaaataagtgcatttttctagggtattctccaacccaaaaagggtacaaatgctattctccaaccaacaaaagattttacaccaccatggacgtctctttctttgaacatgtcttcttctatcccaaatctcatgttcagggggagagcatgaatgaacatcaagtttgggagttttttcttgagggtgtaccttcttttcactcagagtcaccaaatccttcccaattcgcgcccactgagttgtccacacccatgccgccatcagttcagccagcccagcacacaaatgttccttctcccgtgaccatccagtctctcatgcctattcaacctatagccccacaacttgctaatgagaacttacaagtttacatcaggaggaggaaaagacaggaattagagcacggatcacagtcaacatgtggccaatatattgactctaattcaagtcttcctgaagagaacataggtgaggatagggctggagaggtgttaattcccagcattgatgattctactttgccaattgcattgaggaagggtgttaggagatgtacagatcatccaattgggaactatgttacgtatgaagggttatcaccatcttacagagcatttgctacttctcttgatgatactcaggttcccaacacaatacaagaggcattaaaaatttcagaatggaagaaggcagtacaagatgagattgatgcacttgagaagaatgggacgtggactatcacagatttgccggttgggaagaggcctgtggggtgcaagtggattttcaccataaaatacaaagcagatggatcagtcgaaagattcaagtctcgtttggtagctagagggtttacacaatcctatgggatagactatcaggagacttttgctcctgttgcaaaactgaacactatcaggatccttctctcattggctgtcaatcaagattggtgcttgcaacaactggacataaaaaatgcgtttctaaatggggacctagaagaggaagtctacatggaaataccacctggtttcgaagaaagtatggcaaagaatcaggtttgcaaactccaaaaatcattgtacggccttaaacaatctcctcgagcctggtttgatagattcacaaaagcagtcctgaagctgggctacaaacaaggtcaggctgatcatactctatttgtcaagaagtctcatgccgggaaattggccatattgatagtctatgtcgatgatattattctatctggaaatgacatgggggagttacagaatttgaagaagtatttgtcagaagagtttgaagttaaagaccttggaaatttgaaatatttccttggtatggaagtggctagatcaaggaagggaatcgtagtctctcaaagaaaatacatactcgatcttcttaaggagaccggtatgcttggatgcaaaccaattgatactcctatggatagtcagaagaaacttggtatcgagaaagaaagtacaccggtagacagggggagatatcagcggcttgtcgggcgcttgatttatctctcacacactcggccagatattggctttgcagtgagtgctgtaagtcaattcatgcacagccccactgaggaacacatggaagcagtctacaggattcttagatatttaaaaatgacaccagggaaaggcctattcttcagaaagacagagaaccgtgacactgaagtatattcagatgcggattgggcaggaaacatcattgacaggcggtccacttccggatattgttcttttgtctggggaaatcttgttacctggaggagtaagaagcaatcagttgtagccagaagtagtgcagaagctgagtacagagctcttgcacaaggaatctgtgaagggatttggataaaaagggttcttagtgaactgggacaaacgagttcatctccaattctgatgatgtgtgataatcaggcagctataagcatagcaaagaaccccgtgcatcatgacaggaccaagcatgttgagattgacagacactttatcacagagaaagtgactagtgagacggtcaaattaaactatgttcctaccaagcaccaaaccgcagacatcctcaccaaagctttacctaggcctaacttcgaagacttaacttgcaagctgggattatatgatatatattctccagcttgagggggagtgttgaaataatgccaaagttaggactttaatttaggaataaaaaaggagagatcatttaggatatttccttatgatttagtttcctaattttaggagagaattaagctagattgattttttcttattcagtcatttgtgtatatatatgtgtatggtgtgtaccgattaatatcaataaaggagttcagaaatttcttcacttattatgcatttatcctttctggatcaattacttgcctcttatgcgttccctatcttcttattccttcctaaatgcaggaattttgtgtcaagaagaaagatcgcgttgagct

SEQ ID NO: 12964 - DNA, 7323 bp, Vitis vinifera
  Intron number 4 from transcript GSVIVT01010733001 (locus G SVIVG01010733001) derived from phytozome v7.0 (chr-ID chr5 ; pos 21899014 to 21906336 reverse strand)
cggcgggcatacgaggtgcaatgtttgtgttaagcacttaaaattgatgtctcatttttctttcttattagggttagttatgtcatatgttctgttttgattattatggggagttccctagttgatcaaggtttttgatgctctcattagctcatatgtacagatctagaattgaccttcccttcccctttaaaagtctgatccaggaggctttagactattgaaatcaaaagctctagtctacctatttattacttactgttccaaatgtttcatgtgcatttcaatgttggagaaaaagataggaaaaaaatgtgtatttgaaaaaggaattgcttgttttagaagcttgagagaaataaaaatagtgcttaagcattttcttgattcaatgtgaagccatatttatatggccagtcatgaaggattgtgatgttttgtggatttttcctctgtagatcattgatattattagctgaacaaggagaccaagagaaagaacaacccgagttccaagctacatctaaaatttgatagagccacccatcatacctccaatgccctctctctgacttaagacacctaagatatcaaaataacagaatcctcttccacccattagttaggaaggcatggagccctggcctgtagcaagccctctaaaagggtgaaattttttgcctcgatgggttctctgtgcactagaattaacatcctttcgagctacatcatcaattgagtagtagctgggcccaggagtgagacttaatcagattgtttcggtatggagatctcctatggatggatgggctaaaattaactctcttttagtaggcaaataatgaatgcatgtagatatggacctaacaagaaaggaggtgcagcccttgtacatcttaagtatttcaaaataaacaaatgaataaataaagagcgcctaaaggccaaaagagaaaaactgaaggagagccatatcaaagcttaagctctatctatgcagttcatgaaatctaagggagtaaggttgtcaaccccaaatgtatctgtagacccccatttggggctcactttctgcagctaattttagacaggtgtcacaatctcaaggaaccatgtgtcaccccgtaattggccttcagtgaatcaggtagtggagttgaaggagccattgaatggttgacacctgtaaaggggatttgaaaaaaagctgcagacggttaagaggggagcgtttctgttatagcagggggggccagctgcaggagagaggagcgtttttttggctagagggtggggtgcttttttgaggggaagaggctttttcagacaggttcagggagtttttccaggatagagggagttagaggaggaggaaccagagagaagaggggtggtttttgctggcttttccattagagaggaggctgcagagatctttttggggagctttgggcagagagcttcctggagggggtttttcatctttctgagactgagtttttgaggaggagagaggcttttagctgcggttttctggcagagggaaggagccctagtctggagcagagaaccagagagagggatctcttgagctggagagaagtttgaggtaccagagagaaaggagggtaagcttgagaggggaatcagaggggaaaagggtgagagtttgagggtgattttctagcttagaagagaggctaccggaggagagaacagggagcagcaaactgtgagaggtagtggtgctattggctgccgtttagaggactctctcaggtatgaatgtaacattgtttatggtttgatttggattcctattactcctctatgtttcttgttgatatctgaatgctggttagcttgtttgggtggataaatgaaggccacttattgcctgttgagataaaactctgcgttcatgcccaacattattaatcttgatgtgccatgtctctcttgttaaatacccaagaatcattctaacgttcatatttgatgctaatctactcacctgaaaggaagattcactgatgaccccatgaagtgaattttctaaagctttttgtatttattcgttttcccctatgctctgtttctccaccttcctttgccttctagtatttgtccatagcatgcgtcaaatcccccatctctacttgtagaggtaaggcactacaagacataagttctcagtttctgagcatgaaaggctgcagtggattatcccgttgggtctggctattttgactgaaatattcttttgagaagtcaaatgaagaagatgtctctttatcactccttctctggttgtcttgatggtgcttgatcatgttgatttggcctctgtgtctccctgcaccgagacgagtcagatttcaagaggagtggagcatgcagtagggatgaaaatgacaacggcttgtcgttcccactaggctacaatagtttagtggagaggtatccacgcattggaaagggtcacttggtaaggctcctgaagcagaggcttttctaacagaaccatagaaagacgaatttggcgtgtccaaacagggtgcaactgaggttatatttagtgaggtggaaaatgagaatccaaaggaagcagattggtttccagcaccagaaaggcaagaacgaattgcccaattgcaagcaaaactgttccatgcagctgcatcacccagtttagctgttcagatggatggttcatatgtaccgagaaataatctggaggaagcaatcctacttttgatgattcttatggaaaattttaccttgtggagcagattctgggcgaggtagatgctctagaatgggtatatcatgagagggaggtatacccaatttggctctgcccacatcgattgtacaagcttcctgtcgaaacaatgatatatcctgaaccaggctttgagctgcctcgcaaacagggtgacacgcattatgcccagatgtacacagatgtggagatgtactatgcgccagggcctgtcttgaggggatagtctcttggctagtttcatgctgggataaggaatcacaataggtgcaggattggcttattacccaatagatacagcgcgtagaaggatgatgatgatctcaggcgaagctgtcaaatataagagctctttcgatgcattctcacagatcctgaagaatgaaggtgctagatcactctttaaaggtgctggatgcgttctggtacatgccagatgagcagagaaatccactatgaaggatgctactgctaagacacttgcccgttctaaatgatcagagtgaggttgaattctccttgatacctacctctgcacatgcatggttgtccaaagctccttctaaagcccttgttgacttcccagatccatctacccatgtgcatggaaccatgcaaacccggccattatccatactcatttcttttacctatcacctttctcattttccaatttcacatatccatcacatcaccactaaccccacttctcatcacccttcctatcccttacactcagcatatctccactcatttttctcaccaattctgtcatccatagcccactcactataccctcatgcaccatttatcacacctcatacacactgaacttattccccttccactgcattccttcataccaacctttctctttctacatcttctataccccccataccccatgcatgtacccatcagacctttatgcactacatggtgatgtatctcagcatcaaaggaagaggatgttaagtagttcccatcaaagaaaagtcacagtgcatgttgctgccaacgttacggcacgtgggcttggcatttctaaagttgattactttatccactgtgagcggcccaatgacaatggagagtgggaacttttgtttctgcattcctcgatgtgtaggcatgcgaagatgagttttctacccaaagggcaagcattgcgtggtgcttatatagacttttctgggcattttctgcaagttcaaaggcactgttataaagaatgaacgctgtcggggtaagttctgatgagcagaaaggaatttttcgagttgttgctgccattcttcatcttggaaatattgacttcaagagggaaagagaaaattaagcagatctattacatttcctccagctgtccgaagaatggatacatctttgtttcaggaagctgccacattcataaagctaaatataggttaaagtggagggactgaattttgattacagccggagctagggctacggggtcggtgacagatgacctcttcatgaagtccatggaatcagcgtcgaaggatgatactgagttgagcacaaaatatgaacaacaaggagggttatggcgttctctggactgctctttctggtattatgcctgaaccacctactaaatcagtagttttgagtcacatggagctgctccttaaagacgagatatatgcccgattgactagaaagtggtctcttttacctgaagaaaatggagacacgtgggcagacttgctgtcatacagcaaggaagtttgaaacagctctcattgctgtagtaagaaagccaccctcattgccgacaacgttctgcccttgcgctctactcccgaaggtgccgaggtctgtaacgttgaagatcacgttagtgatcgaggtgtcttcgccagagcatccggcgagtgagctattgtcgccagccacgaccctgataatggcaccagcagaatcaagctcccataccacctttttctttaatagccacgtcggccagaaggggaaatggtccagctgtagcaatcccactggttgttttgggaattcaaaatgagacaaaggtgttgaatccttaggcggtgctaacaagcttgagtaattcacattggcagatttctgatgagtatcgaatgtacccagttgcgaaaatatgctgtggttctgggttttgccgacatattatggatattatgagggagaagactgacctaaaatagaggcagcagaagaagtactcttctagactgggccctaccctcctcgaggctcttgacatgattcacgagtccaaaaggctcttggacaagcctctccttctcccactacaggccgtttgcaagattggtggcattggcgctattcctgttggtcacgttgaaactggtactattaaacctggtatggtcgtcaagtttgggccaagtggactcactactaaagtcaagtcagctgaagtgcaccatgagtctttggtaggaggtctgtccggtgacaaatgttggtttcagtgtgaagaatgttgctgtcgaggatctaagacgtggctttgtagcgtctaactccaagggtgaccctgcaaaggaagtagcccaggtcattatcaggaatcaccctgaccaaattggaaaagattacgcccctaatccttggctgccatacctcccacattgcggtaaagtttgttgaagactgtcactggcaatgaactccattcttctctgctgtttcagtacaagctaatgctcctatcactgttcacctcgatcacggaagcttgaagaagtagctggtggatgttcttgtgttgggatttgatgtagttacagtggatggttcgcattttttttacttcaaggacaacctctcatgttctatcctatcagtggctccccaaacccactggtatgatattagcttgcatggccacctttggcatgcaactaaggggccacgtgccatcctctattttctcttcccaatttttgaaaatgatttctcaaatccccttttgtaaatatttttcccaaattctgattttcaaataatccaaattttcccattttccatctttagaatttttggatactgaaatctcattttcaataaaatttggttgccattttctttccggcaagccacttttgcattttctttgtttttaaaatatttttaaaataagtaagaattaaattccgtaactccaagtgatggagtttatggaattgattcatgcaaaatgaacgggctttggtgggggccccacatcagaattttgaaaatgaatttgagtgaattgaagtgtgacatttgatggcttattacttggtttagtgacacgtgtgctatattttaatatttattgcgcactaactctatttcattgatagcgcattgatgactggaggtccaggtacgcactcattctcgttctgcccattctatttgcatattctgatcaccttattgtgcatgattgatgtgagtatttattgatttcctcattggttgccatgtcagcttcatctcattagtagagacccgactttagggacttagaggggtgctacggtttttaccgtaccttcccggtaagtaacctgacccccgaacccgatccagttttcatagaccgccttttccaaaataaggagtcacacttagggttttctttcttattttgtttaccctttaaaaaataaagcaaaaataagtggcgactccaagtcattttcaaataatcaataaaaatcaatttttcaaataaaaatcgagttcgccatcgagtgggaaacgcattgagccgaaatgcggggtccacagtatcctacactcttcaaaaaatgatttgcttggtcttttggttgtctgggtcaattgggaattcctggtgttggtgggaatagtagagagaggatttgttcacattctacaaagcttcaagtgagggttatgctattgaggtggagatttggccacttatatatctgcatcgcaggaagctagagatggaggaagctgagttttggtgattgaggtggagatttggcctcttacataccagcacttgggaagtgaaagaggatgccaagtttggtggagggaggttgtgggcagtggtattagtggattctgattctcctgcatatgtttcttaggtgaggcatgggttgcttgatcttggcaatattgacattccatgagggagattagggatcttgttgttaagctttttgtggaaatgtggtgacttagcattgaggccccaaaaaaggaggcagacttgtgagccaatagagggtccacaatatgggaagtttttggggagtttatatgttcttttgaactgatgtttcttcttggcctgtttagggtggttctgttctttgttgggtgttttgtttcatgtagtcttattttcttttgtactcttcccattcttctagtctttgctattatttattagttggtaaaatgctttgattcttataaagaataataaaaatgacaactaacaatgcttcctttatttacatcattgcagg

SEQ ID NO: 12965 - DNA, 694 bp, Vitis vinifera
  Intron number 4 from transcript GSVIVT01003206001 (locus G SVIVG01003206001) derived from phytozome v7.0 (chr-ID chrU n; pos 7889410 to 7890103)
gacaatctcccctggtgcttacctatccctttttgttttcctttagaatcctttctacaagcctttcttgtgagtatattgttgattccaggtcatatttttctcttttgagagctacaaacgactgtggagaccataaaaccataacatgtttgaccttctgcaattagagttatgctgcagcatccttggcctcctctgtggacaccataaaaccataaaagtttgatggatgtgttctatgctaccttatatatcatggagtttatgtgaactgtctgcagctactttttctgttcttgtttatttatttttactttcatttgttttctaaatgttgtaaaatgcttttgattttatgaaaaaaaaatttctcatgttcaaatgtttgataactttactggtattgtaagttattgggaactaaaaacaataaatgggtaaggtctatctgatttgaaactggccatgttcccttttttgatattttgaattctgcctctggttcacattagtttaaatttataaactggaatttggtgttacttaaaactatattggcagcttcacactgattattatttattccttattttaccgttgccttttaaagttttgtatgtttgctttgttcttgattctggatttactaagcttttccaaaatcttatctaggaaggtgcataacatcctt

SEQ ID NO: 12966 - DNA, 8669 bp, Vitis vinifera
  Intron number 9 from transcript GSVIVT01025946001 (locus G SVIVG01025946001) derived from phytozome v7.0 (chr-ID chr1 8; pos 26875738 to 26884406)
agagtccagacaactagtaataggtctattctctatctcaagaaacttatagggctgatttttgttgttcttctaatctttttctgttttcttgagtctactctctgtaaaatcatatatgaagtttacccctagtttcaagataacatcattaaatgatatgctactcctgctggtggtgtattggaaagattaaccgcctactctatcaatataaaaactctgttcatctagcccagccagttttccgattactccaataggaacgcatgatgtgtatgctcaactatcaagtccagtgatcgtattttgtggtcaatgaccaattggagttcaaatgctttataattggattgttgttttggtcattttgtctttgtgatgtcttcactatcaaacaagtaattcttatgattgatattctgctcaattaactttcttatcatgagtcttgactgttgatactaggtcaactgaggatggattcctcttttttaggtggcagtgaaagctcccgctcagacgccggaatctagatttcttgcttccttgcacaaagatgtctggatgggttgtccggacacaccctccgaagctcaagtcagattagaaacccttaaagagagagagagagagagagagagttagagaaccctctttgtgtaaccataaatcctaagaattttcccacattgactccaaaggcgcatttggccagattaagcttcatgttgcatcctctcatcaagtgaaagatttcctctaggtgttgggcatgctcactcttggtcctgctctttactacaatgtcgtcaatatacacttctactgtacgtcctattagaggtttgaagatctttgtcatcgacctttggtaagtggcttcagcattcttaacgacatgactttgtagcaatagagtttgtacagtgttatgagagcggttttttcttcacctggtcggtacatgggaatttggtggtacctgaaaaaagcatctaggaaggagagcattccatgtccaacggcagaatccactatctgatctatctgaggcaaaggaaaactatcttttggacaaacgtcatttaagttagtgtagttgacacagactcgccatttccttcccttttttgggaccacgaccacgtttgctaaccaatcgggatattcaacttctctaatgaacccgactgccagcaacttgtcaactttattgttctctgacagtagggtttttataatgttcaaaggtaaaaccaggctctgtagtgatgagctggcctttgcagtgatgattcgtagtagtgacatgacaatcatcacaaccgtagggcaattgggggttgtgtcagaaagacacatcatgacatagcttgtcatcccttcacatttgttgatggcctgagactgagcatgcttacctactgaagcagacgtgaggatgagaaaagtctcatcagtcaatttgatgtcagttaggcatggtctcatacaccaaagaagacttgaggttatcaaggaggagcgggccgctcggcagcacaaatggtccgaataggatgctctcggatgcctcgaaggtggtccgaacagtgatgaaagaagtgacacgtggtctagacgggacggtgccacgtggacaggtacgtggaagcattcataggtggacacatgggataagacccctacattgaccaactcttagaatatccttctcttccatttatggtactaataatttagtgaacttcatgttttgcttgcttaattcatagtttacaaaacatttacaattttcaaacattgccatacacttgcttggagaaagatgagatatcgactttttgttggaaaaccaaaattgatatggaaagaaataattttgtaaagctgtaaattatttattagttgtcaatctttgtatttttaggaaagtaattattaggagttatttattagttgtcaatctttgtatttttaggaaagtaattgttaggagttattctttccttttaatcagtgatttagtttcctaatttgaaggatttgtatatgatgtaaactctataaaagaataatctcaatgaaagaaaattattcctgtgaaaccctatttttcaacttggtatcagagctagcaatttgcttgtcgaaatcctcttttttcctttctttcaatccctgttctctcaaaccatgttggatatttcaaacgagtccactactgttcctcaaccttctttgaacaatcccatcatcattgattcttaaaaaatcagtcctaccacctcagaatctcactctgtccaaatcaccacaattcgcttgaatggtgacaactttctgagatggtctcaattagttcggatgtacatcagaggacgtggaaagatgggctacttgacgggtgaaaagaaggttcttgcagtggatgatccgaactatgctatataggatgctgagaattccatggtgatgacatggcttgtgaattctatggaagaagacattagctctaattacatgttgattactaccaaaaagtgctattttgtagacctaataataatggttttaagcacctttgtgtagtaatcatattcatttaacccaattaattcattaaggtccttagtaattggttttaaccattttgtggcaagtttacatgtttttatcagcttatgaaccaattcaagcatgccaattgatggaggagctatttgggcgagttaagcaaggattttggatgattacaggcttgaatttcaagtggaaacacgagcacaagcaatggagaagaggaaaacagagtgaagaaaacagctgcagtctttctttgaacttttggagcacttcccgaagtccattttttgcatgctatataccatttgaaagcttaggaagtcaagaatccaacgcttcaaagcgtgtatgatttggagctgaaatgaggaagatatggccttcggaagacaactgcaccatgtcaaatgaccaatttcgcaatgtgaattttacattgcgaaaatttcgcaaggagattttcttcatggtgcgaaattttgccatttcgcaatgtgaatttcacattgcgaaaatttcgcaaggtgaattaactcatgatgcgaaaatatggcacttcgcatcatgagtaattcacattgcgaaaatttcgcaatgtgccttttacattgcgaaattcctttgaatcctctgtttctccacgcacgcaccaccgacttcccaaatatttttagcttgatattttctcatgtaaattccttttgtaaccttgtattcagccgacataaagctttatcttgtaattttgctatatatagaggtgcacaacacctccaaaaaaaaaaaaggggatgttttggggatcgatcctctgtacattaacttagagatatataaagctttgtttttctctcttctcctgttcttctccatttctattttcttagtagccaaacagcctctgagggcttttcctcagaggatgattggctaaaacttttagtttctcaaagtatggatgttatgtgatggcttggatgcaatcccatggaaatttctcgcacctggaaggtaaggtagtcgtttttcattaatggttcattgatgcaaagttcggtttttatttcctttggacaacttccaacggccaatacttgataagcttttggatttctatccattagttatctcctacgagctattggaagctaaggttttcaattccaagttttgcattaatttgttagaaccaatttcaatggccattgaaaggtgagtttatcacctggaatgactttgagttgccaatatttggtaagcttttggctttagaccactagttatctcttacgagccattcaaaggaagtctaaggtgaataaccattgatgaaattcactaccatctgttttgtcattttaaaggattaaaacttgatttgctaaatccataccggttcgggaagcaagcatcaccatagttgcaaccccaacgcgaggagcctatcctgagatttccaatttgcataagagccaaagcatagctatcctatctttgagaaacttgttttttacaccctttcattttagtctttaatgttagcttagattagtttaaatcttcctaaaacattttcatcttcttttaaagctaacatccataagaaaatcacccattttcctaatttgaatatcacttgtgtttgcgaaaacccttcccagtgaacgatcctagaaccactatgctatagtagcttggctactttaataatagtatttaaggtataaattttgttgatacgcctttaaagctaagctaccatgagtcgcatcacatgtgctatctaacagcacaagagctttgggagaatgtaaatcagatgtattctaatttagggaatcaatcacagatctttgaattaaccctcaaacttggtgagatacgacaaggggaggacaacgtcacaaaatacttcagctccttgaagcggatctggcaagaccttgacttcttcaacacctatgagtggaaatttgcctaggatggacttcatcataagaagaccatggaagacaatcggatcttcaagttcttggctggccttaatgttgagtttgatgaggtaagggggagaatcattggaagacaacctctgccttcaattggtgaagttttttcagaagttagaagagaagagagtcggaggaatgtgatgctgggcaagaaaggacctggagttgctattaaaggttcagccttggttaccatgggtggaggctataataaagctgctgcgtttcagtgcaaatcagatgaaagaccacatgtttggtgtgatttttgcaacaaacctcgccatactcgtgagaattgttggaaaatccatgggaaacctgcaaattggaaaggaaaaacaggtgacaaaccaggctgagccattattcctactactaatgaggttgagaccaaccccttcaccactaagcaaatggagcatcttcttgcattgttaaaatccaacttgacatctggtacttctagtgtttctttggcacacataggtaatgaattatatgctctatcttgtcgttttaaatctattccatggataatcgattctaaagcatccaaccacatgaccaattcctcaaacgtgtttgaatcctattcaccgtgtcctggaaataaaaaggttcggatagctgatagtaatttctcacctattgcaggaaaaggtctaataaaaatctctgagggaatagatcttaaatctgttctccatgttcctaaacttacttgtaatctcttgtctgttagcaaattatctagagattctaattgttgtgttatcttctatgaatctcattgtatttttcaggaccagagcccggggaagacgattggtagtgctaggatgatcaatggtctctattatttcgaggataatttacctagtaataaaattgctcaaggactaagtagtattagttctctttctgttcgtgatcaaataatggtttgacattgcaaattaggtcatcctagtttctctcatttaaaacatttatttccagtgttatttcaaaaagttgaccctttatcatttcaatgagggaaaaatctgaagtcgaaaagatttttaaagaattttacaaaatgattgaaaaccaatttcaaacaaaaatcagtattttgagatttgataatgagactaagtactttaataaagttttggaaacctttttaaacgagaaagaaattttacatcaatcctcgtattttgatacccctgaatagaatgaaatagctgaacataaaaataaacacttgttagaagtagcacgagctatgatgttttacatgaatattccaaaatacttatagggggatgccatactaactgcttcatatctaatcaacaggatgcctacaaaaattttgcagtatagcactcatttggagtgcttgaaaaaggtatttccagaatctcaaattaattctgaattacccttgaaaatatttggttgccttgcatatgtacacattccaaaaaggtcaagatctaagttagacccaagagcagaaaaatgtgtttttgtaggatatactcctaataaaaagggttacaaatgttttaatccccttacaaagtgtttttacacaactatgaatgttttctttatggaaaatgtctcatattttaccaaaaatttacttcagggggagaaattagtggaaccagatttttgggaaattgttgaacctttgcctagtgtaattcttgatatctctcttgaaaaagaaaataaggaaactaaacctactgaatctgaatatgaaatcggcttatcagaagaagaaatactacgaatgaaaaaaaatagaaacaatcttgagcttgtggtttattcaaggaaaaaagtccctggaagaagtaaagattagtcgatcatcccaacacatggtcaaccaaaagccctgggcaatggctctctaaatgtctcaggtaaccctttttctattcctactcatatacatgtttcttcttcttttgttactgatctaagtttaccatcacactttggtccaagtccagaaatatctgtacccgaacccggtttaggattagccccaattgttcttgcataggaccttgaccttgatctccctattgctcttagaaagggaacccaagcctgcactaaacatcccatttccaaatatatctcctatagtaacctttttgacaactatagagcattcactacaaatatttcaaaacttgtggtacctagaaatattcaagaagcactagatgaaccgagttggaaattggcagtgtttgaggaaatgaatgccttaaaaaagaatggcacttgggaggttgtagatttactaagggaaaaaaaagttgtagggtgcaaatgggtgtttacaataaagagtaaagcaaatggaagtgttgagagatacaaagccaaacttgtggcaaagggttttactcaaacctatgggatagactaccaagagactttcgcccccgtagctaaaataaactcaattagagttttgttgtcccttgcagtaaattctaattggcccttacaccaattggatgttaaaaatgtctttcttaatggagacctagaggaggaagtgctcatgagtcctccaccaggttttgaagaaagttttggagttgggaaagtgtgcaaattgaagaagtccttatacggacttaagcagtcgcctagagcttggtttgagcactttggcaaagtaataaagcattatggatatactcaaagtcaagctgatcacacgatgttctacaaacattcaaatgaaggtaaagtagccatcttaattgtgtatgttgacgatattgtgttaactggggatgattacaatgaactagaaaagctgaagaagaaacttgctgaggaatttgagattaaggacctgggggtattaaaatactttcttgggatggggtttgctaggtctaaagaaggtatctttgtaaatcaacggaagtatgttcttgatcttcttgatgagacaggtatgttaggatgtaagcctgttgaaacacctatagagcttaatgtaaaactacaacctacaaaagccaagaatgtgaaggaccaggattgttattagagacttgttgggagattgatttacctatcccatacatgccttgacatagcattctcagtgagtatggttagtcagttgatgcatgcgcctagaccagagcattttgaagctgtttacaggattccaaggtatctaaaggggacaccaggtagaggtcttctgttcaagtcacgaggacacctacaaattgaaacctacaccgatgcagactgggctggaagcatagtggatcgaaggtccacatctgggtacagttcatttgtaggtggcaacttgattacgtggcgaagtaaaaaacacaatgtggttgctagaagtagtgctgaggctgagtttagagctgtagctcatgatatttgtgatattatgtggataagaagattactggaagagttaaagatgacaggttcatctcctatgaagttgtattgtgacaacaaggcaacaatttcagtagctcacaatccggttctccatgaccgcatcaaacatgtggaagtggacaagcattcattaaagagaagatagacaacggattggtttgtatgacctttatccctactgaggaacaagtggctgatgtctttaccaaaggactacacaagaggcaattcgattttctagttggcaagctggctatggaagatatctttaagccagcttgagggggagtgttggaaaaccgaaactgatatggaaagaaataactttgtaaaactgtaaattatttattagttgtcaatctttgtatttttaggaaagtaattgttagaagtcattctttccttttaatcagtgatttagtttcctaatttgaaggatttgtatatgctgtaaactctataaaagaataatgtcaatgaaagaaaattattcccgtgaaaccctattcttcaactcttttagattgtcttatctttttctttttgggtttgcttggaatgttacaggtaattcagccagagaagtgttgaaac

SEQ ID NO: 12967 - DNA, 1932 bp, Vitis vinifera
  Intron number 10 from transcript GSVIVT01014994001 (locus GSVIVG01014994001) derived from phytozome v7.0 (chr-ID chr 11; pos 226584 to 228515 reverse strand)
cattcctcgcctgcagtaagggctcttttgctgcttgtttccattttgcctgattgagatatttctttattaaagaatcatgttagcaaaatacatgcccatcaggtggatcactttctttgtttcattgttgattgaacatgtgactagaataacagaaaagcttcctatcagagaatgagaaaaaatactgtagcaaacttactgcaaagatttgaggaggcaagtatgacagtagataatacacttcataagatggtggtgccttgagtctacacaattatgtagtagatattggatatggttcttgttgtgaatgaagtcattgactctttgataaagggctagagtgtctgtgagttggagattgataaggcttatgatcatgttagttaagatttattgcttgtagagttaaaatggctttgctcaggatttgattggatggattagaactttcattttcatagccagattttatattggttaatggttcccagatgggtttcttccagggccttaagagggaagtggtagggggcattagaaagggcttgtttgacaatgttttaaaaaacggttctcaaaagacagtttttcagaacaatttttaaaaagagttcttaattattttcaggaacaaaattcagtttggaacttaaatgtgtaagatagttttctcaacttattcttcatgaaattattacgtataatgcaaagctttccaaagtattctccatttttttaattaattatcacaatactctacaaaaaacacttgaaaacacatcaaatttgttcaaaaaataacctattcccataacaaattctcaaaaaattatttttagttgaaaaattatcaaacatatttttttaagttagaaaactattttctattctaaagaatagataattattttcaagaatagttcccaaacaagcctaagattttttaaaaaattttgtgattagtagttaagagttgaaattacaaattattcattctattaccatttgagtgtgggagtgaggttggtgtgaaggctctttaagaaagacaacttctttgtaggggaaggagagagcagctatagagctgtagaatttaatgcttcttaagaggttggcttcttaatatagcaggtattatgggagatccttactgccaatcaactcatgaaatagggatctttggttaaatgggttctgcctttgcatgcaaatagatgaattgactattcgaagtccttattcgttctggatgtgcacaatttctggtccttatcatttgccttgttcagggtgtcttggatgttacctcattctatcaaagtatctttgcctattaatatgacaatattgtggaggaaagaaaaggctgtgacagaggctttgatggaggatggccccattgcttgtctagtgcatttggagagggtgaaatggagaatgtttaataggttggtgtgcgaagaatcagtgtcttttaatatatattttttttctcaaatctctccttgtttgattgagtgattttgtggaaatagggaatttatcttttttagattaaactaatagtgaaggttactttggctaatggtgcttcttgtatactacttggcagtaagctttatgactattgtatttgttcttttggctactggtgctacttgtatatttcttacatggtaaagtatgcgcctattgtatttgtttgcttggctatttgtgatcttatatacttctattggattaaaggtttacatatatatatatatatatatatatatataaacaaattatctgtagcttcttttgttggtggaaagtaattcttttccttgaaaaacttgttctccatcatcttgtggtaccttgatttttatttttattttcgttttctaattcaggtgagaatcttcaagcctggaa

SEQ ID NO: 12968 - DNA, 34604 bp, Vitis vinifera
  Intron number 2 from transcript GSVIVT01031591001 (locus G SVIVG01031591001) derived from phytozome v7.0 (chr-ID chr5 ; pos 18572013 to 18606616 reverse strand)
tttctgcaactcagcttctcttcttctacttctccgttttcggacgctgatcttattacccacaagaaaggcctgccgctgtgtagtaaagcatgtgcaatctcctccatttgttgctttgacaaaacacaaagtgtcccaaacgatacataaacgactgatgacttgggcttggagttcaaccaatcgatgcagttgctcggatcttggaaaatatctcctccaaaagaagaatcagatggatcgtttgcatccaagaaagcagatgggaccaaaggtccaattccaatcaatttaaccttatccacagctcgtagcgcctcggcctccagtgcgtcgaaggtgttcaccagcactttggggttcgtctcttgccttagtgcctccatgtcctcttgaaatgctgggatccatgaagcatatatgtttgaagagagaaaaaaggacggaatatcacggctagacagtagcattggaagccccggtaactcaattggatctgaaccctcattgctgcagtttccaaccacatcaccatagccatcgaagtaatgatggaatatgatgaaaacagtggcgctctgaatccaaagtagcgcagacggaagctgaaggctacgcgccagctctgccgcccaagcaaggagcatggtgtgcactaagcaagtaactggtcggccttggtcagagcttattgcagtgatccgcctgagggtttctgatccgcaacgcttgatctcggacaaatagtgttgggcatgatcttcgagcttgatcccatcatcatagccatcggagaagggaactagggttaaaccggggagggttggacctttgggcatgcggcgatgagcggagacggagacggcgaaggtgacgtgggcgccggttctgatcaggcgcttggcgaattggagggctgggttgatgtggccttgcagtggaagtgatataatgaggaagtggtgctgccccattgctgtgactgaggattgtgtttgtgtggccggtgagttgcatgggtgatgtatataatgatttgagggaacaacaacaccgactacaatgacaactacaaggcttccccatttcatttttagaatattaaaattatttttataaatatttttttttctctttagtgttaggctgtgagttcacccaatgtttgatgatctttgtattttcattatttctatttttggaataatattttatgatttttttttcagtttttttaaatataacttctaaaattatttacttaaaaaaattaattacaaatctatttttttattgaaatgttctaatcttttggtttaagtagtatgttaattttttatttattaacttttttaaataactatttaatgtgatttatgttaaattattatgaatgaaatttgaagaaaatgtagattctaattatttgattttttattatttgtaaatttaattaatcattttgagtttcattattcaaaattattttattaatttaatataatatatttttatgatatcataatatattacttattgaaaaataatatattacttaattattattattattattataatgaacctctttcatgtttttttttttttgaagagtaacccatttttaactcgtgtcaagcagcatatggctaacccatctagtatttgctactaacaagaccaggttagagctttgcttcgggacatgctcctcgcatcaatcttgtcacaacctcttgttcctcatgccaatcttgtcgtcgccctttgttcctcataccagtcttgtcgccaccccttattccttgtattagtcttgttgcaacccttggtgtctatgtcatatgagtcagagtgcaagccaatacgttggcttcgggaccacatatgttcagatttctcagatcgactagtaggggtctcaggtaatccaagctttgatttttcgagggcatcctaccccaatgggcgacccatggtggttgtctcctaggtgagctttatttgttctaggaagatttgatctggtgaagtggtgtcattctcttttggttagaagtttaccgacctagttctgagaaccagtccattcgaaaggatctatcccgatcacgcaattctggttacccttttggcgaaggcgttagttctaaactggggggtactagccactcgaatgagtgggtggacccgtgggttggccaccaattaagccttgtacctcttataccccatttcacagtcaagaaagctaggaaaagtgctagtagggcgttacttaggcacaaaacctatttactagctctacgtagaggatcataggccaaacacacgttgcttggagggtgcaacgcttagggaatcacatagaatggcaccatgatggcagacaccaaacttgattggcgtgttacatcaaatgattgtgcagcacctcctctttctcttatgagggaacttttagggtacccaagcatatttttactttatgcctataatcgcctctgcaaattgcgatttgggagccttggattttgttctattgtggtactggtattggtgactatgttgaaagtaagtcccataactttttcttgcacttttttttttgttggttagtacacattgcacatttttcttcccttctttgttggtcttggggaggtgttgactaaaactctataggtagtggggttttttgggttcgtgcaaggcgttttctcccttacccgagtggatgtggatgggggtgggtcaacgtcgtcttaccccttagctctagttatgttagtgttccacagtggtggtcttatatcatgtgtgttgctaagtagtcccatagcttccaaggatgtcatcagattccaagaatcaggatagtaaggagcaaccccttattgatcgtcaattttgagtaaccttgtcgagcttaattgctcgcaagtgtgtcaatccacgtagggttgtcaagccattgcgttctaggagggtttcttttatggaagagtttcatgcttattatgatattttgaatgatgtgagggttgttttcccagaaaatctcgacgacttgagatctacattgagctcctcttacggggagattttctttacctgggaacaattccgggtaaggcttcaattgtcgttgcccttctacagtgaggtaatttttgcaccatattgagatgcaccccgtgcacatgtactcaaacattgtgtgtgtacttatgggttgtgcggtattgaataggttatatgtccttcattgcttgaagtactattcatgtatatagtttgattaggtgttgtcggtcggttcaccttatcggcatagtgtcgcactttctagtttgtgatagagttaccaaattttggtaaggaacggctgaaagggaacgtgctcatttccagggcttgggagatgatccttagtgatcccaataaggagttcggggttcatcggtcaattgtctatttgggtattattaccacatcgacatgtcctttattcatttgttactttttatttatttttttctaatggtgggtttattgcagaagatgataaatgaaggcaccttgtcaagtgggtggagaaggcatcttttgtttgtatatgctggctgctaaacattgagccgactcaaaggacttcttaggtgttgctaacttctttgaacttgcttgacatccaaagacatccagaatgattcgttcgagtcgatctgcccaggaaggtgctccgtccacaagtgcgaggtgagcactttataataaaggacatagagaattaggagaaggctcatgcacatgaattggaggcgcgctaaaagctcctagctaaaagagatcgaaagaggcaagaaggtatgctctgacagacacaggctcagcgggcaacttatacaaaattactttagtaagcctcgggatcccttcaagtggcgcaatcatcaagcaggccagcaacttcttaactagttagccccatactcgaacagatgaggccaaaatctattatttctagggcaaaccaaagtcgaaaaaagagaaaggtggtcgctcctcaagagggtttgacaacctcttaaggtgatactcctggggacaattctatgcactacccgacaataagatattggacccgcctcgccgatctgaagaggttcaccaaacccactcaatgattgtgaccttggcagttggggatcttattgcacaagttcaatcggattcctcattgatcccgtctatggtggctctactattgagagtttttgccttttaagatgtgtttattgctataccataattctccactcgagatttgagtgtgttggtaaggttttcttttaattttattcagtgctctctaattcctatcatgcttttagtttattgcacctcccttcctttttttttttttttttttttgtcatttgtagatgaagtatggtattggggatttcgagaggcgtgagaatgatctttgcgactacatttctgacatagatcagttgaagcataccttcatagaactagaaagtgatgcccaagacctcaccaaaatgctttaggcgatggaaactgagaaaccgaaaatgaaaaagacactggaggagcagaactgaaagctctagtctgaactggacatgtcaaatcaagaacactcccggctagagaagggtggtggtacttcatgaaaaattagagaaggcttccatagaattgaaggaacttgtttcttagtacaccgataaggtagatcatgcttacgagttgggctatgaacgcaacctgaaaaagcacaatatttagaacaattaggatactgatgacaatggtgatgttggggatgacggtgccatcaaggaggtttcggttaggactattgaagttggggcttctagggctgatggagatgtgtgacttgggtttgtagtattttttggacatgttttagtggactatttttggtttcctattttggatgttcttattgccatgtgagttgtattgaaattcaaactttgttcttcgctacttcccatgttggatgcgtttttgttaatttctaaggttcattgtccgagtgtaatttttgtatgtgagtccaattgcttttgtgaatttttggggttcccaagccgaatgctttttcccagcattaaggggatagggtcgaatgttttctcattcgactatctaggcattgcttgttttgtgtatcctaggctttttagcacttcttggctaaatgtttttatgcatcataggctctttaggggcttggctttggttgggtgcatcttggtgcatcttaggcttttttaggcatttggcttggtcggatacttttggctcatttgaggcttttttaggcacttggcttggctggatgctcttggcacatcttaggcttcctaggcacttggcttagccgaatgctctttacccaccttaggctcttttaggcactttcttgtctgatgcttttggcacatcttaggtttttttaggcacttgggttggttggatgctcttagtgcatcttaggtttctaaggcacttgtctttgtcaaatgctcttaacacaccttatgctcttttaagcacttgcttggttagatgcttttggcgtatcttagactttttaaggcacttggcttgaccaaatgctttttttttcttaagttgtcttcattagataaaaactaaagtacattttaaggacatggagtttatgttcaaaaacagctttcatggacaaaatttctttaagtgaagtacatttcaaggacttagaagggccttgctatccaatgcttccaagtgataagcgtcattaggcccgactcatgtcacttggtagggtccttcccagttagggccaagtttgccatctctcgacttttttgtatttttgaaaacatactggagtatgagatccctaagatgaaattttcgactccaaacccttctgttgtattacgccatgacccgttggtggtaagcaggcattttatggtcatctcatcccaccttttgttggttaggtccaaagcaaactcgattaaggctaaatgggtgtttgcgtctactaaagttgtatgttttatgggtagaccaatttcggttggaatgacggcctccattccaaaggctatagaaaatgacgattctccaattagtctcttttgagttgtctggtaggcccataaaacactcaggaactctttgactcaattttctttggccttctctaaccatttttttagacagtctaatatggtcttgttggtggcttcagtttggtcgttgttttacgagaagcgttgtgtagagtagaagttcctgatgttaaggtcagtgcaaaactggcaaaaaatacaattgtcgaattggatgccattgccagatactagtgcttgggggatgttgaatcggcaaacaattgttcaatacacaaagtttcgtatgttagtgtccttgatggaagcataagtctccgccttaacccacttaaataaataatatgtgtctaccaagaggaaatgtttctgagcgagcatcataggtagcagtccaacaatgttaagtccctattgcgcgaacaaccaatggctcacaatggatgtaagctatttgattataaggtgacataccagcacatatcgtttgcacttatctcatttttcaacatgtgcggcaacgtctttgtggatggttagccaatagtacctcttggatagtatcttatgagctaaagatcgtcccccactatgactaccacactatctttcatggattttgacaagtatttagcttcatcattctatacgcagttaagatatgggttgtcataagagcgcctatacaaatggtcattgattaggcataagcatgtggccttcacctagagcctatgggcttctttgtcatatttcgggaacatgtcatcttttaggtactcgacatacgagttcatccaggaattggcgggagcgtcgagtgtattcatcggttcctccatttccataaaagaatattcttccaaaaactcaatcgggaatgcttgactctacttatttaaataggaggaacccaggtcatcgttggatgttgggaaacctaagttgatggattgttctagttcatctccaataggggacttgaggacaactctgaatccagttcctttcttttttgaagaaccgcctacgtaaataatccatgtcccactgttcttgttgctctcggtttccaagctctcacatcccaaaagttcgatgatgaaatctgctaatacttagtctttgaggctatgtcgcggcctatacctagattgatggcccacttaaccagctgattggagatatccgacttgtacaacacgacctacataggccgatccataaggacgacatggtgtgcgcttagaaatatagcctaagcttattagccacaatgtgcaatgctagggccacattttcaagcttaaagtattaggtctttgcattgaggagagttttgttgacaaagtataccgactgttgggtaccttattcatctgaacaaactaaggtagaacttaccaccatacttgtaatcgttaagtatacatacaatttttcgctttcacatagttggctaagaacgggaagagagccagatagcttttgatggtagtgaaggcctaatagcactgctcatcccactcgaacttttttttcttccttagcacttcgaagaaaggtaacaacttgtcggtcgtctattttcccgttaaccgttggacctatttaactattatggggggaaccatttcttgtaggctctgatttgctcttagctagcttttatcccgcgcttcatcactaagtagccaagaaatatggtcatctacactccaaatgcacaattttctagattcaatgtcatgtcatttatgctaagtaaagtgaaagcttttgcaatgtcctaaaggtagttctactttagcttacgtttgatcaacatgtcgtcgatgtagaattctatgttttgtcctaacaaatgttgaaatatcttcgtcaccaatcgctgataggttgctccgacattcttgaggctaaacgacattacgtcataacataataagccccaactagtaatgaaagtcattttctccgcatatggaaggtatattggtatctgattgtactcgaaaaaggcatccaaaaagaagaaaagctcatggtctattgtgacatcaatgatttggtctatccagtagagaagaaaactattttttgagaaagcttcattaagattagtgaagtcaatgcacacacgtcatttactatttttcttcgggaccatgaaaacattggccaaccattttgggtactgcacctcctgaataaatctagcttcgagcaactggtctatttcctccacaatgatcttatgtcattcttcataaaatctatgcaatttttgtctaatcaagcaccatcctccattcacattcaagtggtggcaagctattgagaggtgaatcccctctaagtcgaagtgttttcatgctaagacatttgcattttgccttagcaactaagtgaacctgttcttttcctcttcctacaatatttcctccaaaaacactttatggaggactcgtcaaatagattgatggtaattagcggctcaatggccaaggactcccgcttgttcgatttcaggttggaatcctttggtagttcctattttttccccctggaacccccccttatcctttgcctgtactggggattagaaacatcaccatttgctagtatcgtcgtgatgtcgtctgatctttgtaaatgtctatttgctcttgagtcatcaagtaactcactttctggtggtacatcgatagtatggccttcatctcatgaatctaaggcctatcgaggattgcattgtatggagaaggatcctctacgaccgagaatttcaccatcatgatgaagagtcctatagagacgaaaaacatgatgtcataaagggaaatggtggttgagctattgaagctcatcaaagccctccctggactttccaacgcatgcatcgaaaggttgatctacttgtaggtagatatatgtacaaagtccagaaaacttccttggtcaatcactatataacacacatcttatttggcaatgttcaacgttaagatgaagacattttcatgtggttgagtgacacagagtaggtttgctttggaaaatacaatggtttcgtccattggaactaggctttcgatgacaaatatgactcccacattgcaaatctgggtcacacgttttgcatcttttatcaatgttttagcatgtcattttctttttccattgactatcgattggtctctcgggtatgacatggatcacttttctagcttcaacgccaattctagaggcaaaagtatcttggaaggcgagagaagtttatgttcgattgtggagatacttgctgagttgatcggcttgcaccatctattcgaccaagaaatgaaggtggtggcactcttcgatagcatgacccttgtccttgtggtattcacaaaagcgattttcatctctttgaattacatcccctctcataggatttagctagcgaaaaccctctagattctgaatcattgagaacaattggctataatagagagtgagctttgtaaaatgaggtgtcgacttgtcttcctagtgttgagctttgagtatccttcacggttggtttcttttgccttattgttgatgaagtctgagaaaacaaaggctatgtttagttaagaaaaacacccaaaaggggggagggggggtgaattgggtttttaaaatcttttcaatcacaacaaaattaaacaaaatataaacaaagtaaagagatagagttgagagaattcaaactcgggtttatagtggttcggcacttccttgcctacgtccactctcctcaaccttctaaccgagtgagggttccactaacttgaagcttcaaccaagcttccaatcttcttacacttggattccggctccaatgagctcttacacaacctcttcaagattcaaccctcttaaaggctttaacacttagattgttacaaaatatactcactcaacctagcttaaagatggctcaaatacaaggcaaagctaggatgacaataagagtgcactaaaggatatgcaagtggtgatttaatgcacttatgaaagaaatgagagctttttgatcaagaacaagtaggtgggctttgaatgcaagttttctcttatcaataaatgaagtggagctctcaatttataggtttctaagctcgggattcaaaatcagcaaaaggcaacctcgtctagtcgagctaggggttgaccggttcactagccgttggagcatttaatgtatgacaggttaccgttgcctcaaccggacctcaaccggttttcgaccggacctcgaccggtaaagaaatcacctcgaccgggaagagaaggctactgggagagagagagaaggtttttaaccttcctcgatcggtccttgatcggacaacccaaaccggtcgaccggttcctcaacctgttgaccggttggccttagcctcgactggttgagcctttttggcctcgagaaacctattttttgattcctttcttttctaacacttaggcaaggtctttaggtaaattattaagccaattttgaaacattttttctaaggtaaattagttaaaaactcgggttttaatgaagtcgacgttttaaagaataaaccaagttttctaagatgcatgaaaacgtatgaaagtcctaagtgcactcatgcattcatcttacattagtttcctatgatctcaagtcttccaagcgtctcgatcttatatccatttggtcctttgatgatttttcgagtttatacctaagattcttaaacattaaaccaattagttacttaaccatggtttgttatcatcaaaacccgattaggagaatccttgggctaacaatctccccctttttgatgatgacaaacttggttatctaggagagaaagaaatctccccctcaaaccaatcatggatcaatcaaacgataagcaatgtaaaccatgaaaaatcaatggataaaaatatcatatcatatataaaaggaaatctcacatgtacaataagatagagatgaaaatgataacatgtgacatgcatgagagtctcctagatcctatagatcctagatcctataaatatctccccctttggcaacataaaaaagaaacgaagggggatgtctaaaaagcctcaaggctaaggaggtggaggaggagacacagagcggagatatgccatcatctcctcatgctgactcgcctgacgactctcaatacgatccatgcgctgctcgagatggtcgaaggtagcctgctgttgatccatacactcctttatgcgctcaaatcgctgttggaagtgatcaaaccaagaggtgactccagtctgatactgatcgagatgctcctccatagagtagaagtgggagtcatagactagggcaatctcctccatacgagtcccaagagagctgatctgcgcggagagatccatccaaggcgtatgatcaggaacatgaggtgcctgagatggtagctcggtaaatgatggctgagatgaagggcctgctgtgaaagacggctcagtcatcataggctcggagaaggtagcctcaacatgaatgccctctgactgatgtggaggcggaatgtcaaactcgggccctttctgctcaaagtccctctgagggtccaacccatcctccatctctctaatctcggcctcctcctctactccggggtgtatttgatcatgtccccgggcctatcgctcggctttcctaaccaaggagccattgggtgccttctcgaacttcatgcgtcccagagactgctcatcatacgtgtcataggtggtgggggcctcaaaatctgtctctctactcaagtcgacctcgaaatccttgaaagcactggtaagaaagcggccttaggggagtactcatgtcgacctctcaacacaggagatcatatgcatcatcataaggtagccaacatgaatccgtctcccggtgaggatcgagtcaacaatgaaagcctcgaggtaggagacctcgtctcgatgtcctccacgtggcaagagaatcgaacaaatcatatggtgaaggactcggctagtcactgtcaagctgtgagccgatggtttgcccatcccctaaggatcagcaagtccgcacaacctctgaacagcctctctaggctcaaatcccggcacagtgggccacgccttggcctcataaacatggagtccaaccgaagggatgtcgagaatgcggcagatgctctcgggactcaaacggatctcaacacctctcacagtggataatacgggtcctccaagctcgtaggtcgctcgagaatagaaagtccgcaccagagtcgggaagaccggctcagagatcttcactaagggcagccatcccatccgtccgaatagcccctcaaacccgaagtgctgaagttgggagaaattgacacttctccttgggatgactttcctctgagcaaatttttgcttctagcgctgatagtcctcattcgaactgaagagtgctgtgtcaaacctcgcctttcagcgagcctccatctgcttgggctgagatggctcaacagggcgcttgccctgagccttggaagtgcccgtctctctccgtggtgccatccaatgaaacaaaaggggaaaaaggagcccaaagagagaaagaaagcaaaaaggaagaagcagccctgagacgcgcggtgcagagagaagacgctctcaagaggtgaaaccctgggttccaaaccaaaaccctagcgcaaatccgtccaaaaatcaagtcttcaacctgcaatcggtcagaaatttggtcaaaaaatcttcgggaagcaatgatatgaagggacggcaagctctgaaggagaaaatgggagaaatgaagcgtgtaggggggcgttttaaattctcagccccgaagaactggtcgaccggttcctcaaccggtcgaccgtctagtcaacggtcaacggtcaaaggtcaacgacatgatcaacggtcaatttttccaatttttcttgcattttcttgtcttgtgatcctccccctgctcttttcagttgaaatccccaattttttatgtccaatgccacgggaattttgatttttggtcaaaatttgacctctttcctatgattatttctatatgatgcatatgatatgaatttcacgcaatcatagggtatattcaagagtaatatcaacaagaattcatcaagcaatcatttgatcataaagaaatcacccctagttgtcttctaatatcaacaaattgttcttcacttaggggttttgtaaaaatatcggcaagttgatcttttgtgcttacaaattcaagtgtaatctcacccttttgtgcatggtctctaagaaaatgatgtcttatctctatatgcttagtcctagagtgttgcaccggattctttgaaatatttatggcactagtgttatcacattttataggaacatgctcaaaaatcaaattgaaatcactaagtgtttgttttatccaaaggatttgtgcacaacataaaccgattgctatgtattcggtttctgccgtagacaaggctaccgaattttgcttcttactatgccatgaaacaagtgagtgtcctaggaaatgacaagtgccactagtgcttttcctctcaactttaccaccggcaaagtcggcatctgagtatccaattaattcaaagttatcacccttaggataccataggcctatgtccatagttccttttaaatatctaaggattcgttttacaacacttaaatgagattccttagggcaagattgaaatctagcacacaagcatacactatacatgatgtcggctctactagcggtcaagtatagcaaagaacctatcatgcctctatacatagttgagttgatgggcttacctttctcatccatgtcaagcgtgatggatgaactcattggagtcttcattgttttggcttcctccatattgaaccttttgaggagatcccttatatacttggcttgatggatgaaggttccttcctttagttgcttgatttgaagtccaaggaagaagttaagttctcccatcatgctcatttcaaactcactatgcatgcatttggagaattcttcacaaagagaaacattagtagctccaaaaatgatatcatcaacgtatatttgaactaattgcatgtcattatctttggcttttatgaaaagagttgtgtcaatttttcccattttaaaaccctttttcaaaagaaatttactcaatctttcataccatgctctaggtgcttgtttcaaaccataaagtgcctttttaagtctaaaaacatgattaggaaagttaaaactttgaaaaccgggtggttgttcaacatatacctcttcatttataaagtcatttaagaaagcacttttcacatccatttgatataaaacaaagtctttaaaacatgcaaaggcaagtagcatcctaatggcttccaatctagctacgagagcaaaggtttcttcataatctatcccttcttcttgattaaaaccttgggctaccaatcttgctttattccttataattatgccattttcttccattttgtttctaaagacccatctagttccaataacactttgattttgaggtcttggcactaattcccatacttcacttctttcaaattggtttaactcttcttgcatggcaatcatccaattttcatcaactagagcatctttcatatttttaggttcaatttgagagataaaagcaagattattgcaaatatttctaagggatgatctaattcttaccccattagatggattacctataatttgatcttgtgggtggttgatgacaaacttccaatttttagggaggtcttggcttgattcaccttgcacttgttgaggaggaggtagtgccaaaggtgatttctctttcttgggatcctctacaacttcttcttgttgccttctatcttcaatttgtaatttttccatggaggtctctaagcctagatcatcatcaaagctctctctttcttggagagaattgttagattcataaaaaataacatggatggactcctcaactaccatggttcttttgttaaaaactctaaaagctttacttgaagttgagtaaccaagaaaaattccaacatccgattttgcatcaaattttccaagattgtttttggtgtttaatataaagcatttgcacccaaagactttgaaatagctaatgttgggtttcttgtttttccaaagctcatagggagttttcttaagaataggctttaataaaattctatttaaaacataacaagaagtgttaacgactttggcccaaaattattttggtaaattgttttcatttagcatggttctagccatttcttgaagagttctatttttcctttcaactaccccattttgttgaggagttctaggagccgaaaagttgtggttaataccatgctcattgcaatagtcttcaaaatcaatattttcaaattctcttccatgatcacttcttatacaagtaattgtaaaacctttttcattttgaaccttgttgcaaaactttgaaaactcataaaaggcttcattcttttgacttaaaaataagacccaagtgtatttagagaagtcatccacaataacaaaagcataagattttcctccaaggtttggtgtcctaaagggaccaaataaatccatatgcaacaattcaagaggtctagttgttgaaatgaaatttttgtttttaaaagagtttttgatttgctttcccattcgataagcttcacaaactttgtctttttgaaaatttattttgggaaggcctctaacaagttcatctttgttgagttgggaaatgaggtccatgttagcatgtcccaacctcctatgccacaaccaactttgatcatgcatgcttgaaaagcatctatcatggtcatcatattttgaaatatttattgcataaacattatcacatctatggcccatgaagatggttttatcattttgaatatctttgatgatgcaatgagatgcttaaaaaatcactttaaaacctttgtcacaaagttgacttatgctcaaaagattatgttttaaaccatcaactaataaaacactttcaataagagaagatgtgtcattaccaatgttgccttgaccaatgatctttccttttgaattgtctccaaaggtaacgtatcctccctttctttttgtaaggaaagcgaacttggattcatccccggtcatgtgccttgagcatccactatccaagaaccacttatccttcattgatcccttcaaaataaaattcaagttgatttaggtacccatatatttttgggtccttgagggttagtgaccttggatttttcaacccaaacctttttagctttagcattagaaatcttttgagtaccatttcttaagggacatgtactactaatgtgccctcctcttccacaaaagttgcaagtggtggaaggacttgcacttgcggattcttttacaaagtagtttttaaaatacttttgattttttgatgatttgaatcctagcccttgtttgtcaaagacacatttttggctagctaagatcatttcaaaagatttttgtccacaagagaaaattgaaagagaggaggttaaacagtcatttttctttttcaaaatctcattttcactccttaaaatctcattttccttttcaagatgagttttagataattcatcaattgaaaacttttctttcacttcttcaagttccttttcaagatcttgaattttctttttaagagaattatttttcaaactaagtttttcaaaatcctcatataaaccttcaaaaacatcatgcatatcttcatcactaaagttagagtttacctcatcaagatcatctattgccatgaagcacatgtttgccacttccttctcattttcttctttggaggattcttcactttcactctaagtggacatcattgtcttcttcattcttctcttggcttcactcttgtagagagaacaatcatatttgatgtgtcccgactttttgcacttgaagcatgtcaattctctcttctcttcccatttctccttgtcaccatgggatgaagattcctttttagaaggatcctttctagaggtgaatttccttcctctaaacctttcacatctcatgaatttattgagttttcttgtgatgagggctaaatcatcatcttcatcacttggcttttcttcttcaacattttcttcttccttggttgtagctttaagggctatgctctttttcttttcgtcttcaccctcttgtagcttctttgtcaaattgatctcatatgtcattaatgaccctatgagctcttccataggtagcttagtcaagtcttttgcttcttgaattgtggtgaccttggtatgccactttgatgggagagacctcaatatcttcatcaccttctcggattccttataggtttttcccaaagcttcaagaccattgacaatgtcggtgaacctagtaatcatctcaacaatagtctcagtttctttcattgaaaacaattcataattatgaacaagtaaattgatttttgactctttcacttgattagttcctttatgagttatttcaagcaacctctaaatttatttagccgatttgcattgacatattctattatattcatttctatccatagcacattgtaaagtaaaaacgactttagcatttaattgaaagtttcttccatcaagctcattccattcttgtttgggttttggaaccaaaacaccatccactagtttagtgggaaaagttgggccatcttcaatgacatcccatacatctaaatcagtagattgcaaataccaagtcattctagttttctaatagggatagttgattctcgtaaagaatggagctctatgttttgaaaaatttcagcttgggatgagcttgatggaatagccatttccttttagacaattaagtcttaaaagaagaagtctagctctgataccaattgagaaaacaaaggctatgtttagttaagaaaaacacccaaaagggggggggggggggggattgagtttttaaaatcttttcaatcacaacaaaattaaacaaaatataaacaaagtaaagagatagagttgagagaattcaaattcgggtttatagtggttcgacacttccttgcctacgtccactctcctcaacctcctaaccgagtgagggttccactaacttgaagcttcaaccaagcttccaatcttcttacacttggattccggctccaatgggctcttacacaacctcttcagattcaaccctcttgaaggctttaacactcagattgttacaaagtatactcactcaacctagcttaaagatggctcaaatacaaggcaaagctaggatgacaacaagagtgcactaaaggatatgcaagtggtgatttaatgcacttatgaaagaaatgagagctttttgatcaagaacaggtaggtgggctttgaatgcaagtgttctcttatcaataaatgaagtggagctctcaatttataggtttctaagctcgggattcaaaatcagcaaaaggcaacctcgtccggtcgagctaggggttgaccggttcactagctgttggagcatttaatgtatgacaggttaccgttgcctcaaccggacctcaaccggttctcgaccggacctcgaccgataaaggaatcacctcgactgggaagagaaggctattgggggagagagaaggtttttaaccttcctcgaccggacaacccaaaccggttgaccggttcctcaacctgttgaccggttggccttagcctcgactggttgagcctttttggccccgagaaacctattttttgattcctttcttttctaacacttaggcaaggtctttaagtaaattattaagccaattttgaaacattttgcctaaggtaaattagttaaaaactcgggttttaatgaagtcgatgttttaaagaataaaccgagttttctaagttgcatgaaaacgtatgaaagtcttaagtgcactcatgcattcatcttacattagtttcctatgatctcaagtctttcaagtgtctcgatcttatatccatttggtcctttgatgatttttcgagtttatacctaagattattaaacattaaaccaattagttacttatccatggtttgttatcatcaaaacccgattaggagaacccttgggctaacaaagtccttcgatgggctggttatgttcgctctatcgggaagtaatcgtcatagatgtcgcaacaatttgctaggatgccgctttgagatcctcttttagcatggtgtacttggtggttctccggaagacactacaacaaatataatgtttcacaacaaatgtttttacaacaaagagttaaatttttttggcaaatattttttgccacaaaaaacattcgtcgcaaaataattgcaacaagtccgtcactaaaatgttttaccaacaaataaaattttttgtcactaaaagtaaattttagcaatgaataatatttgtggcaaaaaaaaaaactattcatgataaaaaaaaaatctctatcttgagaaaagttttgtggcaaaaagtctcttttaacaacgaatgttattttatgggaacataatatctttagtgacaaatttatgtttgtggtaaaaatgctatgataatattttatttttcattttttatggaggttaggagcatgagtatccatttctagaaacatgatgacacccccacacctatttcaagcctagggaaggatattttggcctcctaataattcttatattaaactataatcattgggattcgaactcatgacccttcactttatcaccattctttgaagagactttcaccatattttctataaatcaatcgatgtttaaagaaaaataacaaatttttaattaggttcaacattatttctttctttatactaatctcaaattacgattattttttatgctctatcaataaacgagtacaaacttgaaaaaaaaaattaaagatttcaaaacaaactttataaattatcaatacttatttgcataattattcttgaaaaaatattcaaagatagaattttaaaaataaaaaataaaaactaaaaaaaaattatataattatttagactaaaatataataaaaatcgaaactcttagtaaagaaatctttgaaaaaaacatatttaatagtgatgtaaattaaaaaattaaaagaaaaaaaaagtctacattaaagccgagagtctattttttattttcacaatcttattttatttgattcattatatttttaattaataagtaaatttctttccatgaaaattttaaaataaaatttagacttcaaaatgtctatatttttattaaatttttataaatttcatctatatattaaaaattataattgttaaactcacataaaaatataaaatgactttttttcactttttatcaaacatcaaacttttttatgttttaagaaaaaaattatttttataataaaggactattttgtataattatttaatagttctatttaatatttaatttattatataaaaagtggtgcatatataattaaaataaaaagtaattttctacctctaattagattgtgaaaaaaaaaatttgaacaaaaattgaaatttctaagtcatttcttatattttttttttattaaaaataatttcatattaaaaagtaaagttcacagcagaatgtcaaatgtcatgtgagaattatttttaccataattttaaagatgaaatgtaaatttgtggctaaaaaaatgatattttctacaaataattttgaggcataaagttgaattattcccaccatacttttagcaacaaaattaacttcatatcaacaagtaatattttaccatgaataattttgtggcaaaaaatgagtttatggtaaaatgttatatattttgtaagaattatttgggtcatatttttaatgacgaaaatgaaatatgtggctcaaagtgacattttgccacaaaatttagtttatggcaaaaaaaaaaatatatatcgtggcaaaaagcgatacttgttgtagtgagaggtcatccattgtctatggtggcttctttgatatagatttgaagagtggggccctcaagatgaaacttcatttgaaggctcgcatgatcacattggtgctgcaaggctccatttagatcaaggcttgtccaaatcttcacataaaatcccaaatggacttagactccatcattttcaaattgcttaggctactgaggccctgtttctgtctagaggagcataatggtgttccacgaacacctttgacagttctcgaaagtcattgattggattggccgcgagttgatggaaccagacaagggttgggctatataggttagtggggaatactttgcataaaagtgcattgtctcctatgtccagggtaattacttggtgataatggtcgaaatggtctatggtaccatcatacatggtgaatttaggtatcgtgaaccttgggggatgccttttttgcacgatatggggagtcaggagtgttgacaacatatcatcaagaaggtgtgtggtggttctgagcgaaactttctcgatggcctcacacaagaaaactgtttgctcagttcatggtcggttggtgtcttttgggcgataccttttggttcagccctgggcagggctgataactttgctcaaggagttctctttctagggtttggcggtcacatatcccctctcgagggtttgtggtcctaggtggatcagctcgttcgatagacccaagaggttttttttcgaaaggccaactagggcctcatcatctgtcgatggttcttggatagctgcattgagttgggctaccaatatcttgttttgtttcctcaaccgatcaacagttcttctcaactcatctagctgtctctgatactccactagctagggctcaggtgccagctattgctccatagttggcaagacaacatacgtattatcggcgtggctagctacccatgtagtcatcatggttgacctttttgttacattaccatagatgacatcaattgttgatgcacaatcgttttgaatacgaggatctaatgactattcggaggactagactagctacctttaagtgtgaccttctcttctgatatgtgcctttgcttttttacctttcctttattcttcttctccttttatagggcttccaagttatcaactgactagtcaagtaagtcaactttctcttaggggagtggtatgttaggggacagacatcaaaggttgcatggcatccacagttgggtggacggaacctattttaggcgacgcataggtgacctttccagtatttgtttctaacaaaacctgttaaagctttgctttgggacttgctccttgtatcaatcttttcgcaatcccttgtttctcatactagtcttgttgccactcctcgttccttgtatcagtcttgtcgtagcccttggtgtctatgccacataagtcagggtgtaggctagtatgttgttcttgagaccacatatgtttagattttctagattgactattaggggccctaggtgatccaagctttgatttttcaagcatcctatcccaatgggcgacccatggtggttgtctcttgggtgatctctatttatcctgggaaaattggattgggtgaggtggtgtcattctcttttggttagaggttcattgacttggttctgagaaccattacgtctagggagatctatctagatcgcgcaattctggttaccctttcaataaaggcttcagttctattgatgggggtggtaccgaccacttgaatgggtgggcagactcgtgggtggccaacaattaagcccagtatctcccaaggtatttttatcaaaatgaggccaaaaatggatgaagagatggactttcaaaattgggttttcaatgaaccttttaatcaaataacccaaaaaataaggcataaatatacataatatatatgtcaatatgttataaaataaaaaataaaaatggccatcatccatggtagggtttccaacccctcactctccgcaagccaataaggaagtggtgaacaagagaatagtaaagcacattcattcatttcaccaaattttcatattggtggtgacaggaaagcaataaaaaagagtacaatgaagcatattaattccaataatatggttcctaactaccaaaaatgaaaatggcttcttttgggtcgctaacattggaacatgccctcacgtctcaaaaattgatcctgctattttatacatttgggtatctttcaaaatatatgcatgaatccagatttaaataaatggtaaaattatagtgttcaatctctatactaacctatatattttgatttaatttatattgatttttattataaatattcttaatttttaactatttattaaaataaaagctctatttatttctatttttcttgtttaatactttttagttatttaaaccaaaggttaaaaaataaagacttaacttgaacccatctcttgcttttaatggattgtatttgataatcattctagcataggatcttttaaaatatcgacttaggtgatatttgttttttgttttaacttaattataaatagaacttaaaattaaatagtgtttaataatgttaaatatcaagttgtttgtttttataacattttatttttattaagtattaaaaagtataaaaaaattaatatgttaccttttatatttagaaaaaactaaatagtttgatttcttctattcaatcaaaaacttatattaagtcctaaaaataaattatctaaagtctaaaagcaaaatattttcaggaattttttttttataaaaaaaacaaacaaacaaacaaacactctcttactctttattgaagatttgagattgttgttcaatcaatcaaaacatcatagataagtctgaaaatattttggtaaatatgagttagtttttgaaatggtatgggttagatcagaaacttaaaattaagctaaaatgtttttaaacaatttttgaaaacttgtagtaatgctcaagcgctcaccaaagctctccatcattaaagccaacattcaagcacttatttaagtgctcaagtggtgactaagtttgcttgaacattgtttcaaaatccactagattctaggagtttgttgtttgaaaatttgagattttattttatttttaataagattttgtttccaatcctctatgtccttgagcttatgtatgctctacataaatgtgttttaaacttggatgtccttattttgaaaaaccctaatttgctctaccattcccaaaagctctcaaagatttgttaaacgaattttggattattggagaaacttgcatcaccataagagttgagatgaatccatttaagcactcaaggtgctgcatcaacatgtatcatgatatatgtattgaagagtaagttttaagtagtgtttgtttaggtaaaaccgtgtattacgatttcatatagtaaattattgatttgagatcttaagctccatgatttttcatcttcacactttgtgtggagggttttctacataaaattttgtccccctattattgattgttttataaattattcattctcaagaaatcaattaaattaaaattttcaactcttgtattaaaatatttaaaaatcactcattaaccccctgcacattttacaagttaggtttttcaactaattccttttctattgtaacttttaataaaaattctccacttatccttctttatgacttgaacgtgagtactccttttaaaacaaaagaattatgaaattattttcaatattttttagtgcttaactcaagatgaagatccaactgctttgtagaatattctatcaaattttttaataaaattattaaatctctgaaattaggtaagcagatgattgggcaataaatgatatgtacagttgtaaaaccgccattgggccataaaaaacttatccatagcctacctctgtgccactaaaaatgactctttagctgtactaaaactaaatatgataaaattataatactaatgaaattcaaatgaataataatgaaatgctaatgaagtgtgaatgaaattaataataaaattttatttcactctttaatacatgatatttcttcttaataattaaatataataattctcctatttaacaaaataaaaaatagtaacacacttttatttatatttaatataataatattgaaaataaaataatgaaatattaatgcatttatgttttatatttaatataataatattaaagataaaagaataaaatattttaaaattttaaattatttaaatataattttaacttcttcatgttattttgaattataataatacataaattatatatttgcgacataatgataataattggattataatttaattatgatcaaagattaatagtcggtttggaaatgattttattaagtgtttttacccatttttaatacttaaagaaataaaaaaaatagtattataaatgttagaaacgctttttaaaatcactatcaaactgctattgaaaaacttatttgatagtgattttaggaagtatttttatcttttttaattttaaaaaataatttttttcataataatttggaagtgttagttaaaaagattaaaaatattggaattctacatcatgaatagtaatttttgtttttgtttttttggcaaaaatcaaatggttccaaaaactagaaaaaaaaaaccattaaaattcacaacacatggattaactcaataaggcatgtcattaaacaaatcagcaacaactcaatatgaacatggagatttcacatggaaaaaaacccccaaaatggaggtaaaattaataaaataaaataaaatatattcaccaatccaccatgtaaagtggaaaagcaatggtcccaggggtctttttccctggacatgtatcataaagagatgatagtacagaacagcaattgttttcttctcatgcttattggagtctgcccttgactttactgggttctatcaaaaactctcttatctctggcatagctgacaagtacaggtcatttcatgtggatcccaatctcacaatcaactactgcaactttgaatgatgtcaaaggagagagagagagagagagcatcgttggaactgatatagctggcatcctggcaaccgtggaagagatgaagagatctagagagagagagagagagagcacgtttattattgggagaattgtgctcctcctattaccttgtaaggatatgacaatggacaaaaatactcatttcatgtggatcccaatctcacaatcaactactgcaactttgaatgatgtcgaaggagagaaagagagcatcgttggaactgatatagctggcagcctggcaaccgtggaagagatgaagagatctagagagagagcacgtttattattgggagaattgtgctcctcctattaccttgtgagaattgtactcctcctattaccttgtaaggatatgacaatggacaaaaatactcatttcatgtggatcccaatctcacaatcaactgatgcaactttgaatgatgtcgaaggagagagagagagagcatcgttggaactgatatagctggcagcctggcaaccgtggaagagatgaagagatctagagagagagagagagagagagcacgtttattattgggagaattgtgctcctcctattaccttgtaaggatatgacaatggacaaaaatactcatttcacttaccacataataaattgttcgggctcgtgtggtgatcacgggaactagtatttattccaccactctcccttattcaaccatttttaaaattttattatttttaaaattcttttataaataattaaaaatcaacattattttttatttttaaattataaataaacaaaaattacattaataattcaaaaaccatttttaaaaatacccttttaaaaaacatgttaatttaaatgaataaaatctatcttttatattttaagagtaaataatttaatgattaaaacactattaaaataaacatattcactattttttttttatacatttaaattttctctttttgaaaatacgtttaattagaaactgaaaattgaaaatattgctttttatatgaaaataataaaaagaattatattttattcattgattattcttttttattttttttcattagttattttaataataaaataaaaaatataatatgttcataattaaacaaaggaatcaatcaattgtgtgttttttttttgtgttactatcttttacatgaaaaataattaatatattactctttttaattttattttccctattattcttttttgtgtaataaaaattctaatatatccataattaactaagtaatagattaattgtgcacattttgatctattaaagtaaattactttctaatttaatatgagatattatttataaaaaagaaataagatatgatattgtaatactcatcccacgtattttttttatatggtatatgtttattcgattatctaccccactaatgataaatatgaacataaattgggtttaatttttcctttttttcttgagtcatgataatggaaacatagttaacctaaccatatgcacatattgcattttaggtttatgaaatttgtgcacatgtacaaagtatttatactaagtgtataaagtaaatgtattaattgtacaagggtacacaagaatatcttctttgaaggaatttagctgatttttaaaaactcagttcgcatgtttccctttatcaagaatgagggacattccacataaatttcagatttagaagggtattttaatatttttaaactattaaattataatatattattcaatttaaaattaattaaaagatgatcatgttacaaaataatagattaagacaaaatctatgtaatttttataaaatagaaaaatattcaaataattgtctataaccttaaagatatttatatataaaaaaatagtttatatcatatatataatttgtaagttagataaaaaaaaaaagaataataatattttatgaggtgttttaaacatatttacttaaaaaatggatttgacaataataatttttaaccattaatttttaatattcaatttgttgagtatgattttgaaagaaataataggggaaatagtgtcaccattcaaattgggaatcgatctacctggttcaccaattaatatgtgagagaaagatgaagtgaatagagagagagaaagaaataattgaggaaatagtgtcacctctcaaattgggaatccatctacatggttactgttgagatattaggaatgctttccttatatcattatttccttgtatcattctttcctattcttagaatggtgattaccctctatatatactctgtacatgaacgaatgaaaaaatgaatgaaaaagctaccatttatcaatttgaagatggtattagagccatggaattgaaatcttggatatttttttgctatggtagttcgataacaatcaaccatcctaagacaagccctaatattgataagtcaaccttcaaatgcactcactgcaataagactgattccatcagtctggatatcccacaatttcaaagcaacgactcttggtatgaccaggaaaacaatgaggaaccgagggtttgaaccatggacctttagatcatgtttaggctatcaccactttgttattaatgataatcgtgatcaacggaagaaggattccaagaaaacctcgactgcaactgttaccgaaataaaaacaaaggctaatgttgctgagaaagcctctacattggtagccgctatagatcatggtggtaagtttttaaatacttttacacctgttattaatagtgcatggataattgattctagtgctacagatcatatgacttttgattctagacaggtttcaccccttagaccttcttcacaaaaaattgtttccacagccaatggtaacacaaccccaatcattagggaaggatccttaactcttactgatactttgaatttggattctgttttaattgttccatctctagattacaatcttttgtcagtttctcaaatcactgcagccttatcttgtattgtcattttttggcttgaattttgtgtgattaaggacatccaaacaagatagacgattggttgtggtattaagcggggaaaactctattacttggacttgcagtcaaatgattcaaataagttgcaacaagctttgatggcagatggatctgaggaggagaagaaaaagtctgaaatttggttgtggcatcgacgtctaggacatgcttcctttggttatttaaaaaaattgtttcctagtttgtttgcaaagagtgatatttctggtttccgttgtgatatttgtgaattggctaaaagtcatcatgcttctttttcgttaattttgaataaaagtctgcttccttttatggttatacattctgatgtttggggcccatccaaagtcccaactttgagtgactcacgttggtttgttacttttattgatgatgtaccagaatgacatggttatacttgatgaagaccaaagatgaagtgaacttgttattttaaaattttcataaaataattgaaactcagtacaatgcaaaggttcgggttttgcatagtgataatggtggagaatatcagagttttgatcttcaaaagtatttggaagaacatgacatcattcatcagactacttgttccaatgcaccccagcaaaatggagtcgctgaacggaaaaatcggcacttgttagaggttgttcgtgcttccttgatagcagcaaaaataccgatatcttattgaggagaagcaatcacatctgccgcatactttatcaatcgggtaccttctagctcaattaacttccaaacacctccaagctcttactaatgtcgtagttgccccaaccgtcccaaatctacctcctcatgttttttgttgcgtggcatttgtgcatctacgcaaacaccaacgcgccaagttaacttcccatgcataacaaagtgtgtttgttggatatgcattgcagaaaaagggatatcgatgttaccatcctccaactcgacaaatgtttattacaatggatgtggtgtttcatgaagatttgatgtatttttcatctgagtctgaacttcagggggagtaccataaggaaattcagactctcgattatgattatcatatctttgaggaagatgaatctggacaatctgaactagtgaaccaggaagcgggtgagttggatatgagtggtcaataatttgggtccgaagatgtcttcactgaaataccaaaccaatcgtcgtctgctaagggtgttcttaatttggaacctaatccattcatgaaacaattaccacaccgtcataataaaggtattcctaaacccacatatgaacctgaattgtctaccaaagtcaaatatcccatgagcaattacgtgtctaatcatcgtttgtctgaatcaaataagtcatttgtaaatcaattatctactgtagctattcctaacagtgtgtaggaagccttagctgatccaaggtggaaagcagccatgaatgaagagatgaaatcattgcaaaagaatgaaacatgggaactcatagaatgtccaccaaaaaagaaaccagttaggtgtcgttggatttatactgtgaagtacaaggtagatggtagtattgaacgatttaaagcaagactggtagcaaaagggtacactcaaacttatggaattgactacacagacatttgcacctgtagctaagatcaacacagttcgagtattactgtctttacctgcaaacctagattggccattacaacagttcgatgtgaaaaatgcctttctgcatggcgagttatctgaagaagtatatatggatcttctaccaggatgcatggtgtcagaaaagcaatgtcagaaggtgtgcaaattgaagaagtcattgtatgggttgaagcaatccccgagagcatggtttggaaggttcacaaaatcaatgagagcttttggctatcgtcaaagtaattcagatcacactttgttcctgaaaaagcaacatggtaagattacaacacttatagtatatgtggatgacatggtagttacaagaagtgatcctgaagaaagaaaagctttgcaaaattatctatttagagaattcgaaatgaaagatctaggtcctctgaaatactttcttgggattaaagtttctcgatcaatgattactactcaaaaagtgctatttcatagcttgtaattaactcttataaacacttttgagtagtagttatcaccttttaacccaattaacatattaaggacccttgcaatcaattctaatcaaattgtgttaagttttggtgttttgatagcttttttatcaccaaagaaatcagagattgaggagagttctttggaatccatggcaaagcaatggaaagctcagaaacatgtagaatcgaagctttgaagtcctttgccataagcaaatccggaatgcaaagagcaaaagatgtccgaacagggagtccggacacaccatcggatgacggcgaaagtcaatgatccggacaacatatccggataggatatgctatcatccgggtgtgatgttcacgagtaccgtgtgcttctccctgagggagtccggataggggcgtgcgccgacatttcacatccggaattctgtgcgccgacattttacatccggatatctcacagccggatgggagagaaggacgcttcaacttctccggatagacatatccggaccttttgataacgcttacccatagagtttttctcttagtatacagtgcaacggtgttctcctgaagcttcctgatatttccaaccgacatcttgagatattttgctttagatatttgttgtctaaatccccaaagtctccttgtaacccacctatcataggattccttagtctttaagtaagtacaaagggtgaataacctcatatatatagtttgtaattttctttacaaagatatctattatgtaataagcggaaggaagaaatataattcatagagcacttgctctgtttttccttcatataattgttttctcgttagttttctttctagccaaacaagctctgaggaattaagtttcctcagagaatgagtggctagacttttagttccttggggttaaggttgccgggaaaggttccaagtgcaagaattagtagctttgtgctttcagtcattaataaagagaaagtgtgatcctttaatgatttctatgtttttagttaacttaaaacactttcaattcacttgagccaacacttggtaaagcaagtgatcttcatccatggagatgcactagtttacctcttgcgagcttttgggaagtgacttgaaggtaggattttctagaattgccaacacttggtaagcttttagactccaaggagacatccattagttatctcttgcgagcttcagaagggaagtccaaagttaaagatcaccttgaatggcaaatgctaggtgagaggcacgagccattgcaagttgtatcagtgagagggaattagagctgaaatccatttaaaggttacatctatacaacaccggttagagaattgactatatgttaattctttaatgcgaggaaacgaaccaaatgaccggagctctgtttttgcataaggaacctcccctgtgaacctaaacctccaaggaatgtttttcttcataagtaatttccattactttctttttagttagctttaaacaaaacctcatttaaacaaagtttgtgttttatttcttaagctaaccttgaaatgaaaaagcaccaactcagctttgaattggtatcagttgtgagttgaaaacccttcccagtgaacgatcctagagccactatgctatattagctaaagctatcctaatgcatggtgatataggttataaattttgttgatcacttcctcagtcaaggagcaccagctggacatgaatcagctgagacaccaattgggtacgaatcaatcaagtgaaggaatttttctgtctcaaggaaagtatgccttagatcttttacaagagactggaatgtcgggatgtcaacctgttaatacaccaatagaagaaggtctgaaattgtgtgttgagcctaatcaagtatcaaccaataagggaaaataccagagacttgtggggagattaatgtacttagctcatacaagaccagatcttgcttatgcattgagtgtagtgagttaatacatgcataatcctggagagcaacatatgaatgcagtcatgtgtattttgaggtatttgaagaatgctcctaggaaggaattttgttcactaaaaatgttgatcatcagagtatagaagtatatactgatgctaattgggccggtgcagtggatgataaactatctacatctggttactttacctttatgggtggtaatcttgtgacatggaaaagtaagaagcaaaatgtcgtcgctcgttcaagcgcagaagcggaatttagaggtatgactctaggactttgtgaggcattatggctaagactcctcttacaagatttaggttacctatctaggcaaccaatccgattgttttgtgacaataaagacgcatgtgacattgctcataatccagtacaacatgattgtacaaagcatgttgaggtggatagattcttcattaaggaaaagttggatgataagattgtggaattgcctaagattcgatcagaagatcaattggctgatatcctcaccaaagctgtctcaagtcaagtgttctcaaaatttttagacaagttgggcatgtgtgacatctatgcaccaacttgagggggagtgttgagatattaggaatgtttttcttatatcattctttccttgtatcattctttcctattcttagaatggtgattaccctctctatatatactctgtacatgaatgaatgaaagaatgaatgaaaaaactaccatttatcaatttgaaaagttacacccattaatatgtgagagaaaaatgaagtaaagagagagagagagagaggggggggggtagggaagtagattgtttttttcgttttaacaggcttggaccaagactcatctcacctcaaaatacaa

SEQ ID NO: 12969 - DNA, 3977 bp, Vitis vinifera
  Intron number 11 from transcript GSVIVT01000563001 (locus GSVIVG01000563001) derived from phytozome v7.0 (chr-ID chr 1; pos 7036766 to 7040742 reverse strand)
gttcgctctgaaccttgtgccaattctccatcactgttaacaataccggtgataagaggaatcgttcttgatattctttgtatttgtcccacgaaaactttaagttgctgataaattaatgaaaataagtggagtatggagattaaacaccagtcctttttcctgggaaaatgacataggaaacgtgtaggctatgtttggttgattatgctttgttctcgtaaatgttttaaagaaaaatcagagggaaaaaaaataggaagaaaaggtaaaataaattaggtttttgaaattaaaaataaattagttttgaatagtttttttcccaacatttttatcgtttcttccatgaaaaatgttaaaaaaaaaaggaaatttatttcatggaaaaaaaatttgaaatttgattgtgcttcttattttgttttatttttttttccttttccatggaaggttcaatttcgtttggattgtaaacagcttgcgccaaagaaatgagaataaaaattgaggaaaattagaaaaagaaaaagggaaaaattttgttgcctttcttcttataaggcattatcatcattttaataacttaccatgcatagcaacgcttagtttaagatagtactaagaaaaaaaatcatttacctttcatatttgatttactctaaaaaaaatacaaaaaaataaatatagataaaattactcaatttttttatatatttttaatctttacaaaggtgaaaaaaataaataaaattagtttgaaaaaaaatgtaaaaataatttttaattttcattttcatttctaattacaaatgtgtagtttctcatgtcttttttatttaaaaataaaataataaggggtgtaaaataaaaagaaagtgaaaacctctgcaatttatgataaagtgagatattaaaataaatattaattaccatgtagatgatacaaatataattaccatttttatcaagatattagtgaagaagttaaaattcttcatgaataattctgctttactccatcactttcaatatgcaaagatggatttttgcagtttggtagatgcagagagtgatacgattgatgaggaggaccctatttccctttggtacttactagttttttacgggcattcttcctctttttttcaattatgttcaatttttttgtcattcttttacctcattttgtacataatgccaaattcagtatcaggacaaccttctaccaccattatagcctaatttgtgtcacaacttatcaaaagttgttaaaggtttcttttcaacacaaagtgggaaaggttggttcttaaggtcatctcttgaggaggactttactcataagtaaagtgattttttgtttcttagttaacatagggaaataaggacgatatgtcttgtgaaattgatgccaaaaaagaaaaaaaaagtaaaggattgcgattcttatcaacattgtcgtttatgactcttataatttaatgtgtttttgttatgatttaaaaataaaattttatttttaaaggtaagaaattgcttttttaaattaataacattttcattggtaacaatttggaaacaatttttaaaaattaaagtggaatgaagaatagtttgtagaaaacaaataaaaattattttaatggttttttttttaaaataaacggaaaatttggagaacttaaaaaaataattaaaaaaaataacacaatctctttttctcattttattttctcttcaccaatcactatatatatatatatatatatataaaatcttcaaatatgatatcttttttaattataattattttttcaaatttctttctacttctttaaaaaaaaaaattattagacaatgagacctcaaataaaatgatatttgatgcatacaatttaatcatttttagaaataattttatttaaaaataatttgaaactcaaaaactaagctagaactaataatttgaaacttgaagataatttggaactcaagaactaatctagttagtactagaaagttatgcaatttaaaactaattcaagtaccattagaaactgatagatcaaaattcattgtaaatgactttgttagttttttccttacatataagtatatgttgtgaattttttaattaggtaaataaactcaaaatcaaataaaactcaatgcgttagatttattaaagaatttagtaatttttaaaaataatttaaaactcaaataatcaaccaattaatactataaatttatggataaaaaaatgactctattttgcacttttaaactatactttcataaattttttattaaacaagtagatttgaatgcattggatttattaacaagtttatgaattgagaaaaatgattacaactaaaaatataatacactttataacaaaaatccatttacaagaattggtctagaataattttattattgtttttttacacataattatatttttataaattttattattgacaaataaatttcagatcaaacaagacttaatatattaaatttattataacatttaataatttttaaaaatgatttgaaacttaaaaatatatttaatcactataaaaaataatagaccaaatatgatatataatacatcataattttattgtttattttaaattttcttactcgacaactcaattttgaattaagtgaaaccaaatcaagtgagacttaataataaatattctaattttaaaaaataatttgaaaatttaaaaattaattcttcaaaatatgttactaaatttatctatgttatgattttttttttcaaattaaaagaaattaaatttaaaaaaaaataattgtattatataaagatattaatatccatatcttcataattaactacaaaaatatataatatcattttttatgaaaaaaaaatacaatttatgatttcattatgatattagtattcatattttactaaaatctatatatttttaaaacatcatatttgttatagcggcaatatcatttttttttatatatatataaaacaatttatgatttcactataatattcatattcatattttactaaaaactatatatttttaaatttatttataataacaaattaatttttatttttaataagacttaaattaaatatagtttaaatcatataaattgattaacaacatttttaaaatcaaaataaaaatttgtttttaagaacaatttattcaaacctgtttttttcccttttatatatatatatatatatatatatatatatatatatatatatatatatatatatatatatatagaatgcacttcaaaattaattgtaaaacatttttccttttagaaaacatcaaaagtttacttttcattctttaacttaaacataatttttaaaaacaaatataatgaaatatcgtcaaacagtccaaaaattcttatgttgtctttgctcccactaccaacatgaaggctatgtcgtgttttcttttgaaatcaagaaaattatgtttacacttatatgccaagaaaaataagtcaattagaatttcataaaacataatacttaataataatttaaagtaattttatgtttaaattattaagttatattaagtcattaagttttcttgtcaaaaattaattttgattttaaattataatactaaatatacttaataacctaaatttaatcattacaatatattaatttctgaagttattatgttgatttattaaatattttttaaatttcaaaaagattctatgaatgtgtatatatatatactggataaattatttttaaaaaatgtatttggaacatttctaattttaaaaaaaggacaatcatgatacaaagctgcgtttggttgcacaaaatccgaatccaaatatgggaactccaattctgggcaaccaaaagcagccaaaaaggtttcgagttttaccttagggtgaagttgaggtgc

SEQ ID NO: 12970 - DNA, 14835 bp, Vitis vinifera
  Intron number 2 from transcript GSVIVT01033181001 (locus G SVIVG01033181001) derived from phytozome v7.0 (chr-ID chr4 ; pos 9060833 to 9075667)
tactgaacctttcagttcaaaagttaattgcgtaggtaatgattgttctttaccctttgaattttctcctccatcaaacagttgataagtagttctgccttttggcatttggttgttttagttacctatggatagctgttaacatctgccctgttgcttttctgtcttgtactcttatttttaatattcatctggccacgtttgaccgggtttcattcatagtaatggttccaagatacgcgtagatgtatgaaataaatcacaagcttacctcctttacattttcgcttgagtaaaaatggtaataggtgaagatagtttgaagtacgttcaatgggatgttgaattatgtcagcatgatttaagagtgtaaatagttttgtttgcttggttttgtatatatttttttgataggtaaataagagcttgtattagaaatgcctagaagcggcgaaaacagtacacacaaagtatacaaacatcgcccaagaagctaagcaaaaagaaagacaaaaaacctttgatggacaaagtatgatcctttaaatacaccctagccccattcacaaatctatatgtatatcagtaatttggtttcatattgaagaatagaaatgatttcatgttttagatgtttggaaccaatatttatattgatataaataagaaataggaaataaactttccaaaagctaataagaaacaagaggtgaataactatacaaaagcaaaatatgattggagagtggggaatggaagcagggagcaggatgtgtaatggaaaccttctttgacgtttctaaaattatctctcgtctacaaaacaaaaaagtttataaaactatcatttcaatgtgaaaagttatttataaccagaaaatgttgaatccaagaacaagtatatcagactgggaccatttcctacttgttaaaatcaaatccctagtatgtactgaaaggttgcttattatttcacacacatgatattttactttgtataatttatatagtaatatacagggtaaattctctgtctctcactatatctatttatctacttatctatcatgtcttaatatccatttgcaaaatcctttaaatcatagataattataaatgaaagtacataaatttatttcattcacattggttgagatcaatggattggatctaacagtcagaatatcataatttatttatttttgttttttgattttgttttgagtattgtgacagacaagaatcacacaatgcaggaatgaattctgcagtttttaatggcaaagaaagtaaattagaaaaggaaaaaaaatgatgaaaaacacaattagtcacacaatgtacatgacaagacagacatggtttaacaataggggttatggtatgggggaagtaattagagacaacttaaccaatatataaaatttcaaatttaatgtatggtggcccaaaagccaatccgaaaacaacatagagaaaatctatgttccatgggttttgggtatgggtgtcggatgttggtatgtgtcttggtatccaatccttcatatccaaaaatcttaaggcataagaatttggttggaaaggatctaaattataggtagtatgacattaattatcatatatatatatatatatatatattttgataggaaacgacataagaatatattgataaaaagaaggtacaattagaaggatgaggaatcttcccaacaaagagaaacaagactacaagtaatcaaatataagaaagtacaaaaagagaaaagtagacactctagttacacgccgctaaccaatcaagttgtaatatgttaagaggaatcccattaaaaaccttagaacaaaaagcccaaaaagaggtaagaaaacaaatagaatcccaaagatactcagaattccttgctttgtcctcaaaaatccttgcatttctttcccgccacaccacccacattaacgcgatgcacgcgttttgccataaaacaatccctctcttggaagatccaaaaccattaaaattactagataacatgtcagagatgttccttggggaaacccaatccatctttgctgattgaaataatttgtgccacaaccctatcgttaaagagcaatgaaggaaaatgtgatctactgtttctccatgcttcatgcacaacttacatatgtcaaggctaagtgctttgtagggtcttctcaattgtaacaagtcattagtattaaccttcttgtgagccaccaactagacaaatgacttgactttgaaagggacttgagcattccagacaaacttggtagggaaaattggaggcgactcagaatattgggataaggccagaaagaaagatttgactgtgaaaagacctgaaggagataaggaccaagatctcttatttggaaccgaaggtgatatgtgtaaacgatcaaaagaccgcataaggccctctaaatcttctatctcagaatcagaaagatttcggcgaaaattaaaattccaagagaaggggcgggtatatccaagaattgatgaaataggagcatttttattcgtgactacgctaagtaatcttggatattggacacccaaaggttgttctccccaccacaagtcatcccagaaccgaattctatccccattacctaccataaaccgagtaaacttggaaaactcttggtagactagtgcaatggccttccaaggacaacgatgagaccatctaactatgttgttgacatcccagccattggagtgtgatccataaatgcttaaaataacctgatgccacagagctgaaccctccctaggatatctccacaaccacttccctaaaagagcgacattccttatagatatctttccaaaacccaatccccctctcaatttcggcttacacactacgtcccaattaaccaaatggtctcttttgctttcccctacgtctgaccataaaaaatctctttgcattctctcaatttttgctgccacagaggcgagaatcttaaacaaggaaagaaagtaacatgacatatgggtgagacaagattgaatgagggttattctgcctccaaaagataaatatgccttctgccacccatctaatctccttgatatcctctcaatcacaggatcccaaaagccattcgccttaggattccctcccagaggaagacccagataaagtataggccacccagaagccttgcagacaagcatctcggccaacctagaaaggtgattctgctcaagattaataccatagatattgcttttgtcaagattaactttcaaatcggaaatatgcccaaacactagcaggacattcttaagggtcatcatatcctcctcccgagaactggaaaagaaaatggtatcatctgcaaattgtaagtgggaaacccttgttctgttcctacccaccctgaaaccctccaagacgtttctctcctcagctttcaataacatcctactcaatacatctgccactatagtgaacaagaacggtgataaagggtctccttgtcttaaacctctagatgccttaacccaccctttcgcattaccgttcaccaggactgcaaaagaaatcgaggacaagcaacctctcatccatttcctccatctaagaccaaaccctttcatctccaacacatgatccaaaaaatcccaactcacatgatcataggccttttcaaagtcaattttgaatacaactccttcctcccttgatcttcttttctcatccactatctcattggctatgagaactgcatccaaaatttatctcccttgaacgaaggctccttgagtagaatggatggtctcgtgaagtactcctcttatgcgccctgctaacactttggctattatcttgtaaagactagtgatcaagctaataggtctaaagtctgagattctccttgacatgctttttttgggtaacagaactataaaggaagcattggtgctttgattaataattccgctcctatgaaattctgcaaatactttcactagatcctcctttatcacttcccaataatcttgaaacactgcaatggtaaagccatccggccccggagccttatccctgtccatctgaaaaatagccttaaaaatctcttcttcaataaagggggattccaatctaaacgcactctcaccagatataggggaccaatctaagccttccactctccaaggctctccagaaggactcgtgtagagcttttcgaaataccttaaaatctcctcttttatgctctctgaattattcatcattaggacattaataatcatattttagttgaatgtttaaacattattgtagatttcctatttatttatagatttttaatatattaattttgattttttattatattaattaaatatttttatatgttattaattatcatacatttttatttaatggaatgttaaacattattgaaaattttctttagttttagatttttttttttaaataggatgttagagagaatatttaaaaaattagatgccaacatatttattatttaccataaatgttgagaacttctaggaaaatatatagttgattttgagggacctttattagttgaaaactttcaactaataggaaaagtgtataccttctataagtggttggccaaggtgttatccttggtaggtgaatgaataattggttaagtcattcttagtgagggtggtttggtttaagtcattcttgttttgtagctttggcttttggtaagtgtataccttctatataatgtgggtcgctcttttggtgacccttattaatatatattctttctcatctatcaaaaaaaaaaaaaaactttaccgtaaataagcttgaagaggataacgactaagctcttgtatttggggtaaatggagataagtacatatgagagagaggacgtgagtcttttgatgtccttaatcttcaaaatagtggggttacaacaaaaattaaggtttcaagaaaaaggagaggtgctaaagatacttgagatcgagagatttttagtcgtgacaacgctgaaaagattgggatatcataaacatagaggtttttttttttattgataggtaaacaaagcaaatatattaaaagcagttccaaaaggcatacaaagtacacacgaagtatataaatagcaacaaaaaacaaccaaaagaaaagagagccaacaaaccaacccccaaaatgcaagatagtggcttaaagcttagaaaaacaagaacttagacaacaacatgaaacacctcactattaccaccattgcttaaccttgtcggaaagacttatcaagaagaaaactaccttaacccaaaagacctaatctagatgatcacttatggaccacctccttcctattgcttcggtttttctctttttttgtttgaactgcagtaattaaccgaacatttcaaatttcaaagctccctgactcaatgaggtgtggaagggagcctcttctttgtaatcgaatctctacaccgttttttggattccaacttcctcagaagggatgcgatttccttctcattcccgttcactggcaaacccaaaaacttgctaaacgaaatgaatttttgggaagagggtccagataggctttttacttttgtcgggctgctgctagggccttttaaccctggagccccctcctcaccactcacggttggcatcgcaagcttgtcaaccttgggttgattctttgtatcttcctcaaccatgtcctcacccgataacacacgtaaaggcctgtaattatcttaaaaaaaagccttgtcttgctcgctccaagaaatcaaactattggtcttccccacaaaacaccctgcgacaatgggcaaaaagagcgtgccccccccctcgtggccatttgaaactgagaatttattggttgagaatcttgccgcttcctccaaaagagcctcatctgttatcaggagacaaggtgttgaaggtgaagttgttggtgccctagctccatcattggggccctcgtctacaccactaggagcaaaaaaaagctctctttccctttaaagagccctcccaggacaaatcttcttggcgcaaactaacctagcccacctccaatggcccactctctaaaaacttcaccacttggcctccgttgcattgggtctccattttgccacaacctagaggaatgtgggctccaattgaagattcaaggcccaaagaagctttgccagatagccttacgtggagcctcatctccactttgatcccccctctcttgggctgcaacaaagccaacccttgaagaaagaccagctgcgggctggtccttcaaagtttcgggcccaagaacatttaaaatacctttagttgggcaagaatcatggtccacaaaaggaagcccaatagccccttgtacttccttttctgaagcctttgccaaatagtcccttccatcattactttcacttgcaaaaaccccattgtcattgccccctttcttcgatgccactacaatagcttttacatggccagccccataggggttggttccccaatcacaaatcctcagcccaaaaaaaaaaaaaaaaaaaaaaaaaaaatcttaccttattacctaccacaaggtgaacgtgtcaagaaaaatcttgaaaaacatgtgcgatggctttccaaggacttcgatgtgactatctaatcataatgttggcatttcaaaccattagtatgtgcctcataaatgctcaaatgacttgatgcaaagagctaaaacttccctaggatacctctacagccatttccctaagagggctcattcctcaaaaaaatcttccaaaaccctaattccctaacttccttaaacttgcaaactaggccctaactaatgaggtaatctcttttacctccccaaacttgactaaagacaacccccttgcaatttctaaatcttaggttccaccaaatgatgaatcttgaaaagagaggaaatagctagaaatatgagacacacatgattaaattaaaattatcttcccactaatggcaaaaaagatttttttccatccatttaatctctgtgagattttgtcaatcactaggtcataaaacatgcttgctttctagctcccccttaaaggaagacctgggttggttggagaccaataaaagaatttgcaaatgagcattaaagccaacctagtgatatgactctctcatattaatactagagggagtacttttgtctaaattgattttgagtcttgatatatgcctaaaaaccaacaagatcaattttaggtttagtaaatattccatacaagctttagaaaaaagatggcatcatttgtaaattacaaatgagacactctactcttattgttgcccatcaagaagctttctaatgaattgctcttctttgctctcaacatcatcttactttagaaatcagttgcaatggtgcaaaggaatggagagagtaaatctccttgtcttaagattctagttgctttaatccactctttggtgcttccattctgtattactgtaaaacttgttgaggacaagcaacccatcagccaatacctccatcttgcactaaaccccttctttcaagtgcatggcccaaaatatcctaattcaaatgatcacaagccttcctaaaatcaattttgaagacaaccccttcctttgaacattttttctcatccactatttcattgactatcgagattgcattcaaaatttgtcttccttcaacataagattcctaggaactataaatggtttcataaaggactctttagagatgccttgataaaactttagcaatgatcttacataggttagtgatcaaatttataggtttgaaatgtgagatcttattggtttgactttttttccgcagaagagcaatgaagggagcatttgtagtttgatttattaccccattattgtgaaactcttagaatacccttagtaaatcctccttaatcacatcccaattctcttgaaacacccctatggtgaaaccttcaagcccatgagccttttccttatctaactaaaagacgacttagtaaatctcctcttcggaaaaggggcagttcaattgtacaacactttgtgctgagatcaaagtccaatccaatccttaacctctaagaatctttagatggattgtgagtataacttcccaaaaagtgtataatctcctcttgtagaactatccaaaattgtcctttcttcattagccaaagatatatatatattttttgtttgatagacatcaagattatgtattaagaaccgccaaaagagagggggcacgccttgtatatataggcagtatacacggaaacaactcaaggcacacctcaaacaaagatggtatacactaacaaacaaaacaaagtaaagccaaccacaataaagagtatctaggcaaattcaacatagaggggagcttcaactccaaagaatccctagaccactcaaaaagtgtccgaatgaagagattctttaatctttggttggaaagctcttcatttttgaaggtcctttgattgtgctctttccaaatacaccaaaataagcaaatgggagctaaatgccaaactattctttctttcttttgaaacccctcaactttccattgtagaaggagatttctcattgagtctaaaaattcccaaaccaattgaaaaaggactaacaaaaaggtctatagctctcttgtcttggcataatgaatcaaaatgtgagtggctgattcttcactatctttacaaagattacatttgttgaccatttgccatccactcttcattaaagtatttacagttaagatcttcccccaaatagcttcccaagcaaaaaaacaagttctaagaggatcatgagttccccaaatctccttgctaggaaaaaactacattattctccatccttagggaacaataataagacttgacactgaagattccctttctatcttctttccaacataaagtgtcttcaccttcttgtacttttaacaggtaaagaaatcctaaaaagaaagtcacctcctctacctcccaatcttggaagggtcttctaaattggaccttccaacatccccctttgtatcattctcttttccataaatctgcaattgtaacatttttgtgggatgctatcctaaaaagagtaaggtaaaacatttttcagcttgaagtcccccgcccaaatgccccaccaaaaacttgtacgactactatttcttatgtggatagaagttttgacattgaacccactctcttctaatatcccttcaaaggctcatgccaaaggaatccctcctccctctagtagtccaaccccctccatctccccaaaattttcacaaatgatcttcctccacaaactctcatgcttaatagagaacctccataaacatttgcctagcaaggtttgattgagattgtctagtcttcttagcctcaaccctctaaaattttcattcgtgcatacatctgaccattttaccaagtggatcttttcctatctcccaaatctccccacaaaaaatatctttgaatttctctctaatctaattctcatttttctaaaaattacaaagagagacataatagatatggagatttgaaagagtgctcttaataaggactagtcttcctcctttggataggtattgttttttccaagcagttgatttccttttaaatctctcctcaattgagtcccatacaccacaaagcttattaggggcctcaaggggtaaacctagataagaagtagggaactttcctactttgcatccaaaaagagaagttgctctatttacatcctccataatccctattggaataatttcactcttttgcaaatttatttttaagcccgacaccaatttgaaacaaatgagaatccatttccaaatttttagctgctttacatcatccttgcaaaaaagaagggtatcatcggtgaacaaaaggtgtgaaacttgagtttcttcttccctgttaccctcaatcttgaagcccttaatgaattctccttgtttggtctttgcaattagattgctgagggcttccattaccaatatgaagagataggttgaaagagggtccccttgcctcaatcctttaaagaccgggaaaaaatttgtgggctgccattaacaagaattgataataattcaagggaagaggttagcgcagaattggaggatagggtgttgtggaaaaagaccaaaaatgggattttttcagttaagtccctttacagtgcagtggagctgggaaatgcagtccggtttttgaggaacatcatttggagtccttatgttcctcccaaagtgggttttttttttttgcctgggaagccttgtaggggaaagttttaacattggatcagctaaagaagagaggctagaccctagctaattgatgtttcttttgtctcattaaagaggagtctactaatcacattttaatccactgtataaagactagggttttgtgggagttattatttgctctttttggtgtgatttgggttctcccttgctcggtaagggaggtgcttcttggttggtatcctttgttggcaagaaatgcaaaaaaagcttggaagctggctcctttatgtcttttttggacggtgtggaaggaaagaaacatgatagcttttgacaatgaagagtttttggtcttggacgaagttgtatatagatattagacctttacctttaatcgatttttttgattagttggggtctaggtgagggcgggtgaggttttttgcatcccctctttttttgttcttctttgccttatgatgcctattgtatacttcctgtatgccttgggatgtcctatgggcttcctttttctacatttatttattttattctgattttacctataaaaaaaaaataaaaattgtcattttcatagaggaaatgcaaaagtggatccactgtctccatttggggttgaaacccattttttctaagactaaaagaaggaacttctagcttacatgattgtaagcctttttaatatccaatttgcaaactaagtgcttgcattggaattatgtttcgttgaatcagtcgcctcatttacaatcaaagtagtatctctgtctaccccccacaaaagcattttgactatttgacaccaccttgccaatcaccctttttaatctattagctaggacttttgcaagaagtttataaaggctccccagcaagctgattggtcaaaagtccttcacatcacctgcccctcctttcttagggatgaaaactaaaaatgttgcattaaggctatgagttagggaattttgcatatgaaactcctcaaatagttgcatcacttctctgcccactataggccaacaagatttcctaaaagccaaagatttgatgagcttcctggtttgcctaccattagccaccctatggaaatgctttaagttgtagtcccctttaatcactcatctcatccttgccttttgcctctaatgcacctcttcctttaataaaaaaaatcctccaactcccccttccttaaggcccttaacaccgaaagcccaggagacatattcctttttttctcactcgcatcaatgctagcaatattagtaagaatattcttcttcttattcttctcttcaaaagacactatttcattctttcagttttgatttaataaattgtagcttcttcataaatttatgaccttcccaccatttagtttaaaactctctccattaaaagctaaatctttccttcagatttaggtggaccacatgtttttaaacctaagaagggttggcccccatttaaatgtgttggtgtctaaggcgatcgggcaattattagaggttaacccatggagagtttctaggaggctttgagggaacctttgctttcacttggttaaatgaaatctattgaacctcttgtagatgcaggattcctatgaccaggtaaaagatgtattcctaagaggggggtcgattaacacactttctcttataaatccatcaaagtccctcaggctaggggttaatttggaaccacctaatttttatgaaattcttcttgtgacattaaaatcttccctaacacaccatttcaaatgggttaggccaaaaagattttgtagctctatccaaaaatcttgcctaagagtggtattgttggtaccatagattgaggtcaactagaaagtcccttcctcatctaatattaacttaatcgttaataccacctctatacaactaaacttgtttaaatcctaaataatcaatacctaactcaaagctccacaagctagaagagaagcccactccttgttcctaactttccacacattgctcacatacctcctatcacgtatttccttttttatttcttggggcatcactatttttggagatgtatgacagatgaaatccctcacaaaattttctttttagaacctagtctatcacgtgtcttcctttttgttccttggggcatcattatgtttggagatctatgtcaaaggaaatcccccacaaaccttcttttctttttagaacctagtccttggatgttctagctaatgatcttcataccaaatctttagaacctgtcaacctttggaccatctactaagaagctctaaaacctttggataaaggtctatatttctcctaaaatacacctaatccattggctttgccgtactactgcatgcgggatgatattctcacatcaccaaaagaccctttggaagattgcttgtctcactttgatgtggattgtgtggagagagaggaatgctaggattttttaaggtacttggaatatgtctgagatgatgtaggacttacttcatttctttgttttgttttgggtctcttgtaatgacgttgttaaagccttttccttgaatgtgattcaactttgttggctttccgtatgtacaccttagggttgggcatactttgcaaggtgcctagatgagcttttggtgatgtattacttgtatagtctcttttgttccttttgtacaaatctccttgtaacgtggaggttctttttgggtcttttgattaggtttgcattttatggggaggatttctcatccttctcataatttctttacagtaattaatacaacttctgtttccaataaaaaaaaaaaaaaaaaaaatgaaaaacttgatattcatggtggccaaaatcgattgaattccagccattttagtaggggagagaccctctatgggaaacccatcaaacgaggagactgattctaagggttgtcttgtgatatgggaatgagtcttcctagaggtgctggaaagtgtcaacctttaacactttgctataaagagctaaaggagactccgcaccatcatgattgggattaccaacattagagacaggcattgcttcaacattagagacaggcaccatcttgtactgaagcttttagaggagttcctctaaacattctacaactcaattggattggggtttgcgtttcaaaagtttgaagattgatggggtttctctttgtttttagagttctaatgttgggagttttatcctttgttcaatttgtgtaggaaggacctctcatccttcccttggtttttttctctttctcttgtctcttttttcattcctgtatttgttctttcattaatataatcttcttcgtttctgataaaaaaaaaacatcatttactgtgtaagggttaattggaggatcaaaattgggcaaagatggttgagcagaggtgggggatgactgaacggaagttattccagaattgaatgcacgaataaggggaaaaggggacaaatcagaaccccatttgagttctggcactggccccatttgagggaatctttaagaatcaattttctgaattgtagttaatattctacttgatgctaatatttatggtttgaccaaaaccttgtagatgaatcatggcagcgtaatggccttaaatatcaaaatttatgatttttgattagttttatgggttgttttggttcttttggactagctaatgctcacaaaagttagtttgagattctttgatagagaatgacattatcactgatttgtttcctttatggatctttttgccatcttggtgctatagagagccctgttatatgactcgacattattcatttgctcttttcttctgcactatgtttttgttggttcctttgcttcaatgatggtggcaatgtgatggaatgcgagtctaaacttgttagataaaaagagctggttattttgtaaattttaaatgttgtgtccttgattcgagtacaatttcttggttaaattattctcatcctctatcagtctgccttatattgtgccatgtatattggtctattttgtcacaagtgcctgaaatattatactttggtgagaaataaggaattacttcttggtgtaaatgaataaaaaacttcaaagcatataataaagtggacgcttgttctaaggaccatctgattttcttgccagcggcaattatctaaccacgatggaggttctcttgctaagcaatgtgcatttggcttgttttgtttcccattgcagagtgataatattgtcatctttcccatgtagtattctcactgctttttatttccatccttttatgaaattttctatctaaaatattttggtgaccatgttcaagtgagattctggtttcccatcttgcttattcttttttttgggggggtttaaaataaattatgttataatgttcttctcagttggcgcta

SEQ ID NO: 12971 - DNA, 5417 bp, Vitis vinifera
  Intron number 8 from transcript GSVIVT01014744001 (locus G SVIVG01014744001) derived from phytozome v7.0 (chr-ID chr1 9; pos 9151973 to 9157389)
actcttcaatacctcaagtaagttgtgaatttaatgctagtttattttgtttcaactttgatcaggactagcatttttaaatgggaaaatttacacttataccccctgaacctgtcagagtttgtctgctgacagtaacagcataacagctgtgataaaatgatgagaatgccattcataaatccaaattgaagccctaatctgccacttcatctctgccatccaccacttaggaaccttactctgccagagaaagttgatgtgctttgcaactgaagtcaaagtgctactaactagccctaatttgtgaaattccagacctattgttgaagtccaacccttattgttcaaaacccctcctatattctataacatccaaacataaccctaattgaaatgcatgaaagtgaatactactaaaaaataaaaaggaaaagaaaatagggttctgttttgcatcgctaatgcacatgcagcatggtttctactgtgcactcaggagtttgtggctgctgattttattgcatgcaacaaatctatggccctcctcattagggctaatagtatgtcggaaaagaggaaaattgatttttgaaccttgagcagaaggtttctgacaacaaatttttctttctccaaccctctttttttctcaactagcaaatgcagggtagaaaaatctcatcaaatttaaatgtcaaaccatgcaaacgacttaacctttcaagaaattagtacatgcctatgaacaaacaaaaatcaatagaatccaccaaaaaacagaatcaaaatcaaagtctcaggcctgtggctcacagcgacctgttgctactaccgcaggcagggaaccttcaaaggagaaattcaagaaagaagatatttctaatttacatgtggtcttgtgtacaacccctttttgcacatatttctcattgatgccctccacattgaaatctatctgtggattgttgtgcatacagctgccacatcaaatgatgaagacgatgaagttgatgaagataatgaactggagtttttggtttgaaagatggggaagatgaggaagaaattttgtagccctttttgaaacatagggtttgatttaggttagagttagttaaagttcagaaggattatttagggagtaggttttgaggttctgatcaaacttcttgtttttaaatgatcttcaaatacctttcctttcattatctaaaaaatttgtaaggaagcaactctccatgccttctttctttttgttccaacaaaagagtcatgtcaacctaagagagtctcttggattatggaagaaaggcatcaagatacaccaaacaaggataacaacaactatcataaaagtcttaatacaatgaataaggatgtgatcagtggattcttccttaactttacaaagaaagtatccattaactaatgatgatcctcttctttgccattgatctaaagtcaacaccttactggttggcctcctaagcaaaaaggctgaccttagatgaaacccattgattccagattatccctagtggaaaaggaatggcataacttgacttcaagacaaaataaagagcattgatagagtacactctattactagaatccatccaaaccaccttatcctccccttccctattcaccgacttccgttgcaatctatggaaaaaaatgttttacattgtccaactttcaaattcctagcaaaacaaaggttccaatgtcctcattcacaagtctagtcccatgcctctttcaaagcggctaaagcatacaaagcagggaagggtacacacaaaagtttctcaccacacacttggtctttccaaaacttcacccttctcccattacccacaaaaaaatgaggctgttgaagaagtcccactccttccttataactttccataaccccgaccccatatgcatctctcacttcacaagagtgtcaccccccttctccctccccatatcgatcacatataatttacttctagagcacttccttttcggatgcacattgccaactccatttgcaaagaaaggctttgttaaacaaagagaggtatctaacacccaaacccactctcctcttggtcgtgcaaacaatcaaccattgagcttggtgtggtttcttctcaagtcccacctccccataggaaatctttttagactcttctctaaccttaatttgatttttctcaagatgatgaacaataacttaaaattaaaataaatatgcaagttggatgatgttcttcgaatcagagtagcttcttcccttttgagatatattgtctttttcacatcaacaaccttttaagaaattgctcttccgcttctgatcaaaaaagaaattctcttccaccccatcatcgcaagttaccaccaatttgtatgaggcacctaaaggaagacttaagtatgtagttaacaactctcctcccttgcaaccaagctcaaaggtcaactccaccacattgtcaacactaccaattggaattagctcgctcttttctagatttatttttattcttgaaatggcctcaaatgatatgaccaaacaacataagttagtgatttgatcttgagaagccttacataatatatcatcaacaaattagagatggggcacttccatgccctcttggcctctcctcctcaccttaaaccctaaaagattgcctccctcctttaccctcttgagaatgctattaaggtccattgctagcataaataaattaggagagagaggatccccttgtctcaaaaccctaaaactttgaaaaaagcttgagagagtgacattaacaaaaacaaaaaatttatatacaccacttaatccaacctatcagtttctacccaaaacccatcttgtcaagaatcattggtaaaaatcccagttcacatgatcatacgccttttcaatattaagttgacccaacattttataggcatttcatcatagaatcaatggcttcgttggcaatgagcattgtatctagaatttgtcttccctcaacaaaagtattatgatacttggatgccacttttcttaccactttcttaagtctattagccaatacttttgctaataacttatacatgcttcccaccaagcttattagcataaagtcttttagatcttctacacctcctttctttggaattaacacaaaaaaacatagcatttaggctttttttcaaacctaccctaatcataaaactctttaaaagatccgatcaccttgttctacacaaaatcccaattgaactacccaaaggccatagagaaaccatttagtcctgcagctttgtcccctttcaagctcgacaaagcgctgaacatctcttcccctaagaaaggcacctctaacttttcttcttcctgatcatctaaatcctcaaaagacattccatctaaatcccctagtttagatggaagggtgtggaaagcctgagccatctttttcctttatctcattctcctcggttagctaatccccccaatcactttaatcttgactagaaaattttttcttttgtgagcattggtcattttatgaaaaaatatcaccctcttttagccaaatctcccttgaatttcagttatgtttagtttaaaatcaattagaattaattgagatgttaatttaaaactaacttgggcaaaggtaatacaaaattttgctggcatcgacctcgtgcacaaataaatgaagtcacaacagagatgggtaatttgtttgaccaaaaacttagggaggtatgtgtaatttctgaaaatggaggagggatttgtgtaattaaatttagcctaagggagtataagtgcacttttctcttttaaatatacaatagattatttttgttgttttcattgtgtcccatttctataaaaatgcaaagcatttagttgaataataaaatggtttgaagtagcaggaatgtgaacaagttggcatgatttacaaaaaaatttaaattcacaatacaacctaaggcaccatgtgcaaaaattgtgattgctaaataaatatttgatttctacttttctatgtaaccataatatgccttttagggggtgtttggtacaccagaatagggagtgagaataaacatctcattccttttctcccttattcctatgtttggataaatgttaagaaggcagagatggaataaaaaattattcaggcagaaatcaaatccaaattataagtcggatttgaattcatcaaaagtaggtggtattctgattcattaaacccatttgataatataaaataacctaaatttactattttaccctcttatctcattctttaagcccgatacttatcttctttgcaaagttagagatccattcatcatccacttctatgcaacaagtgattctcccaaactgaattaatcaaaccttccacgacatttagaaaaaaaatttcaatttctaatttctagggttttgaatgaaatttgaattcttttatttccttttttggaaataggaaaaacatttgctagctttgagaatttaaatattataatatatatatatatatatatattttggtaaaatataattttataactacttaagcatgataaattattcaaatttttaataaaaataataattgaatatttgtacattagggttatatgattttttatggttaattttttatttattgagtatatatatttttttagtcttattatttaataacaaaaaaactctcaaattttattttttgaaaaataaaaaaaaattattttaaattatatggaaggatattattgtaaatttatttctttttcatttctattcctatttttatcaaacattggaatggaaacaaataatcattccaatcttgcattcctaagttcgtccaaatgctagaaatggaatcatcaaattcatttctatccactaagaaataggaatggaaacaaaatattcattttcattccctatttcaacgtaccaaacacctccttaagataaacctttaaagtctactcttgccctatattttggcaactgctttgggtacacctcatgtatgggaaattaattatccaaagtccattgagcatgcgcctttcatgagtcacactttcctttcctctcagctaatagatagctttagatcaatggttcacaaaataagattagatgtaatccattggatatgttggtctgtgtgtctttggttgaaatattgacttgctctatgaatgaaataattattgtaatttttcaagatcttttatcattgtacacttatggacaaaaaatgcaattggatgctatgagcttctcaaaccactcaactgatgttgatttgttttatttcctttgaacagggacatcaccaccacattcccaagctttgtctttc

SEQ ID NO: 12972 - DNA, 3451 bp, Vitis vinifera
  Intron number 3 from transcript GSVIVT01018629001 (locus G SVIVG01018629001) derived from phytozome v7.0 (chr-ID chr1 6; pos 11999528 to 12002978)
cgaagactgtatcttgatttggactcgcgaatcaggtgcgtgactgtttatggttttctcttctttttagagtattctaggtgtggaagctttgttattgccttattggggtcaattagggtgggttctggtgttaatattgaatcacatgcgtgtcggattgtttgattacgtacgaatctttgactctcctgttgtttgccttttatattatcatcttaatttttttttcatttttcgacatgcattatggcatcaaattgtaggacattcagtggttttttcccaattgtgattttatgaaattctgagttatagttttgtgttttggttatgttttttgcctttgtagaatcaaaatgactaagtttgacgttcgattaaatgggatttaaattttctttttgggtatttttgaattgtgggtgttggttctataattggttatttcagttttttccgttttttccctaaccgcaagaggactgctgtctacattcagactaatttgtccgcagtagagctgtgcttgtgtaggttgatgtgatatggtttgttttcatctttgatttttccaactcttaaatgtattgtcgaccgctgtacattacagaatgcatggtaggtcaaatgtcaatatgggccaaaagccagaaaaaaagagagagcgacatattcttcgatggtgaaaattgacccagaatggctaattccacgcttgcttacgttttgatcctaggagacattagtgactatggccggaaaaaatacctagatttactaatattttacacagattaataaagtaaatatatagtatttttagtttttgttatttccagtggtccattggatgatattaatggtttattgtgggatagcaacagaagtatggtgatttctgaaactttcaatttttgcatccataattgtttatgaataattatttgtcgggtccatatgtttaatgattcccatgcttccatgtaggcccgggatgtgtggtagcatatggtgtgtggggcaggagttcttttaatcataatacaatagcccattgcaaattttcctctgctaaatatcaattctatgggtcatcttttaatgctgggtactgtttcaatcacttgttcgcactcggagacccaagcaagtgcacatgttcacttactttttctatctaattgcaaaaatgcatgataaaatcattatttgcatcttctttttttgctgctaggattgtttattctttaaattttatgtctgatgtgggtgataaaataaaatgtgtttaaattatctttttcatacaggtagatgaaatattttatgttatagcttgtagaaatttggtctttatggtggctgagtatgaggaaaaccataattgcactgatacaagtgattttttggaattctgatgatgcgtgcttcagtttaacattcatgcttcattataaaaaaactaatagatatttaatatattggtcttgtatctgtgtggggtttattcctaggtctgatagattgttagggttggatgccccatgcacacaaaataattatactaaggcaatgggattttcacctttgctattatcactgtcatcagctttgttttccttaaagcatttaacttcttggactaataaggatttattctgtcaataatataacaaattggatctattaactaaatgatgcaggcagttgttggaggtggtgaaaatatcatcaccaccatgctcagacgagtccataatgctcatctcaacttgttaggaacatctgttttaaatctggaaataatatactacatataatgtaataatgattgttagtggtacagttactaaagataatttaggcctcacatgatttctattgaacattatgtcattttgaaatgacactaatcctgagtgtctaaatctttaggttcttatatggaacaccccatatgttgtctggactttgttggatcatcaagtttcccatatgtcgccctattatttgtttataaatttatttttttgccttgtatgttagataaactagatgaatttctacctttttcgtcaacaatgatactcaacaagttcttctccccaccccccctttttccctcctttttccctttttaccttcttgttatttgggtggaggtgaggttggtgcttgtgtggatgtttaggtttgttttggttttgagtttttgttgactgatacagcagacaagttccaggatatgggatgttgctactgttactacaatttagtgaaatatcacaattagaagatgaccaatgacatggttgttggtgttgttgttgttgttgtttttttgttttttttttcttttatcttttatcttttttctttttttaaatatgtattatctttgtaatctatacctaaatagaaaacttaggcgggttgtgttaggtttaggtttcttgtaaaagtataaaaaaaagtcaatgatttgtgtgatcttatactgcatgcttctaactatatactaacctgatgtattgcgaacaagactaaactatgaaaagaaaaaaggaaaaaaaaatccttggggaaaaaattatccgagcacaaagattataatttgggaaatgatgtggaatctcattttgatgtagtcaagcatcacaaccaatgatgaccaataacaagatttcccttatttgttttattatcataagtaactagagcacttttgtctttatcaataataaaatcttctgtctacaaattagcttgatttgtcaaggggatgactaaacaacaagatgaagaaagctaggaagcgcaaaaggtgatgaaaagtggaaccatatgtttttcctcctttaactcctatagcaaagcattttatcactacatgcctgtttagatattgtgagatgttcattgcttggaggttgcattaggatggaaatctgaaacactgagtattttttattaatggcatatgtggtgatctgtagctttcttgagttgataagttctgcttttccatgaacctaaaatttttctagatattgtgctcctggggcctggctcaattagtaacagtttgggggaagggttttaggaaggttccaggtgcaaatatgtgtaatagcaggaaaagtaaaaggttataaaggttctatttttcaattgcaattttttgttgtatcgaatttacttcaatgttttttattcatatttatcttttaggacttcttgtcacatgttattcatttgtcaataccagttctcattaaagcctttcttttgctgctacatgacctaagtttcaatggattgatgtattcattgtctttctattttttgtatctttaaatactttgattttgtacacatcacattatttatttgttttgtgatccttgatgtagaagacctgaagagctcctttatcagacacattctt

SEQ ID NO: 12973 - DNA, 12032 bp, Vitis vinifera
  Intron number 4 from transcript GSVIVT01025946001 (locus G SVIVG01025946001) derived from phytozome v7.0 (chr-ID chr1 8; pos 26859261 to 26871292)
ttgagtaaaaaacaggtgagatgtcagccttgcatatattattggattacttacccatgtatgtaattaactcttgcatgctactgactggcaactggtctttgtttttagccttttcattagagagggtgtacatgaatgtttaggtaggctgttgcataaatgtggtgtttgtaactatttccctatgaactccaacctagccctgataaactttggatgttattgcatattggctcaacaactgttgcatgcattgagcttattctatcttgattttatcctatacttacaattttcattgatgcaacctcttattatctggtagtctatttttactttcaaaaattttaaattattccttacaaacttttcacttgttgatctcctaaagtacaaagttatatatatatatattttttaattgaacctaaaggggatttttgaaattttgtttcatggaggatgaatttaggatgacttttaatggctagttctggtttagctcttcttaaaccacctcctttaaaatgatctcctgggaggtccttctggaaagctggtggcaactattcatttaagaattacatcaataacaatttcttgtaaactttatggaataagctcttctaatggttggagattgtttcactgatcttaagcacttgcatctcaattgtaatggtcattagaactcattttcccatgaatttgcttttgagtacactttaagaatcggtgttggaaaatttgaagtttgaaagtttgaattattcaaatatttgttgatttgaattagtcaccgaagtctgttaagattagaagttaatttgtttgtttttaaatctcattagattaggagttatttattcaaaaaagggttggatatcaaccaggttgttaggataaggtttctggtttcctcagtttaaggatttttgaatcctagagtcaatctataaatcctgctgtatttcctattagaaaataataagattttggtgctttctgttttttcttctactccaacttcatggtattagagccgaccggttagtagtcgagagaaaacaatggtcaacatggccatgattggagcaagtagcgacaacgttttgaaagagtctgcggatacttgttagatgcccctacaattgctcccaccgtcttaatctcagaaaatgctccacttcagattgcaacaaagaaattacatgggcaaaattttcttaaatggttgtgtgctgtctagatggtgatctaaggtgaagggaagatgagttaccctgatggctccatttgtgaaccaggagagaatgatcctttgtatccaatttgggatgctaacaattcaattgtcatgtctttgttagtgaactcaatgacggacgaaatacagaacaattatttatgctacccaacaacaaagaaaatctaggactcgctcaatccattgtattccaacaaggaaaattcagcccaactgtttgaactacaaaatatggcttgaaatatgaattaggaagaaactgatgtcacaatgtactttacaatgctctctaaactatgacaagaattagatgtcgccaatgactttaagtggaattgtaccaaagacagtgaatgcttccaagctcaaatcaacaaggagaagagctatgacttcctagttggacttaatagagatcttgacgaagtacagagacgtatattggaatcaagccacttcatgcaatagaagagattttcgttgaagtctattgtgaagaagcccgaaaacgggttatgcttggaacacctaaaacacccaatgtacctgttgataactttgccttggttgcttgcaggcttgatgcctctcatggggatgctcgtaatacttgcaagaatgacaatctttggtgcgaccattgctaacgatcaaatcatagcttgagaactattgagagttgcatggtaaactgcctaattggaatgataattgtggaaataggagggagtccagaggctagcaagtctcatccgaagctggaaataactagggagagagccctttcaatgtccacttgaataaaaatcaattagaacagtcatataaactattgaccttgaaaaaccactgtccgtaaggtaatacctagagagggttgaatgaatgtatttttaaaaattataatataaggattgaaatttatatacccatattaattcaagagatattagggataaacataatatccaaaatcaaatcaatatgcaagggacacaagattttttttatgtggaaaatcctcatattaatcgtggagataaaaaaccaaagggtttaagatctcaaatctatatccactatatgagatcaagtcacacagaattacctgactgttttaccctaaagacttactctccaaaagctataacttgatctatgtttgcgacgcaataatctccaattgctttaacgaattctcttcaacctcgttgaagggatgtaggtcttctagcaacctaagattcactgttttgaatcattctcgagagattgggaatggcaagacaagttaggttaaacctcttggtaagtgtccaacccaaaatgggttaaaagaagggcttatataagcctttaggcccaaggagatcggtatcccaaattttccaaatacaatatttgtgaatttccaaaaaatattctgccatatttgggatgagtgctcgattatacttacctactactcgagcgcctcaggcgttttataactgcttgagtgttatataagcgttgaagtgctacttccattgcttgaccgtcccctatttttccaaaataataaactaaccacaaaaaatatgccgattcacttttcaccctttaaacagctaacttgtcataaaccaaacctttttacctatgactttttgattgaacgaataataaccttgaatcttcaatggagaataagttactatctaaaaagtttcctaagccataaaataaaatggaacaaaattgccaacatacaatgtagactaatcgtcctaacaaaccccatctttggttgttgttcctttaacatccatcaccaatgcctctcaaaatcaaatcgatacttgttggcctagaaaggtacatttcaaaatgccttgactacttcattggagacaattgttccttggatcatagattcaagaacaactacccacataatagaatgtgcaaatttattttccacttatactcttgattctagtcaccttatggtcaaaattgcaaatggatcccttgcaacagttgcaaggataggtaaaataattctagggacccatataactctttctgttgttcgccatattccaaaacactaatgcaatttaccatctattagtaaacttaccaaagatcttcactatgctgcctatttcttacaatctcattgtgaatttcaagaagtgactccggggtaaaagattggcagtgctaaggaacgtgatagactctactattttgaggaaagcagcaaggcgaatgagcacactctaactactagttgtgaatcttcaactttgtctaggaagcaagaaataatgttgtgacactttggataaagccaccctaattttcagtatttaaaacatttgtatccatctctttttagaagtaaagatgtttttcaatacgaaatttgctaacttgcaaaacaccaacactctttttatccatcccaatcatacaaatcttccaaaccgttttccatgatacagtgacatttgagggccatcttgcacttagaacataattgggaaaaagtggtttatcacactcattgatgatcacatgagtcatcttggtatattgactgaaagaaaaaagtgaggtcaaacaaacctttaaaaattttcatttaatggttcaaaatcaatacaatgcaaaaatccaaattttatgtattgacaatggtacataatatttcaacactatacttaattattattttttggaacaagggattattcatcagagttcatgtgtaaacacaccccaataaaatggggttgtcgaaagaaaaaaatagacatttattagaagtgacccattccctcatgtttaccacaaatgttccaaaaaccttttgtggagattcaattcttatagcttgctaccttataaaccgtatgccaacccgagtactccaataccaaactcccttaaacaacttcctcaaatgcttccccatactcgattagtaacctcgctacctctaaaagtttttggatgtaaagcttttgtccatatacatgaccaaaaccaaaacaagttggatcccagggccttgtcatgcaatttccttggatattcggtcacacaaaagggctataggtgccattctctagaaaaaagaaaatactttgtcaccatggatgtcacgttttttgacaatcagccatattatcccaaaaattcacttcagaggggagagtgtgagtaagagaatttttgggagtgggattcagctctgccagttttttcatctcgccaatttcagcaacagccacccaaaaaagaatcagattctgtgtgccattattgctgctagcaccagccaaaacagccaatccatctgtaccagccaaaaacagcccaccagaaacagccaacccagaaacagctgtgccatttcctgccaaatctggagtgtcaacgactcaacagcatcccagcacagtggaaacgggtctacttgcgtaggagcaatcccaaaggagtggagaacaaaatggaccctcagtcctgccaagaatcagatccgaatgctcttcctgaggtaactgatcttaaccttcccattgtagttagaaaaggagtcagaacttgtacccgacatctcatttctaattttgtatcttatacacatctctccgtttctaattttgtatcttatagacatctctcaccatcactgcaagcatttgtctcaagacttttgggtgctgaaattaccaaaaacattcaagaagcattaagggatctgaaatagagacatgctgtgatggatgagatagaagccttggagaaaaatcagacctgggatttggtcaagaagcccgaaggaaaggtgccaattgggtgcaagtgggtatttacagtgaaatacaaatcaaatgggtccattgagaggtacaaggcaagattagtggtgaaaggcttcacatagacttatggaattgattatcaagagacgcttgctccagtggctaagcttaatattgtgagagtccttctatatcttgctgccaatctagattggcctctccactagcttgatgtaaagaatgctttcctaaatggagatctcgaagaagaagtatatatgggcttgccatctggatttgataaagacagaagaattgggaaggtttgcaggctcaaaaaatctctttatgggttgaagcaatctccaaaagcttggtttgagaggttttctaagacaattttgcagcaaagttacaaccagacacggaccaaatcacattatgttctaccaacacctagatgggaaggttaccattctcattgtttatgttgatgacatcattataacaggaaataatgaagcagaaacagagcggctgaagaataaacttgctaccgagtttgaaatcaaggaccttgggttgctacggtattttttgggaatggaagtggtgagaaatagatctggtattacaatatctcaaaggaagtatgttcttgatattctgaaggagatcgagagagtggcactcccgttgacattggtagatatcaacacctagttgggaagctaatctacctttcgcacactaggctagatattgccttcgcaataagcgttgtaagtcaatacatgcatgcaccttgtgaagagcatttggaagttgtttgtagaatcctaaagtaccttgaggggactcctagaaaaggacttttctttaggaagaatgaaggagcattgaaggataattgatatagactgagctagttttgtggaagatagaagatcaacctcaggctattgtactcttgcatggggaaacatggtaacatggagcagcaagaaacagctggttgtagtaagaagctctgcaaaagcagagtttcgggcaattgcttatggcatatgtgagatcttgtggctaaaacatctcttgaaagagttggaaataaaagaagatggaccaatgaagatgtattgcgacaataaggcaacaattagcatatcacacaatctggttcatcatgatcgtacaaagcacgtagaagtggatagacattctatgaaggaaaaaattgaagatgacaccatttgtatggtttatgttcccacaagtgaacacgtaactgatttgcttacaaggcacttgcaaagaagctgttgagagagagagagagaaaggagaaaaaccttattcacattcattgtaatctctacttacaattgagagatatatatatacaaggctaggagtcctaactaccatacatgtgacctatattaacaaggaaagatagtatactatacatacattatattcaacactccccctcaagctggagcatatacgtcatatgcaccaagcttgttacaaatatatttaatcttaggacctctgagagatttagtgaagatgtctgctagttgatcatttgaattgacaaaacttgtagcaacacatcctgatgcgatcttctctctaatgaaatgacagtcaacttcaatatgcttggtcctttcatgaaagactggattggatgcaatatgtaatgcggcctggttatcacagatgagtttcatctgttcatcctttccaaatctcaactcctgaagaagatgtctcaaccatatgagttcacatgttgccaaagccatagctcgatactcggcttcagcgctagatctggccactacatcttgtttcttactcttccaagatattagattatctccaataaaaacacagtaccctgaagtggaacgtctatctgtgggtgagccaacccaatctgcatctgtgtaaccaacaacttgagtatgacctttgttctcgtacaatacaccttggcctggtgtacttttgatatatcgaagaatacagattacggcatcccaatggctatcacatggtgactgtaggaattgactaacaacactcacaggaaaagaaatgtctggacgagtaatggtgagatagttcaatttacctacgagccgtcgatatctcccggggtctcctaaaggctccccctgtcttggtacaagtttgacattcggatccataggtgtgtctaccggtttacagtctaacataccggtttcttccaggatgtctaaagcatacttcctttgggaaaggaccacaccagaactggattgagctatctcaattcccaagaaatacttgagtttccccaagtctttggtctgaaagtgggtaaaaagatgttgctttagtttctgaataccatcctgatcactgcctgtaatgacgatgtcgtccacataaacaaccagataaatacactgccccaaggagttatgatgataaaaaactgaatggtctgctgtactgcgaagcatgccaaactcttgaacaacagaactaaaacggctaaaccatgctcgaggagattgtttcaagccatatagagagcggcgtaacctgcacactaaaccagactccccctgagcaacaaaaccaggaggttgctccatataaacttcctcagcaagatcaccatgaaggaaggcatttttaatatccaactgataaagaggccaagaacacatagcagctatggacagaagcaagcggacagaagcaatcttggcaacaggggagaatgtgtcaccataatcagaaccataaacttgagtatagcctttagcaactaagcgggccttaaggcgatcaacctgaccatcaggaccaaccttaactgcatagacccaacgacaaccaactgtagatttatcagagggtaaaacaacaagatcccaagtgccattagagtgcaaagcagccatttcatccaccattgcctgtcgccagcctggatgggaaagagcttcatgggtgctctttggaagagaaacagaggatatagtagaaacaaaagcagaatagggtgaagataatcgatgataattcaaaaaattgtaaataggatgaggattacgagtagagcgagtacctttccgaacaacaatgggtaagtcattaggagaaggcagagccggggcaggtgaagccgaagggataggaagtgagtcagcaggtgcctcaggaaaagggagaggagcaacgacacgagggcgacgatgataaacctgaagtggtcgagggggcatagcatcaggtggggagacaatgggaatgggcaagacttcagaaacaggaagagactcagaagtggtgaaaaagaatggtgagtcttcaaagaaggtgacatcagcggagataaagtatcgatgagtctcaagggaataacaacgataacccttctgaagtctggaatatcccaagaagaggcacttcatggctttggcggaaagcttgtcctgtccaggagtgagaatatgaacaaagcaagtacaaccaaagacacgaggaggaaggaaataaagtggttggtcagggaaaagaagggagtgaggaatctgatcgtgtaagacagaggagggcatacgattaatcaaataacaagcggtaagaacagcgtccccccaaaaacgaaaaggaacatgattatggaggaggagagtacgagttgtctcaacaagatgtcgattcttgcgttcagctaccccattttgttgaggagtatgagcacaagaagactgatgaagaatcccatgatgagacataaacgaagtaaattgggctgaaaaatattccctggcattgtcactgcgtaacacacgaatagaaatattgaactgggtttggatttcagtataaaatttctggaaaatagagaataacttagctcgatttttcattaagaataaccaagtacatcgagaatagtcatcaatgaaagtgacaaaatactgaaatcctaaagtagacgcagtccgacaaggaccccaaacatcagtgtggacaagctcaaaaggagactttgcccgattattcaaacgctttgggaacgagacacgagtatgtttcccaagctgacatgactcacacggaagtgacgacaaagtggaaaaacgaggaaccatcttctggaacttggagagactagggtggcccagacaattgtgaatgaggagaggagcatcagtggaaatgcaaactgcaggagatgaatctgaggtgaggtgatagaggccttgagactcacgtcctatgccaatcgtcttccccgtactccggtcctgcaaggtcacaaatttatcagaaaaggtaatagagcaattaagagtacgagtgattttgctgatggaaataagattaaaaggacattcaggagtataaaggacagaagtgagaggtagagaaggcaaaggaagggccaaactaatacctttagccacagtttgagaaccattagctaaggtaacagtaggtaaatcagaggtagtagtaatagaggagaaaagatccttattactagataggtgatcagatgctccagaatctagaatccagggtccaagagaagatgtgtgggtaaggcaggtagaggcattaccaggctgggcaacagaggcaatagaagcctgagatgtctgagatgcggaggagctcggaggctgaggcagcggagaatcagaggactgggccatatgggcagtgcgaggaggtcttccatgtaactgatagcaacgatcgcgagtgtggccaagtttattgcaataggtgcaatgaggacgttggcctctacctcgggtaccattgcgtcctcctcgagaggtagtttgagaaactaacacagaagaatctgaagcgctatcagatggcaaagtctgagtggacgagatacggaggaggcgagcaaacacattatccaaggacggaactgatgaactaccaagaatctgatcacgaataggctcaagatccggacggaggccgataagagtaaggactatgaagaacttgtcaagctgtgtttgttgagccccaacatcaggagtaagaggcatcacagtcaagaactgctccttaagagaggcaatctggccaatataagtagatagatccaagtcctgttggctgagatggacaatagtagaagccaccttataaagacgctggatatcattcgtgtataatcctttggcctgagtccaaaatttaaaacaagttttataggcctgaagatgaagaagaattcggggatcaaccgattgccataatacactacacaactgtgcatctatcttcctccaaagtacgcggtcgacctcagggatatctgcctcctgtgtaatcaagtgattctcatatccttgacccataaaccaaagttcaacaaaggcagaccaggaaagataattttcactcccaactaatttctccgaagtaatcataggagatccagatatgacagaggaaaaaatggaagctttagtagccatatccacttatctggagaatgaagtatgtttggatcgaagagagccctaatacggcttcagattgcagcgtggcaccaccgaaaaagggagacggcctcagatcgcggtgtggtaccaccagaaagggagaagaacacttcccaaggcacgtgcagggattggagtggagaaaaagtggtcggagcttcgccggaaagactgtttggagggccgacgaagacaaaaatccccaaaagaggtacgtgcagggctcggatgggagaaccagggaagtgggaaggctgatcggcgtcaggcgaagctggaggaggaggcgcgtcgccggaaaagctctcacgcgcccccacgcgccggcgcgtgagattcaaccgccggcaggaaaattgcgcgtggctgctcttttggtgctggtgccttcacaaaagttggagatctcctccaggcgctccttctggtatggtcggtgtcggaaaaataggtcgccgggaaattttgccggaaagttcgccggaaaatttcgccggaaaatttgccagcggtgagtggtttctaacgacgatccgactgactggaaagtattgggagatggggaaggtgaccggaaagaaacacggtcaccggaaggtttcccggagttgatgacacggaaaacaggaaagaattaggttttcttccttggctctgataccatgttgagagagagagagagagaaaggagaaaaaccttattcacattcattgtaatctctacttacaattgagagatatatatatacaaggctaggagtcctaactaccatacatgtgacctatattaacaaggaaagatagtatactatacatacattatattcaacagaagccatttgagaaacaagtcaataagttaggcatgttcagtctgtacaacccaacttgagggagagtgtcgaaaagtttgaagtttgaattattcaaatatttgttgatttgaattagtcactgaagtctgttaagattagaagttaatttgtttgtttttaaatcttatcagattaggggttattttttcaaataagggttggatatcaaccaggttgttaggataaggtttctggtttcttcaatataaggatttttgaatcctagagtcatctataaatcctgttgtacttcctattaaaaaataataagatttcggtgctgttttttcttatactccggctgcaatcagccatccacttagagacaattttgctttacaagttttagtgggtttccttcttttatattgtagtctgattgtattgtgcttttgacagttttatacttcttttgttccatatacagtcaagatatgcacaattgtatcaacttgctttttcttttgcagtttgctgatctaatagcaccgattgagaaaaggat

SEQ ID NO: 12974 - DNA, 12514 bp, Vitis vinifera
  Intron number 12 from transcript GSVIVT01015912001 (locus GSVIVG01015912001) derived from phytozome v7.0 (chr-ID chr 3; pos 19284834 to 19297347 reverse strand)
tcttactaagctatctggtgaacataagtgggcaggtcagttttttgtttaatgaagcacactggatatctcatatgaatgcatgtgtgtgtctttttttatttttttttggtctgtgcactgagcatgaaatctacaaagtatagtgttgactgtacttcattttttatctcatagatacttcatagtgttgctatgtgttcctctgaaccatcagcatggaaagcctacaaggaaaatgtgatcgaagcccattactagcaattgtcgactatggatgggtcataaagaaaacatgattgtctttatcaattgttatttgtgatttataaagtgaccagcatttccacattgtaatgtacttcacatggaactgctttgtaccatatattcacatttagaatgtggctatgattgtggaatcggttctctctgttttcaaatgaaaattctgactatgtgctttttttttaaagtctcgggattaaaaagaataattgttactttttgttttcatttttatttttattttgataggtaaagaaaagatctattgaaaagaggcaccaaaagagcgactcaagatatacaatacctatacacccacagccaaaccggccaataagtacaagtaaacaagcgcccagtcgagtaaaaaaaacaaccttaactagagcccaaccaatcaatgaaactaagtaaagttagagggcgatcagctataaacaactttgcctctgaccaaagggaaaaagaaaaaaaaaatttgagtctttgaatcgaaagcacatcatcattgaaggccaatctatttttcgccttccaaaccatccaaaagatgtatagaggagctgctcttcacacctttttatgttttgtgcccacaaaagaaccatgctaactaaggagagtcttcctaactgaagaaggcaacactcatgacacccaaaccaaggtgaagaacaattcccataagacccttgttttaatacaatgaagaagaaggtggtctatagtctcttccttctcatggcacaaaaaacatctatttgccagggcctaccctcttttttgaattaaatccaaagttaaagatttgccctatgtagattcccaagcaaagaagctaatcttgggctacacctacacattccaaatgcaacttgagggaaacaaagaaggtttggctggctctagagcatagtagagggatttgactgagaacttcccactctttgttttagtccaaaacactctgtcttccacatcactgcacacactcttcccatgtagctgccccaagaagatttccaccttttccatttcccaattattaaaggatctgtttttttttttttttttttgataggaaacgacaaagagatatattgatagaaataagaagtacaagagaaggatgagaaatcctcccaccaaagaaaaactaaacaacaagaataaaaaaaaaaagaaactacaatgtaaaaacaaacaaactctctaggttagaccatcccgttggagctacacactgttagccaatctagttgtaacacattaaggggaatgcccttaaaaaccatggaacaaaaagcccagagagaagtaaggaagtgaatggaatcccaaagattctctgaattctttactttatcctcaaatatccttgcatttctttcccgccacacaacccaaattaaagtagtgcacgcagtttgccacaaaactatccctttcttggataatccaaaacctttataattgatggacatcatgtgggagatgctccttgggggaaccaatccattttggctaactgaaataatctgtgccacaaccccatcatcaaagaacaatgtaggaaaagatgatctactaattctccatgcttcatacacaacttataaatgttaggactaagagctttgtagggtcttctcaattgtagcaagtcattagtatttaccttcttgtgtgccactaactagacaaaggacttgactttaaaagggacttgagaattccatacaaacttaatagggaaaactggagaagaattggaaaagtgggacaaggctagaaaaaaagacttgactgtaaaaagccccgaagaagataaagaccaagatctcgcatatgaaaccgatggggataaatgcaaacaatcaagtgaccgcatgaggctttctaaatcttctatcttagaatcggaaatgttacgacggaaattaaagttccaagagaaggggcgaacagaaccgagaattgaagatataagaatatttttatccgtgactactctaaatagtcttggatattgggaacccaaaggttggttcccccaccacaagtcttcccaaaactgaattctttccccatctcctaccacaaaccgagtatacttggaaaaatcctgaaagacttgtgcaatagcctttcaaggacaatgatgtgaccatctgactatagtgttggcatcccaaccattggaatgtgttccataaatgcttaaaatgacctgatgccacatagctgaactctccctagggtacctccacaaccatttccctaagagagcgagattccttagagaaatcttcccaaattccaatcccccttttaccttcggattacacactatatcccaactaacaagatgatcttttttaccttccccaattattaaaggatcttgacaaacaagggttccatccctcttagccaaggggtcccaaatatccgccacccatgcttacttatcaacagctaaagcaaacaaggatgggaatgacacacacaaaggagaattcccacaccacctatccctccaaaatctcaccctctacctattgcctacaagaaaagaaatcctagtacctacaatgtctcagtttatccttatttctttccataacccaacatcatacgtctttctcacttcccgagaacaccatccccctctttcttccccgtactttcctttaatcacttgattccacaaagcctttctctcatttgcaaactgccaattccatttacaaagaagagcctcattgagtgtggaaagacacttgacccccaaaccctcttttttcttacttaagcacaccaacttccatcttactaaatgaggttttcgctccaaatttccacctccccaagggaaattcctttgaatttgctctagtctctgtctaactgagcttggcatgcgtaacaaagacataaacccccttcagggttgtctttgggtaccctttgtatatgtcctatataacttaatgtatagcattcttgtttacttataaaatttatccttttatttgtcaaaaagagtgtgtgtgggtgggtggaggggtgttgttcttgatgaggaagagagtggttgtcttttggttgtcctattccattccttcaatatagatttcaaggcctttaattttgccgccaaaataaaacttgaagagccattaaagttgtccccctcccaccacaacttcaagagatccttaaagccctccaccttcagccacatattctcaaatctaaaaagggagggaactctcctcagacctctgccctctaaaagaatcgggaaatggttagacacaggtcttggaaagacacattgcatcgacccattaaaacgacagtctcaccccttattcactaaaaaccaacctagccttgacatttgactgattgttcacccctccactccaagtaaagggcccccccccaacaacggcaggtcttttaactctaagtcttccattaccttagtgaaccttctcatgtctgagttcaaactcccttccctgctatgctcttcacgacatctaattgagttaaaatccccaacaacacaccaaggtcactccaaagtccctttatggcccccaactcatccaaaaaacactccctatccctccttagagttgggccataaacctcaataaaagtccacctgaagccatcctcacaattcttaaaatggcaagagattgagaacatgcctgcttccaattcaaccaattccaacaccctattatcccaaaaaaacccactatacctccaacagctccccttgagttcatagttccccattctaagaatctccctactcctaaattgtgaacgagaccccttgacatttcttggatcttagtttcctgcaagcaaaccaaatccaccttattcttttttatcaaagctttgatcaccttccttttgtctctatcattagcccctcttacattccaggaaagcattcgaatcttcatcttgaccaacttattattttcttgttatcatgtgaaagataaatatcatttctaacggttcattgttctattacacatcccttcatgaagtaccttggttagaacatcttctaactgtttttcggtaggtacataaggcatgcagatcagtccggcttttggcttctccttgatgaagtgacagtccacttcaacatgcttagttctatcatgttgagctggattatgagcaatgttagtagttaccttgttgtcacagtagagcttcattggcttcttactagaaattcttaggtcttcaagcaatttcttcagtttcagcccgacttcttgcaacaatagactgcttcttgctcctccaattcattaggtttcctcctacaaaagaacagtcacctgaagtagatctctcatctgttatgctcccagttcaatcggcatctgtataggcttcaacctaaaggctattgttgccttttcctggactcccttttaggtacttaagaattcaatagactgcctcaaggtgttcttaatttggagagtgcatgaattggctcacagcagtcactgaataagttttcacacaagcttatgatagtgttctttgtcagcacaccgacactctttttagtaaccctaatttgcaagtacaatcaattggagtctcaattattttacaccctagctatctagtttctttgagcaaatccagtgtatacttcctttgtgatgcaaaaatactttcctttgatctagcaagctccattcccaacaagtacctcaacattcccaaatccttgatcctaaactctttagccaaaaaattcttcaatctctctaattcaactcatctctagtaaggatgatatcatccacgtacactattagtataacaagcttgtcatcactagaatgattgagaagagagtatgatttgcctggctttgtgagtgcccatggcttctaatagactttgcaaatctgttaaaccaagctcttggttccataggaattagtttttttcaacctgcacacctttcacttccaaatcttctttcaaaacctagttgtaagacatgtaaagttattcctctaattcaccatttggaaaagcattcttgacatctaattgttgtaaagaccaattcaaggtggctgcaagggataagagagctcttattgtattcaattttgcaaccggtacaaatgtctcttggtagtcaatcccataggtttgtgtcaagtctttcacaaccgaccttgctttgtacctttcaatggatccatctgcattgtacttcacagtgaatacccatttacagcccatgggtttctttcctcttggtgcatccacaaggtgccatgtcccatcattctcaagtgccctcatttcttccaaaacagcttgcttccactttggaatagccaaagcctcctatacgttctttggaatttcaacactaaatagattagtagtaaaggctctcatagtgtgagatactctatgatatgagacatctttagcaataggatgttttgttttttttttttatgggtaaaaaagtaattgtattaaaaagaaaagcatagacgatgtgtacaaggaaacaaaaaacaaaaaagtgcagacacacaaaaacaaccgcaccttacagagttcttaaccaatctacaaaatcaagcatcgacaaggagccctccccaatatacaatcttacccaatccctaatatacaatcttacccaatcccaaaatagatacaaaaaagaactttttaaagaatgatctgaacattcacaattctcaaaggctctcctatttctttccctctaaatagacaaaaaaggcataatggagcaaccttccaagcctttttcctttttccaccaacaggaaagcctccctaactcaagagtaaacctctcaccgaagagtgcatcacccattgaacactgaataaagcaaaaataagatgccacaatatacaagctttcgggtaatgaagaagaatatgaacactcgttttttcttcttctttgcacatgtggcatctattagacatcttccaccccccatttttgagttgatctagagtcgatatcttgaccctaacagggacctaggagttccagactatactatgagggaaaggatccactcctttaccagtcaaggaggagtagaagaacctaacagaaaaaatactactctttgtgtcaactcactccactgaatcctcagtatccatagaaatagaatgatcatatagcctcccaaagaagatgtctatctcctccagctcccaaaagggccttattagaggttccaagacttctaaatcctaaccctcctttcactttttccaaacaaacaaccgaccagctcaatagatggggtttgttaaccagagctcccccactccaaaggaaatccctttgaatcttttccaatctagctgctaccctcttaggaatgacaaaaagagacataataaatcggtaaactagataaggtgctcttaatcaaggtttgtcttctgccttttcagaggctagccttttctaaaacctcttctccaccccttcccaaaccttagaaagcttattgggagctccaagagggagaccaagataggtggttgggatggctcccaccttgcaacctaaaacctctgcaagctccttcaaatttgggacattccctactggaatcatctcacttttccctagattgatcttcagctttgaacaagcctcaaaccagataaaaacccaacttagatactcaaggttttccttactagcatcacacaagattagtgtgtcgtctgcaaacgacaagtgagacacctccactcccacaccattcctccctttgactaaaaagccattaatgaacctaccttcctttgccttagagagcaaatggaaaagagtctccatcgccaagatgaacaagtaaggagacaagggatctccttgtctcagccctctagagttatggaaaaaacctgaaggggagccatttaccaaaacagagaagcgcgctgttgaaatacaccatctgatccatcctattcacttggagccaaacttcattttctccattattgccaggataaaattccaattaacatggtcataaaccttttcgatgtccagcttgcataagatgtttagcaataggatgtttagtacaaaccctggtacctttcctaatactaattggaacatttagatcatcactagaggtatttctgcattagaattatcagaggaaagagatttggcagttggaataacaaatggaagacatttaggggttggaatacctattttttccaaggtacatacacttggatgtgatgtttggtgaattgtaagaggttgatattccatgccttaatctttcttcctccttaagtagacatggagttcgatgtaaggttgttcaagtagtgtttctccccttgaatttgaatttagtatagccacgggtagttcaagttgtgtttctccacttgaatttgaatttaacataggcataggtaatgaacttgaaattttacaaaaagaatcttccccagtaattcttttccccttaaaagaatgtttttataaagtcaggcttgtttttgaaaaaagtaacatccgtactcacagaagatcttttagaaactgggatcatagcatttaaacccttattgagttggggaataaccaagagacacacacttgacagacctagggccaagtttggaacggagttatttttggatacgaacaaatgctatatgcccaaaggcttttaatgggacagggttaaaaatattttgagaagaactgcaatagggcttgaaatttcagaattctagtagacattctatttgtcaagtaagaagccataaggactgccctactccaaaggtacttatgaactcccatggtaaccataatagccctagtcacttctaataggtgtctattcttatgttcaacaattccatttttttgtggtgtgtcaataaatgagaattgatgaacaatgccttgttctttcaagaaagggccaaaaatggtaatgaagggggttggcacactaaagaagtgagagaagcttttagtgtgaagatgcaggaagatattatgaggagatgtaaagagttaaatagtaaaacttccactgtggtttgaatggtgaaagactaaattatgcttggataaataggtacagaaaggaccttcagaagagtctttttctgtgctgcccagcatagtctctttcaaaaatgttaagactagcagattttgggaatataatgtgtgtttgatacatacacacaaacacttatctatagcacaactatcttaattccttatcaatacaagaaaggaaagattgaatcacagcgggtaagatatgtgggcttagaaggtttcccaaatgtatgaacccaaatcagaagcaaccagtcctgaagaaggtaccaatatgcatacatcattgcatggaagaacctagctcaaccagatcaagagccctaaccaagccctactgacctcctttggctctggctcatcacaattccaatctcagctttcttttgccatttgtaaaacttagttatcccctgccttgcatcctcagtcctaggccttgtgcttaacccataaagctttcaatagaaaaagggaatacgcaagattgtatttttactattctattttaatagaaactacttgcaaatctattgactattatttagaaactaaaagaaatagaaactttccaatataacaagaacagaaactcaagcaaaattcaatcctaccataatagaagtctcaagtaggacaatgaaaccaaactatccttgtcttccccttcttgagaataaatcctaggggttcattccttatcatttccttagtctattgaaatccaaagcaagttcttccaaccattcttcctcatcccatgtgaatgaattgattatggacaagaagaaatttacttggcataaacctcgcctatgaaacatgtgatttgcaatgatttcaactcttgcatactcttagagaccctttgtcttgaaatctgttttccactcatcttcatggccttctttgaccaaattcaatcacaccaaaactaacctcgaaagtaggtaaactttttattcaggtaccttgagtgtcaactcctcattcaacttacatactagtgggtaatgaaatttctacaacccctttgctttggacagcatactctattttcaggggtgcaagatagggagtcttcctaccacctatttgggtctcccccttggagccccctacaaatccactagggtatgggattcaatagaagaaagattcaggaaaaggttgtctctctggaaaaggcaatacctttccaaaggtggccgtcttaccttgttaaaaaacaccctctccagcctcccaacctacttcctttcccaatttgtgatccctaagagggtgtgtacaaggcttgaaaagatccaaagggatttcttatggggcggtggtgccttagagaacaagcctcacttagtaagttggaaggttatctgtgctgctaaaaaggatggaggcttgggcattcgcaatctagctatttttaacaaggcccttcttgggaagtggttgtggaggtttgctaatgagaatgagtccctatggaagcaaatatctctagtaagtatgaccttcaagatgggggatggtgctccaaaggtgtaagagatcgttatggggtgggggtttggaaggccatcagaaatggttgggagagcttccgttctcactcccgcttctttgtaggggatggcactagagtgaagttttggaaagacttgtggtgtgaaaaccaatccttggaagaagctttccccaccttgtttaatctctctgtcaacaaagatagctgggttgctgaggcctgggaggaagacggagttgggggaagttgggcgcctcgttttaatagacaccttaatgattgggaggtgggaaaagttggaagcttgttaggcaagctcctccctatgaccattagaagaggtgtgaacgattcgctccggtggaaagagaacaagaatggaaccttttcagttaaatcattttatagctctctctcaaggggcatcaaaacccccttcctggccagaactatttggacgccttgggtcccaattagagctagcttctttggttgggaggcggcttggagtaggttgctcaccactgatcgtctgaagagattcggttggagcattcccaacaggtgctttttgtgtaaaaaggaagaggaaaccatagatcaccttcttttgttttgtgaaaagaccagaatgctatggcttttgattctctccctctttggggtgcaatgggtgatgcactcctctgtgaaaaagaacctcctgggttggcatggttcttttgtgggcaagaaaagagagaaagcttggagagcggcccccctctgcctgatgtggaccatttggaaagaaaggaataggagggccttcgatgatattgagaggaacgaccaaaatattaagtccatttttttgtacacttttgtgaattgggctagggtatatataaaggaacacactttctctttgatagattttgtagattggctagccaccaattaagggtgaggcttgtttgccctttggtgttttacttctttgtatcttggtatactccgtgtatactctttcctttgccttttggcctttaatgaaaatactttacctataaaaaaaaaaaaggttagcataaagattcccattctccttattctctctttcaaactccttattggtatgagcaaacctgaagaggttaatgatccaaccctcacatcaaggaaaataggtgaacaatacatgagttagagaatatattagtagagatgctcctcagattcccagtcagaaacattgcggcaaaaattgaggttccaagaagaggttgaggtggagggagctaatctggtttgaatctcttcttgggcttgcgttgcttcacctgggattacctctttggttttctttttttttcttcttgagatcattcgccttttgcatgtaaagggcttttactgcttaattattagagattgctcaaatggcaacagtttcatgtacatatacatctgtggtgttgtccctaaatgagttaacagacaattaacatccatttatcaatgtatagcatggaatttgtggtatgccaaacttacacaataaagtttcttatatttaaggtaaagtatacatatgtttgttctaccatactaatgttactagaattgggatgaagctttttcactgtaaaaaaaaaatgttaaacagacaatttaatgagtaatatcagatgttaaagctggtttcctcaagtaatcattttagggctagtagtttgtgagtggaacttctgtggatacatgatctgtagtcatagttggggtaccatgttccttatcacctgatttagggcctaggagagtggttctaaccaggagatgactccacagtgcttttgggatgcccgggcaactagatatgttgtttctggaatcctgttattcattgactcagttaacagaacacaaacttatagtagataagtcctaccaagaaaatcatgtaagccaaaggatcgatgtctttagataattagatcatatagtttgtaaaattttccacacttttttttccatatgattggataatttggatttactaatttatagcaaccaggaagctggatgatctaaaatttcttaacttacactataaatttatattacatctttctatctatctgtcttaatcctatggtttcaacagtggttataaataagagaaaagctatacaactataggatctgataaacgaattcaaacctcttttctagtctgttgccttagttttaccactttgttgaattaggcagtaaaatgttggctgccatgtggatgccttaatcagtctgatacatcatctttttttctgttcatattgtagtaaattgatcatctttaattcttgtacttaccttttgcttttatgagagtttccaaaatatcttggttcccttcatcgaaggtttttttttgctaggatggacaatttcattgcatttattaaatttagatggcaaatttctatcctttgcagatccat

SEQ ID NO: 12975 - DNA, 21536 bp, Vitis vinifera
  Intron number 3 from transcript GSVIVT01026291001 (locus G SVIVG01026291001) derived from phytozome v7.0 (chr-ID chr4 ; pos 12807236 to 12828771)
actgctggccccaagtatggtttactaaatcaaccaaaatagcatgtttttagtatcattaatgtttaaatttccatttgcttcatccagtatatataaggaaatagatacttaccttggagatttaatctaattcaccaaatacaaaatagatcacagatgctgctgcagtagctcattcaaactcctattcttgagaatgttatcttaagacttggatcatttgattctaaagaaagtaattcaaatctaaagtgtttctgaaacttcatatatttgaaaaaacctgtggaaacacattgaagcatgtggaattttaccacttatttatgaaagtaaatctatgtttttctttagtctaaatttgtagtatttgaagttcactgttaatagggagggagtttggttcagtttgctataagtagtcaacctatggatgacttattagatttatttatttatttcactttttgatgagcttggagattgatttgcaggttaggacaacttagagacctaagattctagagctgagactacaaagaaagtggtgatgaagctttagagagaggaaaatagggtatgtccaaaggttctgatgagggtgaagggggtggagacaaagtcctatgcagatgctgtaaagtcgaaatcgggaagagtaggtgattcaatttgattataggtgggggaaagagaagtgcgaggaaggttagattagatgagacagtgtctggtgggctggtggggtaataattcagctccattacctgagttagattacgtaaggagttggacgcatcaacattggcctttaaaggggaagtttgagggttgctgtgttaggcagaggactcttgttgtttgaatttgagttgccaagtaaggctgaccgagttctagctagaggcaaaagaagtattaaggagaattttcttattttggaaagatggaacccaaaggtggggtgtctttgcaaagactcctttgctaatgaggcttgggtgagggtggttgggctcccacttcatttgtggagtcgtgaggtgtttaaaagaatcggtgatgggtgtggaggctttgttatagtgaatgaagatattgattctttgtctgctgtagtgggctcggatcctggtgaagtgtgcggaaagggatttacccaactctgctcatgttgttgtggggtcggggtgctattcctttcatttgtggtgggagactccacctagtttcacgtaggtggtgctggagggaaaattctgcgaggagggtggttcaagggaaggagaagaagatgggggaagttcacgtgctgcttgttgtgggaattaaagggagaaggtggagcagttgaacttgtagttgggggtacaagacgtgtcgtctgttggaggcaacccattcatccttcctattgaggtctctgtcgtagagactgaagagagggttggggtaggtacttcttctgtccttgtgagagggggtaagaagtctttcttaaacagttgggtggtcttggtttagggtcgggtggtctcagatgtgggcctactggaatgggccttggggaggcccagggacaagataaggagctgcaggtgggtttgggtggggtctttaggcccattgctctaaatgagttaaaagggtgcagcgagggggagtttgttgtgggctttgggcccgaaggtgttggcacaacaggaggaggggttttaattgggcaagagtattcagtccctttctttagggcataagatgagttttcgattagcaaggttagaggctaaagcggagacaaggatcctcttgtagggatgacgacggctgcgatgccactggaggcccttgaggtggtggaaagagcgtcgttgactgacgaagctctatgtgcagcttctaggtatgtcgaaactccttcgttctctatgggggtcgggagctctcttcttctactccttctaggttcggttgggttgtgacgaagggggggtctttcggcgggttggccttcgtggatggtggagaggagcagatcccgttaagtattattttggttgatggcaactttggggagatggcctctgagggggggaagactatggctggtgaaggagtggggggtgaggttgaggagttgctacaggatctggaggggaaaggctgttgatggaacgacagctgtctagcgagattcaacaagtttctgggtttttcaatggaagggtttgaaggtgaaattttgaatttgctaataaggaccaagagaagaagagagcaaagtaataagaggggaaccacagagtctactaagtttgatcgggaactgaaaaattagagtgatccattaattataatgatgcgagcaaggagaactctttggttagaggaggtggggccagattctcgaccattagatgaagttaaaatttttatcttggaatgttaagaggggctaatgatagaaataaaaggaagttaattaaggccttgatcaggtcgaaaagagtggatttggtgtgtttgcaggaaactaaaattcaaggcatgacctaggggttagtgcacagtcttggagtgggaagatttttaggttggggagctgtaaatgcaaggggggcagctggtggggtggtagttatctgggataacagagttttggagttagtaggtatggaggtgggtctcttctcaatttcgtgtcactttaaaaattgcgaggatgacttcttgtggatctttacgggggtttacggacctatcttgaaaagatacagagaatttttttggaagagttaggtgccatttgagggttgtggactgacctatggtgtattggaggggactttaatgtgatcagatttcccagcgagtgtagtagagaaggaagaatgtttgggtccatgagaaggttttcagaggtgattgatgagttggctttaaaagatttgccttttcaaggggggccctttacgtggagtggagggctgaatggtcaatccaggtcaagactggatcggtttctggtttcggaggattgggagtttcattttagcggggtgactcaatgtacactcccaagggcggcgtctgatcattttccaattctgttagatggggggtggagtgaggagaggtgcaattccttttcgttttgagaatatgtggttgaaggaggaggggtttaaggagatgcaaaagggctggtggcaagatttcaactttagtgggtcttatagctttatcctgacagaaaaattaaaggatttaaaaaacaattggaagatttggaacaaggaagtatttggaacagtgggggtgaacaagaggttggctctggacagagtgtctttttggtctctttggtatgatctggagcggctaagagttttaaatgagtaggagttagaggctagaaaggaggttagggaggatttcaagaagtgggcgcttatggaggaaatttcgtggagacaaaaatcaagagaaacgtggttgaaggaaggcgataagaacataggattcttccataggatagcaaattctaatagaaggaggaattgtttgaaaaagattaaaattaatggcatctggttgtcagaagatcaagaaattcagaggggtgtggttagggcctaccagaatctgttatcggatcctggtggttggcaccttagtttgaatggtttggagtttgacagaattggggttgaggaggcagccggtttggaggagatgttctctgtggaagaggtgtattcggccctttcagagctgaatggggacaaggtgcttggtccagattggttgcctcacgcattctggcagttctgctaggatttcgttaaagatgggttaatgggtttcttcaaagatttttttgagagggaaaaattcgtcagaagactgaacaccacgttcctagttttagccccaaaaaaaggtagggcaaatgatttgagtgattttagacccatcagtttggtgggaggattgtacaagctgcttgcaaaggtcttagctaacaggctaaagaaggtagtgggaaaggtggtgtcatcaacccaaaatgcttttgttgaaggaaggcaaattctcgatgttgcgttaattgctaatgaggccatagactctttgctgaaaaggaatgaaagtggagtgttgtgtaaattggatttagagaaggcttaaattcatattaattggaattttttgctgatagtgatgcaaaaaatgggttttggggagaaatgggctggctggattggttggtgtatatccactgctacgttttcagttttgattaatggctcgccaacaaggttttttcaaagcactagggggttaaggcaaggggaccccctatccccttacttatttgtgatagggatggaggctttaagttgtctcattaatagagtagtaagaggggggggtttcctaacaggctgtaggataaggggaaggggtggcgatggtctccaaattactcacctgttattcactgatgatattctggttttttgtgaggcttcctaagagcaaatgtcttttttaggttggttgttaatgtggtttgaagccatttcagggctgagaatcaattttgataagagtgaaattttgttggtgggaagagtagagaacgtagagttgttggcccttgagcttggttgtaaagtgggagctcttccttccacttatttggggctccctttgggtgctccgtacaaatcgatggtggtttgggatggtgtggaagagaggatgcggaagagactagccttgtggaagaggcaattcatttctaagggagggagaattactctcattcggagcactttggttagcttgccaatctatctcatgtccttgatgcgtatgccaagagttgttaaattgagactagagaaaatccaaagggactttctttggggtgggggagctttggagaagaggccccatcatgtaaagtgggcaattgtttgttcagataaaaagaagggtggattgggtgttagaagtctttctatcctcaatagggcccttttgtgcaagtggagttggcgctatgcggttgaaagggagtccttgtggaagcttgttatttgtaggaagtttggggaggaatgtggagggtggagtacccgtgaagtaagggagggctatggggtggggttttggaaggaaattagaaaggaaggttccttgatgcttaaaaatattactttttctgtaggggatggtagaagggtaagattttggaaggacaaatggtgcgggaataatacccttcgtgatgcttttccttctttgtttgccttagcggtttctaaagatgcgtgggtagcagattgttgggattccttgggggaagaggggggatggaatccccgattctctagatctttcaatgattgggaggtggaggcagtggagaggctcctttcgactcttcaaggagagagactagctgctggtttggaggacagggtggtgaggaaagagacaaagaatgagaatttttttgttaaatccctttataatactcttgatcctagttgtgcagtcttgtttccatggagcatcatttggagcccttgtgttcctactaaggtgagtttttttttgcttgggaagcgtcatgggggaagttcctaaccctagatcaactcaagaggagggggtggaacttagctagtagatgtttcctgtgttgtgctgaagaggagatgataaatcacattcttattcattgctccaagcaagggttttgtgggagcttgtgtttactttgtttggtgttaattgggtccttcctctttcggctagagacactcttttaggttggtttgtttcctttgtgggcaagaagcgtagaaaggcttggttggcagctcctctttgtttattttggacgatttggaaggaaagaatcaggataactttggataaatgaggatttgtcgattcaaagaatgaaaaattcgtttgtttgtaatctttggtcttaggctaagtcttgtttagatgtaggacccttatctttaattaactttgttgattggttgggttcttgttgagggctagtgagtgtttgttttttttgtccttgccttttggtgactcttgtatactccttgtatgcttcgggttgcctcttaagtaccctttttctaatatatattctgtgtgtttatctatcaaaaaaaaggaaaatagggtatgagagtttgtttaagtttaattaagaaaatatgattctaggatagacaagggatttggttacttaaggattatatagtcagagttccctctaaatcttgaacaggagggtgggatcaaattagaaaagaaagatgttttaaagctccgatagagtcttagtactgtggtaaactgcttgtttggctttgatttgggttgtgtgacaagaaagcaaagcttagatttttgaggataaggtgaagatttcaaaggttctttgggattaccattcatttccttacttcctttgggccttttgctccacaacttttaagggcattccccttaatgtgattcaacttgattggttgtcggtatgtaggtccaaaggtgtgggctagtaaggagaggttatgtactttccatatggtgtataggtttacttagtattttggaggttgttccaattgtttagttttttgttttgggaggatttcttatccttcctttgtaccttttatatcattttttaatatattactttgttatttgtcatcaggaaaaaagaaaaaagattaacttgcttctttaagacctaaaccatgcttgacttagatgtaaaccaactagatatgggtatttaaaaatactcatcattgtccaaatatgtagaaatgaataaactaagtttaacaaacaattggaagagctactaacaagccactgatatgattgaatattttctatatcttggaatagttggatgttttcctaggcacccatgtcaagcctacagaactagtctgtcctttcctatcaaattcagtctttagtttccctagccaatctttgctaatggatcattaatatatgtatagctttgatgaattgtgaagaattggtgctggaagaggggaattttttttaaattgatatacatgatctatgtatcaatgaaataacttattcatatcttgtttcttatatagaatataaggaatattatcgcttagcctcctcaaaataacatttaaccaagctctaaataaagatgaatccactactctagtactcataatagcactcaaaatcttcttagcctcagcataaagcgcataaacgtcattaagagtattgactactttcattcatgatctatcccacatttgttagtagctatgggaaatcacattactaacacaatacatagaaaccatggaaggcgaacattttcctttcatcttaggaatatgggacttcctcttttggttgctggaagaatcaaccagtaaaacacgaatctcaacgtccttcaaaaggggatgtggcttagatatcttatgagaagtgtcaggtgccattgaagtatgagggattttaaaacatgaattctcaatcccttcagctgctagatcaaatgagtttgacccttcaatagaggttgtacttacaacatcactttcatttaagacaaatttcatatctttaagctacaatggaataaaggaaaaaaaatatcaacgagctatcctaataaagacaaagggagtagggttaagaatattttaccatctcttgagcttcttataatggtaaagatgagctagacacaccttagaaaaatttctttatcatcaaccattagaaggtcttctcagtcaaaggcatgaagtcttggttttttattttgtgttgccaataacaatctctcaaaccatcttcatcctccctaactttaggaagtggagccttgctctcaatatctacgatctcaatgagtactcttttttttgataagtaaagaggagtatataaattaaaaagaggtgccaaaatggcaacctcgggtatacaagctaaatacacccacccccacacaactcgaacaaaaaaactatcaaaatgggggtacaaaaacgtccccaccctcatcgagagcctaaccaatcaatgaaaccaattaatgtcaaaggaccatcctttataaaccacttagtctccgaccaaagaaaacaaacaaaagaactttttagtctttggatggaaaacacgtcatcttcgaaagcaattctatttcttgttttccaaacagtccagaagatgcataaggggcctgttctccaaacttcctttctctttttgcccacaaaggacccatcccagcctagaagtgttgacctaattgaagagggaagcacccaagacacccaaaaatagtaaagaacatctcccataaaacccttgtctttgcataatggagaatgatgtgatctatagattcttcatgtatttggcatagataacatctatctgctaaggactatcctcttttttgaatttggttcagggttaaagcttttccccatattgctccccaaggaaagaagctcactttgggttgcacccatgacttccaaatgattttcattgggaaaggagttagttgtttacaagctatgtataactatctgtatagctatgtacaattgtgtgcacaactgtacgtacaactatgatatacaattgtgtacaactaattgtgaccattcatgagattgcctctcaaacaatttctattaagttggatggtgctatttgtcgtggttcgtctcaaattttggaaatgagtattgatggcaggaagaagaagggatatatcacaggaaggaaggttgcatctgcagaggatgatccaaactataatgaatgggaggtcgaagatgctctagtcaagtcttggctcatcaattccatgactgaccagttgatgtcacactttgtgtaatgtggaacgactaaggaggtttgggatatagtcaagaggagctatcttgatgtctctgactcttcttaagtatataaattgatgaagaaatattttcaatcatgccaagctggtcaccctcttatagaatactacaattagttaaactcaatattcatggagcttgattatcgaaggcccaatgatatgacatgtgtagttgatattgagaagcaaaggaagtgtatcattgaggatcgggtttacatatttcttttaggtcttgatcacagtttgaatcaagttagtggtcgtgttttggccaccactcctttaccaagtctaaaggaagcctattcattagttcatcgtgaagagcaaaggcaggtcaccaggggaacaaaagatcactttgaggcttctgcaatggctatccataagaatagcacatagctaacaccttttactccttatattgactcttcttctcgctgctgcatttactgcaatagcaccaaatacacggtagatgtttgttggaagaaacatggttattcggagtggtacaagcttaaacatgctgaaaggaagaataaaaaatctgcttaggttactcttaccgatgctactcttttagcttctgcttctcaagtttctcgattatcttcttaagaaggtaattctggtttgacttttatttttgacgcctttaacacttgggttattgattcaggggtcactgatcatatgattagtcattcttccttatttgactctctaaggccctcacttgttaagtttgttcaggttgctaatgggactcctatgtcgatttcaagagtcgggaatgtctcactttcccccacactctccatgtcctctgtcttacttgcgcctagtctctctaatagtcttctttctattagtaagattaccaaatatcttaattgttctgtaaccttcaattctactcattgtgtgtttcaggacaatcttacaaagatcgattgacattggtaaggagaggggaggtatatactacttggagggggcaagggagttgcaatctaaatctaacagtgttattcaagtagcaagagagacatttgatagagaaaagattcttttatggcattaccaattagcttacccatttttttcttatttggaacgtttatttccttagctgtttcaaaatgttttagtttctagtttaaggtgcgaacaatgcacttatgctaaaaatcatcatgtgcctttcaaaataagtctcaataaaagtttgattctttttacttgtgtttttacagttgtttgggtcttttttttattgcttctgcttcggatcaaaaatattttgtgtcttttattgataattgtactagggtgagttgggtatatttgcttaatactaagaatgatgttctacatgttattcctcaattttctaaaatgactcacacaatttaatatttaggttaaattctttcactctaacaatggttgtgagtttgtgaattagtcccttgcttattttttcaataaaaatggaatcctccactagacaacgcgtacatacacgctacaatagaacgacatagcaaagcataaaaactaccacattctggaggtggctcgggctttatgctttactatgagtgttccaaaacgtttctgggctgaggttgtcatgactactatctctctcatcaactgaatgcctgtttgtgccattgattatcaaactcttttgcgaatgttatcacagtttcattatattccttctgctttgaatctttgtcctaaagttttttgttatgtatgttatgttcatatacactctcatcaaagggataagcttgatcctcatgctcttaaatgtgtctttcttagttactctaatttctaaaagggttataaatgctttcatcctcctataggcaaatattatgtctccatggatgttcaattttgcgaaggggagtcttaattttttagcaatgtgtctttagttccttttcaaggggagattagtagtaaggaagaggaaaggttatggttagaagagaagaggttatggatttcagtttaaggggaggattcaactgatttgggagaggggagtttgcatctgaggaaagaagcgatgaaagtctaactggattatttcaataatcaccttagagttgaggcttacatagatgtagattgggtaggttctattattgataggagatctacttcaaggtactgtgcttttgtgggagataacttggttgcttggagaagcaaaaagcaatatgtagttgctcgatttagtgttgaagcggagtttcgagccatgacccttgacatttgtgaactcatgtggctaaaaggtttattaagggaattacaagttaatcttgagaatcccatgagattgtattgtgataacaaggttgcaatcaatattgttaatagcccagtacgacatgacatgactaaacatgttgagattgatacatttcattaaataaaagattgatagtgaattgatttgcacttcattcgttgtagctaaactacaactagcagatgttttcacaaagggagtttagaatcctacattcaattctatggttagcaagctaggaatggaagatatctttgaaccagcttaagggggagtgttggaatccaaaaagtattcctgattttgtggagtgtatttgatttattcctgatttggtgcatatttagattagttgactatgtaaatcagggaagatgtaatttagaggattggtaggagaatttttaggaataggtcagttctcttattctatttccatttattgtacaagtttgaaagttgtatatatatttgtactaaattttcaaagaaatgacaagattttttttttccaacactcccttatcgaaaaggccctgtcaacaccctcttcatccccccgctcccacataggtgaacaatccttcactctcctgtttgccaaattaccctcaatgggtcaaaggtcgcctccccttcctcattggcagacccaataggagcatcgtgacttgtaccagcaacaaccaatgccttttgcaccccagagaaagaagaaggaaaacctcgaacacccaaggagtataaagaacgaggcaaagaagaagggtacctagaagcttcctctagtagggattcattagttagagttacacgataggccatcaaatgtaacccctttgcctctgcagttgtcgtgccattgagaatctccgaatcggccatccactccttagtgaaaacacttttcccaaaagccgtagcccctcttaaactcccaccaccactgatctgggtcgaacccactggctccaaagcattgtgattgggctggcccacttccactaaagtaggcccgccaccccctttctccaacaaggcacgacccaaactaggccccaactgggctatgtgcccatccctttctaactccaggtttttagccccatgggctccaaagtctaactcaaacctcgtgtctatagagccaattatggcccatctgcccacaaccataggccactcccctttctacttaaagttcccccaccatgccttccccttccaattgctctacccctcccaccttttcctgaaacttctcctagacattatcagaacctataataggcaagtcaagagtcaacaacctctctgcttctgacttcaccacttgaacacgacatgctacccccaatagattgcaaaggtagctgtgcaagccccacactactccccatgcatgaatcccctcaatcatccctaaccttcaaccactcacttttatgcttcttattcatcataaccactactgacacctatggtgacacttcccaccatagttggattgtaaaacaagaggaatctacaaccaattgtaacaacctaggtaagttttcccctttgacttcaccaagagcctagctcactgatgttgtgaaaaatgacttatgtctttgttgaatataatgaatttatagtgtacaatctttcctttttaatataggtcacatatatggtagttaggactcctagccttgtatatatatattttctcaattgtaagtagacacaataaatgagaatcaaggttttcttctctctttctcttaacatggtatcagagccaaggaagaaaacctaattctttccagtttccccgtgtcatcgatttcgggaaaccatcctgtgaccgtgtttcattccggtcaccttccctagaccccaaagctttccgatcggttgaatcgtcgtcagaaaacgttttccggtcggtcgaatcgtcgtcagaaaacattcaccgccggcgacttttctgacgaacttttcaggtgacatctttttcccacaccgcaaggagcgcctggaggagatctccaatttttcccaaagcaccggagccagaaaaccacccacgcgccaaccatgcacgtttttccgttcggtgattgcatctcacgcgccggcgcgtgagggcgcatgagccactttccggcgacgcgcttcctcctccagcctcgcctgacgtcgactagccacccttcatacctgtttctgccatccgagccctgcacgtgcctcttttggggttcttttgcctccgccggccctccgaatagtttttccgacgtcctccggctattttttctcaaccctaatccctgcacgtgccttgggaagtgttcttctaccttttcggtggtgccacagttgttttttcttttccatttggtctctcacacgggcgattcttcggtttttccttcttcaaccgcatttgaagccgtattagggctctcttcgatccaaatatacttcattctccagataagtggatatggctactaaaacttccatttttttctctgtcatatctggatctcctatgattactttggagaaattggttggcagtgaaaattatctttcttggtctgcctctgttgaactttggtttatgggacaaggatatgaggattacttggttacacaggaggcagatatccctgaggttgagcgcgtacagtggagaaagatagatgcccagttatgtagtgtattatggcaatccgttgatcccaagatccttcttcatcttcgggcctacaaaacttgttttaaattttggactcaggccaaaggattatacacgaatgatatccaacgtctttataaggtggcttctgctattgtccatatcagccaacaggacttggatctatctacttatattggccagattgcctctcttaaggaggagttcttgactgtgatgcctcttactcctgatgttggggctcaacaaacacagcttgataagttcttcatggtccttacccttattggcctccgtccggatcttgagcctgtccgcgatcaaattcttggtagttcatcagttccgtccttggatgatgtgtttgctcgcctccttcgtatctcgtccactcagactttgccatttgatagcatttcagattcttctgtgttagtttctcacactacctctcgaggaggacgcagtggtaactgaggtagaggccaacgtccccattgcacctattgcaataaacttggctacactcgcgatcgttgctatcagttacatggacgacctcctcgcactgcccatgtggcccagtcctctgattctcagttgcctcagcctccgagctcctccgcatctcaggcatttcaggaattctgttgcctctgttgcccagcctggtaatgcttctgcctgccttacccacacatcttctcttggaccctggattctagattttggagcttctgatcacctatctggtaataaggatcttttctcctctattactactacctctgatttacctactgttaccttagctaatggttctcaaactgtagctaaaggtattggtttggcccttcctctgccttctctacctctcacttctgtcctttatactcctgaatgtccttttaatcttatttccatcagcaaaatcactcgtactcttaattgctctatttccttttctgataaatttgtgaccttgcaggaccggattacggggaagacgattggcataggacgtgagtctcaaggcctctatcacctcacctcggattcatctcctacagtttgcatttccactgatgctcctctcctcattcacagtcgtttgagccaccctagtctctccaagttccagaagatggtccctcgtttttccactttgtcgtctctttcatgtgagtcatgtcagcttgggaaacatactcgtatctctttcccaaagcgtttgaataatcgggcaaagtctccttttgagcttgtccacactgatgtttgaggtccttgtcggaccgcgtctactttaggattttcgtattttgtcactttcattgatgactattctcgatgtacttggttatttttaatgaaaaattgagctgagttattctctattttccaaaaattttatgctgaaatccagacccagttcaatatttctattcgtgtgttacgcagtgataatgccagggaatatttttcagctccatttacttcatttatgtctcataatgggattcttcatccgtcttcttgtgctcatactccttaataaaatggggtagctggacgcaagaatcgacattctgttcagacagctcatactattctcctccatagtaatgttccttttcgtttttggggggacgctgttcttaccgcttgttatttaattaattgtatgccctcctctgttttacatgatcagattcctcatttccttctcttccctgaccaaccactttatttccttcctcctcgtgtctttggttgtacttgttttgttcatattctcactcctggacaggacaagcttttcgctaaagccatgaagtgcctcttcttgggatattccagacttcagaagggttatcgctgttattcccttgagactcattgatactttatctccgctgatgtcactttctttgaggactcaccattcttttccaccacttctgagtctcttcctgtttctaaagtcttgccccttcccattgtcttcccatctgatgttgtgcctcctcgaccatttcaggtttatcatcgtcgccctcgtgtcgctgcttctctcccttttgctgaggcacctgctgactcacttcctatcccttcggcttctcttgccccggctctgccttctcctaatgatttacccattgctattcggaaaggtactcgctctactcgtaatcctcatcctatttacaattttttgagttatcatcgaatatcttcaccctattctgcttttgtttctgctatatcctctgtttctcttccaaagagcacccatgaagctctttcccatctaggctggcgacaggcaatagtggatgaaatggatgctctgcactctaatggcacttgggatcttgttgttttaccctctggtaaatctacagttggctgtcgttgggtctatgcagttaaggttggtcctgatggtcaggttgatcgccttaggcccgcttagttgctaaaggctatactcaggtttatggttctgattatggtgacacattctcccctgttgccaagattgcttctgtccgcttgcttctctccatggctgctatgtgttcttggcctctttatcagttggatattaaaaatgccttccttcatggtgaacttgctgaggaagtttatatggagcaacctcctggttttgttgctcagggggagtctggtttagtgtgcaggttacgccgttctttatatggcttgaaacaatctcctcgagcatggtttggccgttttagttctgttgttcaagagtttggcatgcttcgcagtacagcagaccattcagttttctatcatcataactccttggggcagtgtatttatctggttgtttatgtggacgacatcgtcattacaagtagtgatcaggatggtattcagaaactaaagcaacatctttttacccactttcagaccaaagacttggggaaactcaagcatttcttgggaattgagataactcaatccaattctgatgtggtcctttcccaaaggaagtatgctttagacatcctggaagaaactggtatgttagactgtaaaccgatagacacacctatggatccaaatgtcaaacttgtaccaggacagggggagcctttaggagaccctgggagatatcgatggctcgtaggtaaattgaactatctcaccattactcgtctagacatttcttttcctgtgagtgttgttaatcaattcctacagtcaccatgtgatagccattgggatgccgtaatccgcattcttcgatatatcaaaagtacaccaggccaaggtgtgttgtacgagaacagaggtcatactcaggttgttggttacacagatgcagattgggctggctcacccacagatagacgttccactttagggtactgtgtttttattggaggtaatctaatatcttggaagagtaagaaacaagatgtagtggtcagatttagtgctgaagctgagtatcgagctatggctttggcaacatgtgaactcatatggttgagacatcttcttcgagagttgagatttggaaaggatgaacagatgaaactcatctgtgataaccaggccgcattacatattgcatccaatccagtctttcatgaaaggaccaagcatattgaagttgactgtcacttcattagagagaagatcgcatcaggatgtgttgctactagttttgttaattcaaatgatcaactagcagacatcttcactaaatctctcagaggtcttaggattaaatacatttgtaacaagcttggtgcatatgacgtatatgctccagcttgagggggagtgttgaatataatggatttatagtgtacaatctttcctttttaatataggtcacatgtatggtagttaggactcctagccttgtatatatatattttctcaattgtaagtaaacacaatgaatgagaatcaaggttttcttctctctctctctcttaacagtcttcatccacaacaatgaaccccccacaatagtcctcaatctttttgaacgcctcccgatttcagaagtgtagtggaagacccaccacccttacccagacttgtttagcatgctctcctacttgaacgcgtcctacctccgacccctatctcttcagatgcaacaacttctccttgcagcgtcaaacccaccttttcaacactctctttgcctcctcagtgttctcgaactccaacaaaatgtttgcacctaccaacttcataaaattcactccccccctttagattctagtgatgcaccccctagctacttaatgtagccaattttggaaccgaatttgacactctccccaccagccaaccaaacaatgccccagttgcttctccctacttctcaactctttacccccaagctgaagccaaatcacatctcctaaccttcctaccgtcgccttagcaacaacaacaaatgcccttttttcatcctcttcctggcctatactgctcttactagccttatcacttgcagaaacggagccagccttgccttcaagaggggcagcaaaaccaagagaacgaaacttcttagccaaagtgacccaaccccaagtatcgctttcctctcagggaacactaaacgaaacctttttgcttccggatcaagaatagaacacaggatgaacctaccctcctcattagcacgcctttccatcctaaacttccttccctcatcctcctaactttttacaaatctcccaactctttccttcttataacaagcttccaccccctctagcaaacaactcaaactcaaatccccaaaccaaatcgacaaggaaaaacctctgcttctctccaagatgattccttgtagcttcccatcgactgcctccacgagattttgagactttgattccacaacaaaccaacatctatcactcattacttcgccatcagaccttcctcttggttcacaacaaaccaataagagcactcttctcacccaaatgcttctcacaaggatggttaatacccttttcctcaacacattgaggttgaactttcaatactggcaccttgtcatcacaaggttgcttgcattttcaaacgtcaagatctagaaccttataagaggattagaatatggaatcttggtgggaggattcgaagctagagtcttaccaagtacttctatattgaactttttggaccaccaaacaaaatactcctctgtaattgaaggtgctcctttaagaggatgagttggtaactctaccttggcatttggtctcaagccctatatagaacacccacaactgaaaatgttcatttgagctaacagtacaaattctcactttgtattctccaagtatgtcttgatagaagccaaattgtttgttgaatgtgaaaggactataagcttcaatgatataaacatcattgttggcgtaatgtccagtagctagagtgaaggccaatgaaacaacttgtccaagatatggacatgtccctattgccacataaaatatttgcttgatccttgaacttgggtaatatgtccaatgagcataagttagaactcttaaacaaaccatgagcattagggtcattgaagtgcttgaccatccactctactgaatttgaccatcaaaggggtactagattgagttggatgactgaaatgcatgctaaaatatttaataaactacatgtagacataatggataagaaaagatgcatcacacttgctcagtgaattggacggtgagatttccattagcccattgtggatactagctagaaccagcattgccatgcaaagggattgcccacaagccattatacttgcaacccaaaattgcccaaaagaattgttgggaaattgagtaaaattgtccacaaaaaaaaaaaaaaaaaaaaagtcaaaaattcacaagatgcatcacacttgctcagtgaattggaagatgaaatttcccttagcccattgtaaatactagctagcactaacatcgccatgcaaaatttcccaacttttacatattcaaatatgtgtgcatgaacaaattttgaaggggggcatttgtaggtcggtaaaaattttaaccacttattggttgtcatgtgtcataaaaaaaatacataatacaaaacaagtataacaaaataaaaattatcacttgacaatgattctagtaaattaaattctaacatgtcacatggccccacacaaaaggagggacaagttatcttcaaattaaataaagaagtaaaaattttggcactaaaaatataattatcaaaataaataaaaatgatgaatttgataagtgaaaaggtaagtatcaattctcactaaaaatgtatcaaaatatgccttgtctagttttctaaatactaattttttaattaaagaataatatctcaagggtcaagactatatagatatgtcttaaaatctttttaaatgttaactttaattaaagaatgatatttgcaaagaaaaatgaaaactattcaaatatgtctatcttaagaggtctccttagctttcaaaatcatactggcagactcaatttgtgtgtgcactccccactaaacaactccataaggagtcctctagttgctttacctccaattcactaagctgaacctaccactccttatcacccaccttgggttagcccttttatcaacacaagatacaacaggagggctttctcaattatggcagctaatctctaggcaacgaagcttcttagctaggttatcccatcttcctaggaagcctttgccttctggaaaagccaaaaaaaaaaaaaaaaaaattcttcccttttctagtgcaaccaaagcacttaaggtaaagccctttaccattgcttcgcaactcaagcaaatagacacccccctcactcccccccctcccttcccccgaactcttgagataaggaagcttaacttcaccattgcaacaagtttctgttccttctggcaattgagatagactcttctccccaaacttgatccagctggaaaactgcttctctccaacactctaccttttatcctccctttgacctttcaataaagattttgaaggactttgattccaccacaaacaagaccttacaacccatcccatgagagacatgaaattgatataaaataataagaaaaataagcatattcatataaggatgtatgctatagagcattgacatccatggattaccatgcccgctatcattgcaaggggtattgtcaatgacgtatctagtgtcacatctgatggggtagtctagaccacagaaagggctttatttaattaagttgtttatgttattgtagtaattaccaatgtagttgttgctgaccataaagacattgaatcaaattgaaaaccttctatttgtgcattgatataaatgtgataattccttattttgtgctttacaggt

SEQ ID NO: 12976 - DNA, 7596 bp, Vitis vinifera
  Intron number 2 from transcript GSVIVT01038304001 (locus G SVIVG01038304001) derived from phytozome v7.0 (chr-ID chr7 ; pos 12511945 to 12519540)
gctctacgatttacaagccttaatattgtgtcaatgcgcactactacaaaaattgaaaataatgacagttgaatccttggcgcttttcaaaagcatcattgtttattaagattcaatggcgcttattagaaccgccattatttaatctattatttttcaatccatggcacttcttagaagtgtcatcatttaataaggcttatttaggcattatgtgttatataatagcgcttattcgaagtatcatagcattaatccaataccttggcgctttaaaaaagcgtaattgaattatgagtataaatatacccctccaaaatattggcccctctccaccatctctcactcaccaaacattccctccaccatttcaaaacccccaaatacttagaccaaaatcaccaaatgtacaagaccgaacgggagctataggagacttagcagtgggtcatcatcacaaatccttgtgatatccttccttattcccaaacccccagtttcccaaaatctcctttgtcaccatcataaagagaaaatttcaagtgtcgatatcaacaataaacactagaatcctttgatacctctgcgactccacccttttggtggaagaagttatggctattcatagataagcactgcattcctcgatctcgaaaacctagaaggggattttcaggctggagccattataaggtactcattgttatggttattgacgtgggtgatagttatagagttcttgatctagatattatgggcgagggttggggtggccatggggcatcatcttgccaaaatccataggaaagagtatcgcatgggttggactgttgttgtggttcatggcagagttggccctaattggggctgatctctagcaggtgattgttggtcgtgggtttttgccgctttaggttggagttgtagttactgcatctgattggtaagtcttttcattttttaaattgcactttattatcttctattttgcaattggtttattaaatttaacctttcatgaaatgtcaatgtcttcaatcttagtgttatatattttaggttttgaatagattttgttggagttgtaggtttttaattatgttaattttgaagatgcatctaggtttttaattatatattttaggatttgttttaaggtcttctagacctcttaaaactgtcattatcatctcatcataaatatgttttatgatttttcattttgtacacaacatccagggaatatttttaaggagatgatattctctaacataattgtgttcattgctctctctctcacaaatgtagctctggctgtcatttctaaaatttaattaggagatctgcttatgttttttgatagagggaatcatagggtagcctttgagtgggaatatgaagttggatctcatcatgaatttgcttggttgagatatgcaaggcttacatgtccgacctgtgttgaaactccaggaattatcaaggaaagtcactaacaactattttctcaaggaaatggtcaagcctcctacctggttaattaggcattcagtctcttttacgtgatctcttttctatttaggccatttgacctacttatgttggattttttgttttccaatgattttgtttagaaggaggcatgcattagagttgttaattattttttggatgcttgcattaaagctgttaattattttttgcctatcagaaaagaaaaataaaacatttagagcccattagtgagtggttttgagagggttagaaaaactttctaatacttagaagcactttgttatagaaattaggcatttgacaaaaaatttgaaaatcacttctaaaattctggataatcacttcataggtgattcttccaaaaataatattttttttttgttatataacatatttaccaaaaacaatatcaaagcattttttatttatttatatccaaacaccaagtgattctctttacaagtggtcgtaatggaagcgttattaacaaaagtattatagactagaagtgctacaggctaaaagcacttaaataagggtaactctcaaacaaaatttttgtttcatgaaggtcattcatggtaaataatttgatttatttctaattgatacacattaatttttggatgtaaattttactaaactcattgattttgtgaaatggtaagataattgatagagattttttgataggtaataatcagttgggttcttatgtttgaatgtatatctaaagatgaagggatgtctattcttagtgaatattgcatcttgttatcataattagaagccttaatcacatttgttcatagaataactcttaaactttgggatataatttcgctactatttactttcccaaagttttcttgctttcaagaatgaaaatcaaaacagagaaataaaagtactttggagattctaattcactgcccctgcttatttaatgtttttgaagtttccttaatgtttatatgtagagatggttatggaaaattggttcagagagagttggaagctcaaaggcatcttatagattctggttctaggtcattgggatctttcctgccagttatgccatcacattgtaagttccagggacaaaatcttttcatacagatctatggtttcccaacaacatattacactattggacttcttttctggaaaattctatattttttgctcatatggtcattgcatttcaatcatatattgttatcatgttctcaataacttgacttttagacctagaactccttttaagcaattcaatgttcccaaatgataattatcttttcttgctgcttgttgatgaagaacatttgtccacaaactaagatgaatatatataatttttcttttaggcaaagatattttattgaagaagtgactaatagatggtgtgcaacccaaggatacaacatgcatataaagcctgccaataattttttttcctattttttcttttcttacttgtgattaaaaaatgtgaactatttttaaaaagtgaaattataaactcttgtttgatgtagagtttttgctcatgtaaaaatttaaaagtaaatataattaaaattttatataatatacttgttatgtcgtggaatatattattataaagcatgttattgttattattattatttaaggttcctttgaggggttcaatctgactttcattggttgtttccctcattatctttctaatacattcttttttaaggtttttggtctttgttgattttattttgtattgtactctctgtacaccatcttattagtagtgatatatcttagggtgctcattagaaagagtttgaaatttgtagttgaaaaaacatccgttgttttgaaggcagcattcacatctaatcagactctttctctattaaagaaaagcgagcctctaatatcctgattctctctacttgatgacattcaatgatgcttgttccacccctcaacaatggcgtaattcaccttgacttgggatgaatgctttactttttctcttcaattagccatgaggtgtcctcgagtttgtttcctttatttttgctgcaaaagtttaaattttccatccaccttatctgtttaaagttttaataaatatttaaacttcatttctaacctacatacccatcttttttttttctttttttctttttttttggtttgtgtggctggggaacatcttagggtcttccttgtcttgtaaaagaaaaccttgtttagaaaatcttgttgctccaaaacttactcttcaaaagtttcattcctttatggaatatataagtagcagacgtcatgaagtcttgcaaaattaagtgtccttcaagccttctctagaaaatcccatctgtctatgaacattaataaaggtcatgttgtttgtatacaagcttgcacttcaatatacatggaatccatcccaaatcagtttattgcagaggatattcttgaaaaccaacacggactgaactactggaaggaaattactgaggaaaacacaagatattattaatagtgattcacagcagattattcacttttctctaccattaatctctagaactaaaatatactctatatatgttagttgatgtgtctgttgttattttcaaatgcaagtggttatctttctagaattgattacatgcattttttccaattagcaattaaagtcctgaataatgcattttggttcatctcatccactggtgaaggggtttatactctggccttagatgggaaatcaatttcacagttctgtatgtaaaaaaattataattttatatttttcattaactatttgagtcttgacacctctttaatagaactgtttcacacacctatgctaaaaatgggcctgctctcaagccaatgataagaggaatgatgaacataagaggtggtgccaatttagaatacaatttgtgttgctccatagatctatacaatttattgctatagttgttcctctgctttagaaatcagaaggctcaatcctagttacataggattctgatatcactttagaagatcatgattggttacccatgtctctctattttctgatcttactatttcccaattcttcctatcttcttcttcttcttattcttttctttttaaccttgtccttgctcttcttcactttcttcatgtatcatcaaaagggaattaatagtcaaaagcttgtagagcgtcttagtgttcagggagactttgatgctctagttactgaatgtcggccccactttcttattaggaattatgttgtggctcaatttgagtcattgcctccttctctattacttggtacttggtagaaagagataccatttttctatcaaggaaattatccttttcttagaagcaatggggtggagaacaaaatcaagccaatcataacgtccgcttacatgagaagatcttctcttgcacattgttagtttcatgtgactaaggccacttatgaaatataatcttttagtttcaaaatagaatatggtttggattaaaggccaattttcacatccagctattcctagatttcttagaagattataatgttcagttcaccatatatgcacttctcaacaagttgggttaagtgttggtgatttgattgtattggactgaagatataccttaattatttcttcaaatggagcacactattttttttttttttggtatctttgataatagcatttttagggaaaaagtgataaaataatttaatgtttatatttagtaaattaacttaatgaatctatttactgtcaaaagtaaatcaaagaataataaatttaaaagaaatcattaaaaaaaaaaatcatcgggccgaaaatctcgaacattttttatcaactctttatggtacttatcacttttttctttctttgttagtattttataaatttattacttaatgttagtaatatttttaatagttttagaaattattaccttttaatatagcctttaaaattattacttttcaaatatgggtattttctctatttttattttatataaaactaggctcaaaaaaaatgaaaaatggaataaaccaattctatgtttcaaaattttattaagaattttttaaaaggttaaaaataacatggaataaaatcaaatataagatcttgtaggaaatatgatataaaaggaatataaatattatcatgggtgaaattatttatatggataaaatattatcataaaaatataatataaatattttatttattaaactaaagattattttacataaatatatttttatattaaaataatttactttattgaatataaaaatattaaaataatttaccaaaccatttgaaaatagaaaatagtaaaaaattaaatttaaattgatagcacaaaatttaattataacctaaaaacaattttaggatatttggttcaaaggggtatttgggcttattaccatgattacttagtttaaatatttaaaaggttaaaattataatttcaaaaaaaaaaattattatttttttaaaattatgaaaaccatgttccttgattattgtgtgctcctatattataatttatggtttacaaagtgaatcatgctttacacactaatatgtaagtttacatgcattaattttaagtgatgaaatgttaattgaatatattgcttaatctaatttatttgcatcattgactatatagaatgttccaaagtatgaaattaattctcagtttgtaggataattacttaatgtgtatttaaaattgtcaatttagattaatttgattaaatttggtgtgaaccttttttgtagaagatgttgctctctaagttgcgaaaaggtttttaggcctccatgttaaatgttatatatttaagataaacaaaatagaatgagagttatgttgctttgttataatatttcaataagtaattgtgttttaattttattcaactatgcttgcatgcaaccttagatcttcactatcaacatagtataaatcattataaaatggatcttttcaataattaagggaactaaggcatattcatgtggttgtacacttgataattgaggtaattatcttacttagtagcagtattttttaacacttataatttatttactctagtaattaaaattcttacttttgacgcaataagaagaatattagtatgtttgttttattgctttacttgaacaaaagctaattaacatgctggattactttctattctttttttctttttcttttgtttcaattatattggttgttatatgtataatttaaaagtttatatttttatttatttatttatagcttgcaaaggaaattggcttacaagaagaagagaaatcattacaatgaagtgatgctgaaagtcatgaagatgacatcatttaaatcattaggaggttgaactaggcttttgttgatgatggtttctttttgtagtcattgcatcgatatttgttcttaaattggatttaaaaattctcattgaaatattttgatctaatgaacaaatttataatttgtatacaagtaattatactaattattcaaactaagtcattgtatattaatatttggagatatttttatttgtaaaattcaatttaattttatgatttataattgcttttgcttttatttaattatataggaaattcattattttaaaaacataatagcaatattattattaaaataaaatacttaaagatgacgcttctattaagtgtcattattaacataaccaaagatggcgcttttaaaagtgtcattgaaaaaataatccaaaggtgacggtcatatgagtgtcaacaatgacaattttataaaaattattttagtaaaaaatacttacagatgacatttctttaagtgtcattgaaagtataaatcaaagatggcgcttcttagaagcgtcattattgactaaaacatataatgacaggggagaagaggatgctttagagaagtgtcatctaatacctttcttgacgcctaaaaagcgccattgattcccttttttcttgtagtggcggttctcttaaa

SEQ ID NO: 12977 - DNA, 3925 bp, Vitis vinifera
  Intron number 4 from transcript GSVIVT01027809001 (locus G SVIVG01027809001) derived from phytozome v7.0 (chr-ID chr5 ; pos 8026827 to 8030751)
ggctcttttcattgtcttcagttacctcaccggcagtatgtattagattccaaatattttctaataaccaagtggtttccccttttactttgttttccccttttgcttccctcttcatgttgttctcaactcggtgtaatttgacttgtgcctattatgggataattcacgggtagagctaaagtgtgtgatctgtacaagtttccaataagaagtaaccattgaaatgatgggctcactatttctttatccatttaatttaaaatatactattcttttttatttgctatattttttatacctcggatcaataaaagaatcgtggccattaagttgagttatggtgaaataagtgtagaaatgtttgcttgaagtaaaaccctaggatgtagcttgttatagtgccctttggcaatcaataaggggtcacaaggttgagtttctttggtatttaaatggtgtaaaggggcagacctatattactcgaggtttgctcttcccttatttaggtgctctagggtacattttaattgtgatttacttcttcgacaaaaaaatatgtgaacaagaataaaaataaaaataagagttcgcttgaaacacggttacattttcttatttagcaaactactagacttacaacataggtgccacctattaatagttttaattaattaggcgaattcatatcacctagggtttgattctcccatatttaagtggtgtaaggtggattgtggagtagtgtaacaacccacttcctccgagataaatatatttgctttgagcccaataggctctcataagtttaaaatacgtctatctgatgtggaatatcacaataacccactaggcaaaaacaacatacttgttgtgtcttatgagatggggccagaaagaacaccccttatgggttcggacaaatagagtaccataccggagttaaggatcgattttgataccatttgtaatgattcggtcccttccatgcaaatattgtttgccttatgctttaaaatgcgcttatatagttaagaggagtccgctacatatataataccaagaattgctgcccctatccaatatagaatatcacaagaaggttcatatcacttgggatttgcttctttgaaggaaaagtgtaaaaaagcttgcttgaaaaactactctatagtagcacattatttacatgttagcaaactgctggactgagagcctaagtgccacctattaatagttttaattatttgttgcaaatatgtataatttagtgtgtactcatgtgcgtgagcttgtttctagaatttagagaatcacactatgtacatagagaatatacaataggagccacctagacaaaaagaagtggcaccaaagacaaaaacaactaaaaaccactatccacaattcaaatcatcagtaaaatccaatagagaagcatattccttccctaacagggttctggaccattccataagagaccgaatgagggtttctaagctttgggtcgtttagctcttccacattgaaactcctgtttcttcttgccacatgcaccaaagcaaacaaggaggagccaggctccacaccctccaccgttttgtcatccccttcaccttccaactcagaaggagctctttcatagcctgaagattgctgacagcatgtcccatgtctttgtagttctgttacaatggattaagaatgtggtttgttgattcctcaccaactttacaaagattgcatttattagtcgtcgaccatcctctccttataagaacatcaatggttagaatttcccccagtagccttccaagcaaaaataaaataaataaataaataagtaaaatcaaaggggcacaagtgcaccaaatttcttttgtacacttttctcatcaagtaaatagttatagaaagattttacacggaaagtccccttcttttcctcccttcaaagtatgctatcctccccgagtctagcattctcatcttgtggatgtgctccataaatttcatcacaactcccaaactttgaatcttgaaaatgtcttttgaatggaagggaccaagagccttcttcctcccttgccacccattagtctgctactgttacattcctattagaggcaatactgaacagctgaagaatgtctctttcagaggacactcatttatccaactagaacctgattatgaggtcattcttaatcagaatagaggtcctaagactgactcccatcctcttctaattgctttccttaaatccataccaaaagcttctctcatctttagagtgcacctattgaattgtatgctggttatatttctttagacaagaaatactgtctttttattattattattattattttttgtagtaaaaatacaatgcaattaaccatggtaaattatgcatcttgtagtgtgtttctcctgatgtaatccaatatagaatgttaatcataattagaaaagaaaaggatgttgtaggctacgagcactagtttagcaggtctgcctcatttgtcatcactatttatcattaagggagttatgagaagtgactactgtagtactggcactagtttagtagtattctctctgctgaatttgatcaaccaatttcaccatctttaaggctgatcttttgtccaattctgatagttatttggcaatgatacaaatttatttctgggtgtgtacccattcatgtatccatagttatgttacacatgaactactgaagccttgtctctcggtcaatgtttcagagggtgttttctgtgaaccgggatacttcatcttctcagagttggccttcctagaaatttgacttttattgtaaaaatactgctatattttgaaattgtctctgatgatttttaccatgttatataaacattatgcatgatgtttcatatatttttacttacattgcttggagtaaaaggatctttcagcatgcaagtggatttctgtttagtaggcaagggctgaaacaacccctacacctgtgtctctggtttctaaaattgaacttgccaacctacatcttcataagaaaatgtactcctgtcatttaattcttggactaaattgtgcaagctatccctactcattgaaataaagggcagagagaagctgtatcaggtttgtgataaaggcttggtggtttttgaatttagataagcaagaatgtgattcaatctaaggatgagatctaatcccataccttgtacaactaaactggctgctatcttgttgtatgccgcaatttctgttttttatcaaaaagtttcacatctaggatgagtaggtctgagtttgttgtgaaagtcatggtctattatgatgataactatgctggctgagatgccaagttcaaaccagtttaatcctgtgctaaagtgagtcctacttaatcaatatatagttccatacaattttcctaacagtttagctgctttagggaacctttatttatattgaaagtaagaagatcatgaacttgatggtgaaaactgctagagagtcttccagtggctcattaccaatagcagttgcttgttaaaagtatttgtggcaaattattctgtacaagtaaattgcggttctgcattgatttgaaatgaactaggtctcccaccaagtgctgaagacacgtggctttattaatatatcttcatctgcagttttctaataaccgttttccactttgggcattttgcattatttccattgtcttttgttttacactttcagattttttgtattctgccaaaaactacaaatgcaaaatggatataatgaggctgtctctcacctgtaactatgatagttgttgttattaagatctaatggtgctgttctgttgactccttttcttcttctaatgtccaggctgaagaacttggagttggacggg

SEQ ID NO: 12978 - DNA, 1673 bp, Vitis vinifera
  Intron number 1 from transcript GSVIVT01038613001 (locus G SVIVG01038613001) derived from phytozome v7.0 (chr-ID chr1 6; pos 21471493 to 21473165 reverse strand)
agaccaaagattgctggctggttatttccggaaaggtcagatcttaatcgattcgtttttgttctttccgaatcggttttcttaatagtttggttgtcgggaaaaccgaggaaagtgatagaaaatgaaattatgcatgtttggtttggaaattcctgttttgattttcaagctcctgtaaatatgtagattaattcgatttttttttaaaaataattctcgcaaaattagttttgaatttggagatataggtctcacatcgcatgtgattttcgctaagcggttagaatttgaactgaaaggaagtagcggtaatcatttctgattttggtgaagagtatctgtggtgaataagattcataaagtgtttaaaattttcttaattaagttatttggtggttatagactcggtacagtgaaggcttttgttttctggctaatttgggagtttataatgcttttctttttcttaccttttcaagaatcatctttgcatcaaaggggtagccataactttgacagatgttgtatctgattcgaatcttaattttgctatttttcatttctggaagcaaaagaacaaaagctgcatttcattattttaaggatttcatggctttgagaattatgtatcttagttgctagactggcgagaaacttattaagttggttgcgttgttatatatttaagtgggtgattatataaatctcagaatataaactcagtttagctttcctgttgttgagtcaaaacgttctatttctccttcttaataggccaaggcaaaatgttctataagctactcttagaaattaagtattattgctactcatttatatcaagtattattctcagaagagaatcaagaccatgctctgataatcctttggctatttattgctttctagttgcatagaaaatgtgtgcaaaggaaagcgaaaaatctagttgtactgtaacagccatgtgaagacatgggtctaatcgtgaagtaaagcatccaaaggaacccccatggctccttaatcagaaatgtccaagaacaagaggaaattttaggagacagctcttaatggtcacttagaacagaaagtaagaattaactaacctgacatgtaaaatgatgaccttcaggcttcagtcatgttttaagacaaaaaattatcattcttacccatagcatccaatccagataaaaagagtatttatggatgcttaggttgtttcacaaccctgctcaggaaatccttgagcaagagcaaatgatagaagtttttgatgtaaagagagctgaattagatggattccaattccagttgatatttggtagttcttttctcctcataatttatgctgaacatgatggaatgttatagcaaaaacatacttatttattgtatatattttccaactttgttttatcatttgaatgtacctgcctcaacaaatcattttacagaattttgaagttcatttttgaggaccttgtaatttatgatttctcaaagtatcattcttaagggctttttaatagttgaatgcaacatcaacaatggagtccatcctgccctgcaattttgaatgtgacatagttttggatgttggtgactttattctattctatttaatttgttgataaaattttaaaatctccatctattgtaacaggtgt

SEQ ID NO: 12979 - DNA, 12033 bp, Vitis vinifera
  Intron number 6 from transcript GSVIVT01020355001 (locus G SVIVG01020355001) derived from phytozome v7.0 (chr-ID chr1 9; pos 20778638 to 20790670 reverse strand)
gctgagagaattttgaccggccctccattctacaagtatccaactccttgccattttatgcatcaagctaattttgttttggtttttgtgtttcttttttctttttctggtgatttggtataattttaacctcaaattctcaacaaaataaatttatggaataattggatcactttcttatttacacaaaggttttttttaacacatttctggtctctatagaatcatttctgtacataagcagaattgatatcaacaaatagagttattactggctagcatgcaaaaattccttgaaatgaatcaatgaggagatgcgatgaggacctacaatgagggcttgtgattgcaccagttgtagaatgaataattttgttttgaaagtgccactcagatgaggaaggttgggcagaatatggtttaaagttgcaggagaaggcatgatgacctatgatctaaaccaagaaacaacagtagattgagtggaaggcacccaaatagttagtacaaggctttgttgagttttattgaaatactaagaagtgacaagcatgttcaaaatattgaagaaatatatataatgatagttacaacattagaatatttttttaatagaaggaaatgatagttatgctttgtgattctagtgcattaatattggaatagaagaaggctttgctaaggaagactttttagaaaaatttcatcctcatgcctttgtagttggtgtggctggtaaaaattctgtgtgactggccttcacttttttcgtttgagaatatgtggctctaagatttgaaattgaattctgagattaaaaatattggtaggagtttaatatggtagattggcagggccattaatttatataacaacccaaggttccccaacaagtgaacagattagaagaagatggtctttggtaatctttatgggaggaaaagtttcattcttaaggatagtgaaaatctaagtgtagtcaaagagattgaccagtgaactgatataacttagctagctgaatagccaaatcaagggtatcatgcttaagaaggattcaactggaggcaaaaatcttgtgtgaaataaactaagggagttgttacaccatgtcattgatcgggtggtaaaggtgaagagaaagaagggtattaagaatcttatctggtggaagagaggttttagaggaccaatatttgattgctagtgagactgagattcttttttctctttgtgctgtggaaatgagtctgagtcttaggttagaagtcccagattggtcattgaatcagcttgaaagagcttgatgattggaaagacctttaaatgggctttggtatgcatggtctggaggatatcaccatggtctcaaggacaccatttagagtgcttgagattgtctgattagtcaaaacataaattcctgcttgattgtttagttgtaaaaaaaaaaaaaattctaactttataatggaattttagacccaaaagtatggtgacaagcttgtgtaaggtcaatgctaaggtcctctcaagagcattttggagatgcttcaactttatccctgtcctaaggggcttttgtccaagtaaggtaaatcgtcatttggtggccaatgtgattctctatgagaggattaatttgaaggacgaagttatggtcttttatggattttgagaatgtctatggtcatgtggatgtggacttagttattcccattatgaaatgaaaagagattggaatggaaggagggtgaagttttggaaggattggtagtgtggggatgagccattttgtgtttgttttccatctttgtatgcttcagcactatcaaagagacttgggtcatggattattaggactagataggggagaggggtcatcggaactgtttttctagaaatcttaatgattgggagctagatatggtaggggcaatttttttctagactacaatgtaaggtagtgaatagagtaggacagggtagtgtggacggattcaaggaatgattcattcttagggaagtctctttatgctgtcttggagttggggagtttaattccttttccagtgagggttgtttgaaatccattggctctatctaaagcaagtttctttatgtgggaagcttgttggagaaaggttttgattcttgatcaactttggagaagaaggtagatgttggttaatagatgcttcctatgtaaagttgagggagagtcaattgtttacattcttcttcattttttcaaggcaagggttctttggaagttattcttctctttgtttggtgttcttgggtgtttttggccatagtgagagagactctgttaaggtggcatggattggttgtcggtaaaaggcgtaacaaagggtttgtttgtagagctgctcttttatgtatcttttggacaatttggaaagagaagttatagtttgtttgggcacaaggagcagtctgtccattttctaaagagcattttccttacttatctctttttgtgggtaaagttatacataggtgaaggcacaatgcctttaattgatttcattgattggctaggttttgattaagggagggagctattttttgttctctcattttggttgttccattgtgcctttttttgttgtttctttgatgctcattgtaggcatccagtattccttgttgcgctgtttctatgacacttgtttataaaattatatcattgcctaccaaaaaaattgaaaagtgattgagataggatagcaaagatggattagtggttttctgttgtctgttaactaagtaatgttgatcaatggggcaagctaaagtttagttaaggactctggagggcataggcaaggggttcctcactgttattatgcactttattaatgaaatcatggacctttcttcttttttgtttgaaatgtccttggaaattgcttatttggttgactttgttctaaatttgagatgttggtccttggataagaagggccttctcacccaaatccttcttctagtttcacggttgatgattcatccatgttctgtttggacaaactgttttggaaagcaaaatgcctttgaattccccaatgtcgtggtgtagttaaaaaattattgggtaccaataacataataggtggccttataaagccatcgatttatatagattgtgttttatgtttggttagcggggaacatactgataatttgttcttccatactttgtttctattgagattttgtagtggttttcgatatgtggatcaaaagggtaaaattagcgaagagaggatcattgccaatgtatttttggagaaggcttctctacctctgttttgatcagatgttgtaattgtgggagggacttctcatcctttttttgtacttttaatccattttaaatgaaaatgttgtgtttctgataaaaaaaaaagagcttttgcagtggttattttgcatcagttggactgtttgagtggccatggaggaatttttagatatggaagttattctttgaggattttgacaggtgcatcatgataaaatgcttttcaagtgctctgtgttagccactgtttggatgatataattggatagaacactaggattttaaggacaagcatgggctggtggataaaatgtaggccagagtttgaatcttgacttctatttgtgcatccatgaccaaggagtttgctggctttccttcctataccatgagtaatgaatctgtagacaattttcttcgagaattgaaggaaaggagctattaatgataagttgattgatctcccatctgctaccttaggctgaattttgatgggcattcctctgaacacctggattagatcagaaattgggggactattagagatcttaggggagatttgtctcagactattggaggtcataggggacacatatttgtgtcttctccaagcctgtttgtgactggttggccattgaagccaagctgagagcagtattggcggagaggcatctccatggtggttatgaacgtggaaagagatgaagagggaagctatgtcatttatttggacaagtagcaagcctagaatacccaaagtttgcttcatgggatgaagaggattcagtgataatgttttggctttggaacaaccagggattggtgggacttaaaggccattaagcaatcataatctaaggtacaagatggtgctcagatttatgaatttaaaacaaaggttttattcatgaaacaaggtactgtctccaattgagtactataatacattaaaaatattgtggcttgagttggattactatcaaaatttcaagataaaatgtagtgaagatgtagtcacacaattgaagtttgttgaaagggagggagttttttaatttcttgctagattaaatgttgaatatgatagagttagagtgcagattcttggaaaagaaacacttccatcccttagtgatgtgtctcaattgtaaaggcagacgctagtgggagaatagttaagttaggaacctcactgagtgaaggatcgactcttgctgtagtcaagccaaataccaatcaacataataatggggtggctactggagagacaaatgggcagaatgagacctgtagaccacagaataacaaggatggtgtatggtgtacttattgcaagaagccaagacagaagaaggagaactattagagacttcatgggaaaccacaatcctctgggaagggtaatgataactgaaatgggcaagctggacaacagggaggacaagagcaaacgatcaaatcagaagatagttccaatgaagaagcctcaaattccaaagggtctgatgatggaggactgagtgaagaagaaatagaaagacttcgaagcttcttaacttctctagaaaagcttagtgcctcatgttcatatgctcgctcagataaggactcaaactcttatgcccttagtgcttcgaaagaccttttttctgatttttgggtaattgactcaggctctactgatcatatgaccaactcttttcaccagtttgcttcttgtagcccatgtctaggaaataaaaaaatcatagtggcagatggtacattacctggcgtggttgggcaagaactgtttccttgatatcatctcttactctaaaatctaatttacatggtcctaagcttctggtcaatctattgtctattcatcaactcactgaagactagaattgcaatgtaaccttttttccatcccattgtattttttaggactggattgcaaggaaaacaattgaatgcgctaaggaactagaagggcttcaaatgaatatatggtcattttcaattaatcaatactgatgtttgtggtcctttaagaattcctaatgtttttggagctcgatagttttactcctttattgatgattattctagagtcacttggttatttctcatgaaacataaatcagatgttatcatttttttttatcagaaacgaacaattgtattgatagagaaaaaacatgagaaggatgagaagtcctccccatgatttacaaacttgaccaaaagaaccgagtaaacctccactaaatcagatgttatcattgtgtgcccttttttcgtaaaatgattcacactcaatttggtgttcaaatcaaaagtattaggttcaacaagggaaaagaatactttaatcaagttttgaattatccaccaatcctcgtgtaattattctccacagcaaaatggtattgcaaagcgaaaaaaacgtctctcctagaggtaacttgagcactgttgtttcaatataatgttcctaagtcacactggggagaatcagttttgactgcaactcatttgatcattaggttaccttctagagttttgggaaataagagtctaatggaaaatttatcaaagttctacactgagttttgtgtttttggtcgtcttcctcctaaaatattcaggtgtgtctcatatgttcacatttattctcatcaccatagtaaaattgatccctgagtactgaagtgtgtgcttgttggtcattatcccacaaagaaaggatataaatgctatcatccataatctaggaaattctgcataactatggatgtcactttcagtgaaaattagttcttctttccctatccttattttttggtggagtcaccgggtgaggataaggaatatgatgaatctgagtccttttcttcaagatttgtccttttaaattgtgagtccaaccgttgtctctagtcctgctgtctttggttctcctccattgagttcaactactgctattccttttgaaattgtaatgactccatcatagcttgtatttgaacttggaaatgaaggagctggtagaaagttgggagccaagccactaggtttactcaagaaggaaacatctcattgtaattctaatgcaggttcaagaatctgaactgataatgggtatggaaataaatcccactcattcttcatctaaaattcaagaaaaaggtgtgcaaaatagtgaggcttctttgagtaaagcctacctatggctgttggaaaagtaaaaaatatacccaacatcccatctctaatttcatttcctttaacaaactaccctcatcacatggatcctttctttcccaacttaatcctattaaaattcctcaaacagcctaagaagcttttaggaatgagagttggatgaaagccatgaatgagaaaatagggctcttgaaaaaaaaatcggacataggaaattgctgaacttttgtagggaaaaagattaattgagtctaaatgggtagttatggttaaaatcttgatggaaccttcgagagatataacgttaggctattagccgaaggatatgcatatgcttatgtggtggattattaggaaatttttgccccactagcaagaatgaataccattcatgtgctattgcccttagtagttaaccatgggtggtctttgcagcaatttgatggtaaaaatgcttttctgcatggtgaattagaggaagaagtatttatggaggctccattaggatttgatgatggttttgaatagaaatttgtgtgcagatttgaaaaaggcattatatggacttcaagaatcatttagagcatggttcaggaaattcaccaatgaaatgattaatttgaagcttttgtagagtcagggagaccacacactttttgtcaagcactcaccttgtagcaaggtaacagctttgtttatgtggatgaaataatggtgacatgtgatgatattgaagaaattgacttactcaagaaaaggttggtcggagaatttgaaataaaagacttgagtagactagagtattttctggaatagaagtagcttgttcaaaaaatggaatcttcatttcacaacaaaaatacatgcttgatttgttgaaagagatgaggatgctcagttgcaaactagttgacactccaattgaacaaggaggacaaggaggatgttgtagtagaccatgagaaataccaatgtttagttggtaaactaatctatttgtcacatacttggccaaatattgcatatgcggttagtgtggtgagtcaattcatgcattcccctggagagatccatctcaaggcattgtataagattctacgctatttgaaggttactctaaggaaaggaattctttttggaagaaatagagaattgaccttagaagcatatactaatgtagactggggaggattaggggtagataggaggttaatttctggtttctgtactttttttttttttttttttgattagaaacgaagaaaaatatattaaaagaagaaaagatacaagagaaagaagagatacaggagaaagtgaagaaacaagagaaggatgagaggtccttcccacaaaaacaaaaactgaacaaaagagaaaacaccgaactttagaaaactaaatacaaagaaaaaccccaacactctcaaacttttgaaatgcaaaccgcagtccagttgagttgtaaaacactaagaggaactccgctaaaagctgcagtacaagaggcccaaagagaggaatagaaaagaagcaagttccataacatcttttctgttcttcccttatcctcgaaaatcctattgtttctctcttgctacaccatccataacaaagtaaggcaagcgatttgccaaagtgtcttgcctcttaatgaattccccaaacctttaaaagcaataaccatcatgtccacaatactccttggaaggacccaagccaaccttgctagattgaacagcttgtgccagagtccaatggtaacaggacaatgaagaaaaaggtggtcgatcgattctccatttcctttgcaaagaatgcactattgaggacagagggatttgtagggtcttttcaattgcaacttgtcgttggtgtttactttcccatgtactactaaccaaacgagggccttaacctttgagggggcttttgaactccacaaaaacttggctggaaggaacaagataggatttgagacttttgacaaggccaagaaaaaagatttcactgaaaacaagcttgatgatgacaaagaccaaactcttgaatttgcctaagaaggagagaaaagcactgaactaagggaggacatgattctttgaagtagatcaatttttgtatcagtaagattacgacgaaaaataaaattccaagacagtggaaaagaattgccaaggacatttgagacagtggggtttttcacagaaataactctataaagactagcaaattgagagcacaaagtttgtttaccccaccaaagatcttcccaaaaatgaattctctccccattccctaccactaagcggacaaaaggggagaaatcttggaaaacttgagcaataggcttctaaggacatctgtgtgaccatctaaccaccatgttggcgtcccatccattaggatgtgtccgataaatactcgcaataaccttatgccaaagaccattcctttctctagggaacctccaaagtcatttccctaagagagcaatatttctcaaagaagtcttctggaaacccaaacctcccaactcctttggcctacaaacaacatctcatctgataagatgatctttcttcccttcccccgccccagaccaaagaaaatccctttacagcttctcaatctttgaggctattgatactgggattttgaagagtgagaggaagtagctagggatgtgagatagacttgactgaattaaagtaatcctccctccaaagacaaaaaggtctttttccaaccatccagcctcctcgaaattctctcaaccaacggatcccaaaaacctattgtcttttggttccctctcaatggaagacctaaataagacaaaggccattgtgacactccgcaataaaaaaccgaggccaaactagacaacaacttctgccttgtattaatacctgaaatggtgcttttttctaagttgatttttaatcttgatacttgcccaaaaaccaaaaggataatcttgaggttttgaagatgttccagagaggcttttgagaaaaagatggtgtcatctgcaaactgtagcaaagacactctagtcctgtcccttcccacaaagaagccctcagttagcctagtttcctctgctttgatcatcaacctacttagaacattagctactaaagtaaaaaggaaaggagaaagggggtcttcttgtctcaaacctttagaggccttaacccaaccctttgcattcccattgactaggattgcaaaaattgatgaagacaaacaatccctttctttgtagcacatgatctaaaaagccccaatccgcatgatcatagaccttctcaaaatcgattttgaagaccaccccttcctcccttgaccttcttttctcatccaccacttcattggctatcaacacagcatccagaatgtgtctcccttcaacaaaggctccttgagagccaaagattgtttcatggaggactttgcgtaaacgctttgataagaccttaacaattatcttatataaacttgtaaccaagctaataggtttatgatctgaaattttaaaagtttggcttttcttaggcaccagagcaatgaaggtcgcatttgtactttgttttattatcccattggtgtggaactctagaaacaccctcatgaggtcctctttgatcacatcccaacactcttgatatactgcaatagtaaaaccatcaggaccaggggcctttttcttattcaattggaaaattgccaattgtaccccctcttcagaaaaaggcctatccagccaaaccgcactctctccagaaatagggatccaatctaacccttcaaccctccaagaagcaccttcgggtttggaatagagtttcccaaagaaatttacaatctcctctgagataacctcaatgttgcttaaagtcacccccttctcagagatcaaagacttaatgaacttcctacttcgccttccattggctattctatgaaagaacttagaattgcaatccccttcttttatccacttgaccctagatttttgtctccaatgaacctcttcctttaataacaaatcctctactcccttcttcttaaggtccgttctgataacaaatcaagattcaaattcccttcttgttcaattagatcaattctacctaagtccgaaagaatgaaaattttcctctcttaaatctccaaaggccactttattccagtatttcaactttgatttaataaactttaatttcctcatgaacttgtgaccttcccaatcttcaaccatacactcttgccaccaaacactaaaattctccttaaactcaaaatggagtaaccacatattctcaaacttgaaaggagtcagaccccattttaaaggattagtttccaaacaaattaggctatgatctgtggtccatctaggaagcgcctcttgaagactttgagagaaaaaagaatcccactcagaagaaaacaaaacctatccaacctcttgcaaataggacagattaggagggaatttagcgacattgagaagcaagaagcaattagttgttgcaagatcaagtgtagaggccgagttcaggtcaatggctcatggaatatgtgagttgttgtggctacagattattctgagtgatcttaaagtcaaatgggaaggaagagtgaagttgtattgtgataacaagttaacaatcaatataactcataattccattcaacatgatcgtacttaatatgtggaggtggaccctcactttatcaaggaaaaactagatagtggctggatttgtactccatagtttcaacaaaggacaattaattgacattctaaccaaaggattgactagttactctttgcagaaaatcacaagcaaactgggaatgaaaaatatatattctccagcttgggagtgagtgttgattgattgatggattgactaattgtgattgattgacaacttgattgattaaaatttacagcttatacaagctataaattaggctgtaaatcagtgttaatattagggctgtaaattaaggattccttccttgtttgtatagttgagtaatggtgtctacattcaatatattctagggttgttttcttttattgttttccctgtaaaccctatgtatattcattgtaaattcctccatcaatacaagaagtacaattccatgattgttcacaatgtctatatctttgaggatttcaagtgtattagattcaaatttctaaccatggtcttcttcagcaggatatgttctataatttcttttggatgaaagtagaggcttaacatatagtgaaacaggatattaaagagaaaaaaataactgaagagggtttattaccatgagaggcatgagcccttggtgtgaaatcatcatggtgatgtaaaaaaatggatcttttagcttctcagccaaaattaatctcattactttccattagtacaatttacttatcttttctcccaatgtttggaaacaggggttgctgg

SEQ ID NO: 12980 - DNA, 5723 bp, Vitis vinifera
  Intron number 2 from transcript GSVIVT01015191001 (locus G SVIVG01015191001) derived from phytozome v7.0 (chr-ID chr1 1; pos 1681710 to 1687432)
gttttcggtccacaaaggttggttgtttcgatatttgaagttctattttgtgttccattttgactatgatgcatactatctagttcttttttggtttttttgtattttctttgttggggtggagtgagagcatcctctccaattaaggtgtaagatagacccaagactcaaatagaatcgagttagcaaggcacttgcctgttactgtattgtcttgggatttctcatattgaaatggtgttaaggtgtttgtatgatctataaactactgctttctaatagtagcaatacttttagaaccgaaacataaacagatttattgcaagtgtgttggttggaggactcaaacagtttaactttccagcccagacaaattctatttgataaaagaaactgaaaaaactaataaaataaaagaattacttactagataaagtgatgaatataggtaaaatttgttttaatgaattgcatcatgtacagaaattttctttttaagcaatcttatgtttaaacctggtttgctccaagaagtcaggaatctgaaaaccattggttgctccctagaagacaaatgaactatagatcattttaatgctcattggcaatttgtggaaaattttgaactaccaaatttaaagaatttattctctgggagtctggagattgtgcattcaaggtctcaaatcttgttaagggtccagaaacatggattctagggctccggcgattcaatcttcatgcgaggagtcgaggctgatcgaggccatcgtcggtgctgcgttgtgggctgaaggaggaggaaagactggtgcagatgaggccctattggaggaggtatccaggtactctcttcccgaaaactgttctcttcttagtttcggggatcggggtcttctttcttcttcttcttttttctgcggggaaaaaaatgaggacgttatggctgttcgggacttggtggcactcgaggggccatatgtggtgaacgaagaagggagggctgacccgttgagaatcattgaggctgatgggagggagagggaaatttctttcgacatggagaagaatattaaggagagtaaggggggagaaatgacggtagaagttacgggaagagtttcggaggaagataatagaagtgtgctgggctcgtggatgaatggtgattttataatctttgtaagtgtctgggtatgcctacggagggttttgagggggaaattttattgttattaagaagaatggaagagtgaaagaattttaagggtggtgtggcaggaaaaaaaaggaaggttcaaaaggtctccaagtcagagagagaattgaaaaaactggagtgttcagtgaattattgtgggactagaaagagtgcggggttgcttcagattgctaactgaagtttgggtttgttggtccagtgaggggtgaggggattattaagatggatgttatgaaattaagagtcttgtcgtggaatgttagaggggctaatgatagtgagaaaagaaaggtgattaaggcgttgatcaagagtcaaaaggtggatgtagtgtgtttacaagagaccaaaatgcaggagatgtcaaggatgatagttagaagcctcggagtgggaagatgtctggattggaaggtgttaaattcgaggggttcttctggcggtgtgctggtgttctgggataagagggtgctgcatttattggaagcggaagtggggaacttttctgtgtcttgcagattcaaaaattgtgaggacgacttttgttggttattctctggagtttatgggccttcattgatgaaagagagggaagatttttgggcggaattaggagcggttaggggtctatggagtgatccttggtgtgtggcaggggatttcaatgttgtgagattccctgtggagagcagtaggggaggcagattatctgcttcaatgaggagatttttcggagattatggaggatttagagttgagggacctgcctttgcaaggaggctctttcacctggaagggaggattgaataatcaatcccattcaaggcttgatcggtttctgatttcgaatgaatgggaggatcatttctctgggtctatgcagtatgtccttcctaagccgacttcggatcattttccaattcttctagacgggggaggagtaaggagtggtccgatgccgttcaggtttgagaatatgtggttgaaggaagaggggttcaaagaaaaaatgcaggggtggtgggtggggctcaattttagtgggtctgcgagctatgtgttggtttctaaattgaaagctttgaagtctctgttgagagattggaataagctggagtttgggaaagtggaggtcaataaggttttggctttgagtcaggtggatttttgggacaaaatggagttatctcggactctctctgttcaggaggtggacgcaaggagaggagctaaagaggattttaagaagtgggctttgatgaaagagatatcttggagacaaaaatcaagggaagtctggttgagagagggggacaggaatactaagttcttccacaagatggctaacgctcacaggagggggaatatgttatcccgggtcaaaataaatggtgtttggttaacaaaggagaatgaggttaaagagggggtggtgaatgagtttaaagctatgttgtcttctgctggaggttggagacccagcttaaggggattgtcttttgagagattggaggcggtggatgcagccagtttggaggagccgttttcggagcaagaggtgatggaagcgcttaaaggtttttgtggggataaagctcccgggcctgatggtttttctatggccttttggcaatcttcttgggagtttgtgaaagaggaggtcttggggttttttagggagttccataaccatggcaggtttgttaaaagtcttaatgccacctttattgttttgattccaaagaaaggagggacagaagatttaagggattttaggcctatcagcttggtgggaggtctgtataagtggttggctaaagttttagctaatagattaaagagggtggtggggaaggtggtctccaaggctcaaaatgctttcgtgcaaggaaggcaaattctagatgctgttccggtggctaatgaggttttagactcggttttaaaaaacaaggaagaggttgtgatgtgtaagctggacattgagaaagcgtatgaccatgtggaatggtcctttttgttttcagtcatgaagaagatggggtttggggaaaaatggattagatggatgaagtggtgtatctccactgttagcttctccgttttggtgaatgggtcttcctcaggtttttttcaaagctctagaggtttaaggcaaggggatcctctctctctgtatctttttgtgttggtgatggaagcttttagtagtctcctaaggaaaacagtagctgggggctttgtgtctgcttgtaaggcaagaagtaggggtggtgagggagttaatgtgtcacaccttttgtttgctgatgacactttggttttctgtggagcttccaaggtgcaattgctgcatttaaattggattttaatgtggtttgaagccatgtcgggcttgagaattaatcttgacaaaagtgagcttattccggtgggttgtgtgaataatgtagaggagttggctgcagctattggttgtaaggttggaagtctcccaacctcttatttgggcttgcctttaggtgcgcagtataggtcgcgggctgtttgggacggcatggaggagagaatgaggaaaaaattggctagatggaagagccaatacatatccaaaggaggcatgattactttgatccggagtactctagctaatatgcccatttactttatgtccatgctctctatgcctagaaaagtcagactgaggttagaacggattcagagggagttcttatggggaggtggggcccttgagaggaagattcatcttgttaagtgggagctggtttgtcttgagaaggataatggggggttgggggtcaagagtctttctatcctcaataagactcttttatgtaaatggagttggagatttgctatggaaagagaggctttttggaaccaagtgattaggggaaaatatggggaggagcaagggggttgaagttcaaaggaagcaaggggggagacgcatggtgtgggattgtggaaaactcttaggaaagaatgggaagttgtgaaaagtaggcttgttttcgttgtggggaatgggaaaaggataaaattctggaaagacatttggtgtggggatgaacccctttgtgtttcttttccttctctatttgcattggttgtttccaaggatgcttgggttaaggatgtttggaggtgcaatgagggtgggggaagttggagcccgttgttttctagaccgtttaatgattgggagttggaagaggtgtgcagtttttttgtggccttaaataggaagcaaattcagcaaggggtggatgatagggtgatttggagagagactaattgtgggaagttttcggttaagtctctctacaaatcattagtatcaggccatccaatctccttcccatcgtcggctatttggaaagttacggcgcagcctagagtgagtttttttgggtgggaaacaacgtggggaaaggctctcaccttggatcagcttcaaaggagaggttgggctctagcgaacagatgttacctttgtcaaagacatgaagaatcaattgatcacattcttcttcattgtgataaggttagaactctttgggtgctgctctactcaatgtttggggtacagtgggtgctgcctgccacggttaaggagacgctttcggggtggaatgggtcttttgtggggaagaagaggaagggtgtttggaaagcaagtcctttgtgccttttttggacggtttggaagacaaggaacaaagttgcttttgaggaagaggagttgtcaatccaaagactcaaggcttcttttgtttattttctttggtcagagacgaaaaggtctataaaagatggtccctcgaccttagttgattttgttgggtgggtggcttcccgttaagggtgtggatagggtggctcttcgttccttggcgggctgctagggagtgtggggtgtttttctttctttttcttttctccttcttgtacttttagccactgcttcggtggtttttaatacaatctctttatttatctaaaaaaaaaaaatcaaccactttttggtatagacatatccatttggagaaatgtgatccaatttagtagcataagatagaaaattaaaatgagtccttggaaatcaattatagagactctaatatatactcttctttacttatcaaaaaaaaaaatcaattatagagacagaatttgtcatttaacttcaaaatattataacctaaatatatgcatgataagaatatggtgagtagggtgcaaaatgtggactctattgagtatatgtgaacatatcatgagtaaggtgcaaaatttgtacactgttgtatatgtgtgtagataaggcttaacccatcaatatagctttcatgatactacttcaatgactggatacatatcattcttcttaaaaatgcagtatgtttatctgattggttgatgctcaggagaggaatgattttacagctcttgtttccatctccaggaaaacaatacc

SEQ ID NO: 12981 - DNA, 5838 bp, Vitis vinifera
  Intron number 1 from transcript GSVIVT01015993001 (locus G SVIVG01015993001) derived from phytozome v7.0 (chr-ID chr9 ; pos 16937957 to 16943794)
caggtgatcccatctgtgtcaaaatatgccggaacacaaaggaacatgaatatatagtatatgtagggcatgcacgcttatgtgactggaaccaaagaaatcgtttagcttcaaagaaagtctccttattctacttctttaattagttaatttaatacactgaagactaatataatgagaaagtgccaagtgggcatcgggtgaacaccttgagcttagattaattaattagtcttgttctagcttacgtcttcaacttcttatatgtactagatgagtgcatatatataaacaacatgtgaaatgaagtagtatatggaaagagagaaggaaaacatgaattttggagttatgctttgtgcagagggtttggattaacttcatgctgtaccctaaacccaaatccagcccagcccaactgaattggacagatctaaagcccattggccagagaggacttctgtgacaacccatatatatagaaaatttagtacttgaattagagctgttttgatcttagtccatcttatatttattgtgtgtatgtctttaattggtagagagactacaatcttttcatatttaaagccagaagaattctcttcaatgattcttagaacttgaggaagaaacaagaaccgaacctattgttgtttttttactgtttttattgttattacctactattatgtcatgatcatggtcatcaatatgttagattttagttgcttatagaatattcatttgttttgaggtttaaagaacttttgcattgatgctaattaatgaagatgtcttttgtaaagctttcaaacgggtttctgactgcatatgatgctaaaagagagatgttttagaaatcgggcttagttatgatgctaatctccaaattaacttgatatgccaaaatattcccgtgtaagaaatgctagattgtatactttgaaaaaaatagctcacaaacttgagagatatagacttcttttatgttgaggttttatccaagttcctcaataaaatgagatcgaacaccaatttaagcaaacaaagaaaaaaaattccagaaattagaaaaatagagcaagacaagtagaatttatgtggtttggatccaagattggaatcttacatccacggatcaagatcacctccaaaaatccactaagaatgaaccattttacatcctttggaatctctgaaaattttcaagctctctatacagtacaatgaagaagattcaaactctaaaatcctctcattcttgttctataaattagaaaactcacacctctgttctgttttttttttcttcttctttcacccttttatacaagtacatggaaaaactaaacaaaacaggtatgctttcagttagttaatcaactaactttgcttatgtggccaatcactttttggaccatcaaattccacattctccacctcggttcaaaaaattgaatttggattcttcagatgaagatctgacttaaacattagttgcacattacctagaccaaatccaagcaatacctatatttgcttactggtagaactttagttgccatgttagctggattatcagttgtagaaatcttctccagcttcattgctcctgagcttacagtttctctaatgaagtgatatctaacatcaacatgcttggtcctttcatgcaacatgagatttttacataactcaattgcactctgactgtctgaaaatatttccactacaatattcagcactctaagctccttaacatgtccttgcaaccagagagcttctttcatggcttcagtagctgttatatattcaacttcaatttttgaaagtgccactatcgattgtagttgtgacttctagctaataggttctccaaataagctgaaaatataacctatagttgaccttctcttatcaagatcccaagcataatctgaatccacataacctgtgataccaacaccctctttagaagatccaaacttcagccctacaccaagagatcctcttacatattgtagcaaccatttaactccattccaatgttctctacttgggttagccgtaaacctgctcaaaacacttattgaatgagaaatatttggctgtgagcacaccattgcatacatgagtgaccctatagaattagcatatggaacataattcatctcattcctttcaactttatattgaggacattgtgtcattgataatctaaaatgtcctgctaatggtatacttataggttttgaattctccatggaaaacctcttcaaaaccttttctaagtagcccttttgtgaaaagaataaagtagaatcctctttgtttcttacaatttccatgccaagtattcttcttgcattcccaagatctatcatatcaaattctgactttagaatcctcttcacctcttgaatttgtgacttatctttgcaagctaataacatatcatcgacatatattagaagaaacatcatcagactttcttgtaacttcttgtaatagaaacaatcatcataactactccttttgaaaccaatctttagtataaaggtgtcaaaccttttataccactatcttggggattgtttcaatccatataaggattttttaagtaaacacactagatgttccttttctagctcttcaaagccttcaggccgagtctttagaattttttcttctaagtctccatgtaaaaagagagttttaacatctagttgctccaattcccaatcaaactgagctacaatggacatcaatactctaattgaggtatgtttcacctctagagagaatacttcgatgtagtcaaggccttctctttgagtactcctcgagccactaatctagctttaaaccttatgggttcatgcttagtggcaccttgtttccttttaaatatccatttacaacttaccactttttgatttggctttctttctacaagcacccaggtctgattttttctgtaaggattcaaattcttcactcattgctatgaaccatttcattgattcattgttgtttataacttcctggtaagagagtgactcactttcttcatattccatagcagtcaataaagcataggcaatcagatctgccaaaccatacctgtttaggggttttatgttccttttagctttatcccttgacaagagataatcaagaccagcttcttgtgagttggttcctgcaccaccttcaacatttgaacctgtcaccttagtatcttctgtctctaggccactatgtgctaaatcattttgttgatcatgaccatcttgagatgataactccacctcaaactcaaaatggtctttgtcaagtgtcaagctcctattttcagaatcttcctttgtacctgcagtgttagttctcatagaaagcatttcattttcattaaacacaacatcacgacttattattattttaacacctggagattccttattccatagcctgtaacctttaacaccctctggatgacctaagaagatacattttattgaccttggttctaattttccttcactttggtgaacataagctgtgcacccaaagattctaaggtgttcatagttagaaggctttccagaccaaagctattctagagttttaaagtctattgcactagatggagttctatttactaaatagcaagctgtcaatacagcttcaccccaaaaatgtttagataagctagaactatatattactctatctaacagtgtctattcatactctctgctaggccatttggttgaggtgtattccttactattttatgtcttaaaataccttgatttttacaaaacatttcaaattcctcattgcaaaactctagcccattatctattcttaacacctttacttttttattagtttgattttcaactaaaccattccactccttaacctttgttaagacaatatgttcatctttagtttttaacaagtatagccaaacttttctggagtaatcatcaatcaaggatagaaagtacctgtttccacaatgagtaagactcttgcagacccccataaatctgattgcacatattccaatacatcctttgacttgtgtattgcaactttgaatgccaacctgtgttgtttgctaagaatacaatactgacaaaaaatcaatcttgctgatgctatccccacatagtaggccatgtttgtgcaattcttttggacctcgatcacttaagtgaccaagtcttctatgccaaagaattgttttattagttttagttcttaacactgatcctactaaaccttttaatgtgtgaccttctaggctatataagccatttctcttctgacccttcatgataaccatggcaccttttgaaattgttaatttcctattttctgctttgaagttataacctgattcgtccaaagttccaagagatattagatttatcttcaggtctggtacatgcctgacttctttgagagtgcttttcattccgtcaaacatgttaatagccaccgtgccaattccaaccacactacagctcatgttgtttcccagtagcacatttccaccattaaattcttgataggatgaaaaccaatctattcttggacgcatatgataggtgcaacccgagtctaagacccattcttcatgattttgattcaatgtaatagtgagaacctttgcactgtcataaccatcatctataatggaaaaacttccttatgcttgaggtttttcttcttcttcttgtttatctgggcaaattcttcttatatgtcccatcttgttgcaatgatagcatttgacattcctataatctttcttgcatttagactttgatcttgaatgtgattttccttattttccattgttatttttattctgaggtcttcctctagcagttaaactttcaccattgttagttttgtcaaaggatttcatatctaacaccttagcattcaaatgtaatggcatctctaccatatttcaaggtttctttaaaatgcttcaaagatttaggtagagagtttaagagaatgattgccttatcttcatcctccaccttgatatctaaactctctaaatccaacaccaatttattaaactcatctaaggcatcatcgattggcttggattcttcaatcttgaaaccatataaatgttccttcagataaatgcgatttggtaaagctcaagttctgtacagttcttccagctttttccaaaccccagcaatagttttctcatgagatatttttcttagaacctgattagaaagacttaatatgatcgtgctgtaagcctttctttgaaattcttacatttccttttcagtcacactttttggaagatctttatcaggcagtaaagctttttcaacgccctgttgaatcaaaatggccttcatattcatcttccacaactcgaagtcatttctgccattgaatttctcaatgtcatactttgtagttgacattcttctttctttgttcttgattcagctctgacaccaaatgttgaggttttatccaagttccttaataaaatgagatcaaacaccaatttaagaagacaaagaattttttttttcaaaaatcagaaaaacaaagcaagacaagtagaatttatgtggtttggatttccatgttcaagtaaaaaacacgttggatattgacacttctctagcagaccttgggcatgcttcgaacacactgtacatgtgtttcaagtatttaagtttgtaatttccttgcatttcttatttatgtttgcatcctgaattatttatatttatagaattttctttctgaaatatagtttgcaagggagaaccc

SEQ ID NO: 12982 - DNA, 14966 bp, Vitis vinifera
  Intron number 1 from transcript GSVIVT01023015001 (locus G SVIVG01023015001) derived from phytozome v7.0 (chr-ID chr1 2; pos 16886662 to 16901627 reverse strand)
ggtttttatttgggttttagttttggagtcgtttagcctttaaggcttatagtcgtttttctctttaaggcttatagtcgtttagcctttaaggcccttaactgttctcttggagagactgcatgcagtgtccttagtgttatgcacctatttgccactacatctctctcctgattgctctctcattaaaccactgctcctatctctttcagttttccattgtagcctcagtttctcggtgtagttttcttaacaaaggcaccttacccaaacactattggttttattaaaataaaaaataaaaaataaaacaaacattttcttcatcctttcatctggaggaatatccattcaagttgtactactccttactaaaggtgtgcactgaaagtaaggttttttggttgttgaatcctagaggtatgttgtcggttcccttttgcactatgttttgatacccaagaagggcagatctactctaaggacagtggttatcatgcctcagcctaatcgaataagtgtcctctctcacttttcctatctctatttgtttgttttaggcttggtcaacttccttatcccatttttgagacctaatttttaccaacaatcttaaagtaaactgttttttaaaaagaatggagacctccctagttcacacccaaaatatgttgtaaggaattttagaaaaattccaaatgacgaaggataaagatgtttcatctcaaatccatggctaccacttacttataaatgaccttgctaataaagaccttaaattgcctaaacctttctgtggctagatacttgattgagactcttctagatttttttaaaaactataaaagtaatatgaagcacaaaaaaaaaatgtcctttgaaaatgtcataatccatattaggattgagaaacataacaaaaacagggataaagctgaaaaagccaaagaactatcttccaaggctaatgtggtagaagataaacctaaacccaaaaacaataggtccagaaagcaaaattgaaagaccaagcctaatttaaaaaacaaggtccataacccaacaataaaaaaaaaaaaggtaactgctttgtctatggcaaacctggccatcatgtagcttaatgtcgccataggaagaaaactgataaattcaaccctaaagcaaatctgataaagatagaggtaatcattgttgcaatctcctctgaggtgagcatggtcaccagtgtgaaggactaggtggtagactctagggctaccaagcacatatgtggaaataaaagtacattaacttcttataccattgtaaaagaaggagagcaacaagtgttcataggcgattcttgaatgtcctcgatgattgggaaagggaagattctccttaagctaaccttgggcaaagtgctcacctctagtgatgtccttcatgtgccagatattcattggaacttaggattagtatttttgcatgggaagacaggagtgaggatcatgtttgactatgataaactcgtctgaataaagaatgatgtttttgtggggaaaggctattataaccataatttatttatgttgaatgtttccaatattatcaatgacaatgcatcttcttcttctgtttacatagttgattcttgtgatatttggcatggtagattaggatatgtgaacattttgtatataaagaaaatggtttaatttctaaattgtccttaaaaaaccctggaaaatgtgaagcatgtgtagaatctaaaaccacaaagaagttttgcaaatctataaaaagagaatttgaacttttaaatttaagtcacaatgacttaggagatttgaaaagtacaatgactagaggtggtaaacatttttacataactttcatagatgactactcaaggtatacaaaggtatatcttttgagaaacaaagataaagcaagaaatgctttcatcaagtacaaaaatgaagtagaaaataaagtaagaaaattaaaaggcttagaagtgacaggggaagacagtatgagtccaacctcgttaactttttttatgaagatcataagatcattaatgaaattactctagcttattcccctaagtcaaatgaagtagtagaaagaaaaaaacaaaaccctaaaagaaattatgaacttaatgttagttagctcaggaacacccttgaatttatgaggggaagctatcctttttgtgtgtcatattcaaaatatgataccttataagaaaaccagtaaaacaccttatgagttatggaagggttatgcacctaacattgtatacttgaaagtataggggtgcttggctaaagttctttttcttaaacccaataaactaaaactaggtcctaaaacttttgatacaatgtttataaggtatgctgagaatagtgcaacatataaatttctggttatcaaatcagaaaacaacctagcagaagtgaacacaataatggaaacaaagaatgttgatttctttgaaaacatctttcctatgaaacctagtggtagggaacaaatctagagaacacttagagtagagtttaataagttttctaaattgaacctagaatgagtaaaatagataaggaaataaacaaactttggagatggtttctacaccttcttaatagatgaggagcctagatcctacaaagaagctataacttctactgatgaaccattctggaaaaggccattaatagtgagatcgaatcaattatgtataaccgtacatgataactagtatatttacctcctagtgtaaagactatcggttgtaagtgaatctttaaaagaaagttaaaacaagatgggtccatagagaagtataagccatgtttagtagccaaaggctttaaacaaaggagatatattgattactttgacacttttgtccacgtgactagaattttcttaattagagcgtcaattgctctagtctccattcataacctagtgatacatagaatggatgtcaagactatgttcttaaatggggaattggaagaggaaatttatagggaccaactcaagggttgcatggttctaaggaaggaggaaaaagtgtgtaggctagtgaaatcacagcatgggttaaaacaagcactcaaacagtggcacaacaagtttgatcatatgttattaactaatggattttccattaatgatgctgataaatgtatttacaacaaatttgaggataacatatgtgtcatcatctatatgttgatgacatgttgatctttggaactagcctaaaggtcgtttgtgagactaagaaattcctaaggttcaagtttgacatgaaagacctagctaggaaaggcaaaggtggttctaggaatcaacataactagaacacctaatgggcttaaactatcttaagaacattatgttgataatatcttaaggatgtttgaacactttgactataaaccaatgttaaccccttatgattccggctcacaactaaagaagaacaaagaacatagtattgcccaaactaagtatgcttagatcatagagaacctaatatacttaacgaattgtaccaaatctgacatcacttatgcagttagtagattgagtcggtacacccaatgtcctaattaggaccagtagactattgttcgtagagaacttaagtatttaagaggaaccattaactataacatgtgctatagtggatttccaagtgtccttgaaggatttaatgatgcaaattagatctttgattcaagtgagatgaaatccactaatgggtatgtctttacccttgaaggaggtacagtttcttggaagtttgccaagcaaacatgcatcactcggtctaccataaaggttgagtttattaccttagaaaaggcaagttatgagattgagtggctcataaacctctttgcaaatatctctttatagatgagaccaacatcctctatgtcaatgcgttgtgatagctaagctacaatatctaagactaagagtaagatatttaatgggaagaacatgcatataggcctaaggcacaatattgtgttgtagttgcttgaaacatggaggaaacttcgaggagattagggcttatgcttaatacaaaagtcaagagttatggaaacccaaccgattagattggagaccctatgaagtaggttcatatgggtaataacaaatcatttgtgactgagatgttctattagttttatctgaaagtccatccctataatgtagctagatagatcaatgtctaatgataagtatatttacagttaatgaataccatattccttatggatagtgtgtttagttgtagaaaacacttgatggattcacctatctgacaatgaaggcggggttgcttcctttgagaacttagataggttctctagagctcttatgaatatctaagtaaggcgtatgacctattttcatcgacttgttttgtacaactcgtagttgaaaaaccaatgtggattgtaggctccttgaattacataaagaaatacaggttcataaaaatttattttcaccaagtttctataatttaatacttatttatcctaaggctggttcatagcctgttggtactagttttgatgcattggattctagttttcctccaatcatcttcttcttcacacatacactttgtgggggattgttggtagagtgtttgtgtgtgtaagtgttttaaagtgaaaaaaaaagtcccacattggaaagtgatgagcacttttagtagttatttatactagcccaccttccttagtctcatgagcttgtagagagacaagaaaggattttgcctgcctagggggtccaagcccatttaaaagggaatttggatggcttaggccgaaaaccccttaaagcccaatatgtccacacacacacatcttgtaggagaccccttgcatatgcacgcgagtccaacgactttttacattttgagaactagaatttttattttaaattttgaattcaattttgagtttggaattggtaatcgaaaaattaattttgcattcttccattgggtttttaattttggttttcaaatcaggtcaaatgagattttattcctttccattctaagtttattatctagtttaaatggtttttatttgggttttaattttggagtcatttgacttttatggcttatagtcattttgctttttaaggcttatagccttttagcctttaaggcccttaactgttctcctagagagactgcctataaatgggcttcttctccttaacattatacacctatttgcgaatacatctctttcctgattgctctcttattcaaccactactcctgaatctctctctctctcattctaccactataacctcagtttctcagtgtacttttcttaaagaaggcaccctacctaaacacaactggttttattttaaaaaacaaacaaacattcttttcatcatttcgtctgaaggaatatcaatttgagttgtactactacttgttgaagatgtgcactgaaagcaaggtctgttgaatcctggaggtaggttgtcgactcccttttgcatcgcgttttgatacctgaggaaggtgaatctactttaaagacaatgattatcacgcctcaacctaattcgataggtgtcctctctcacttttctcatatttgtttgtttattttgtgcttagtcaacttccttatcctattctttgagacctaatttttaaccaacaccttgctctattttttctataagtattatgaccaaaagcaacaaagaggtatgtcacaccccaaattctaaaattatggtttcattataatattaaaggattaacccataattccatgatttgaaatgtgaattaatgaatatgctataatgtttgtaatataaaatgctaatcttttggttttcatgttaaaaaattctagttctattgtacatgtaacaagtagaagtttttttttcaaatacttatttgtttatccttacatttaattattttaagtagcaatagttgaaagtttgtagctcttgcttatgaaatacctagcagggatgaataagtgtttaaactttttggtccaaaaaattaattattttttaattttgtgataatcacttttcaatttaggaaatcttaaaggcattcaacataagacacataggatttttacatggaaaaccactcacacaacatgcagatgtaaaaaccacgaggtcaagacctcgaatcaacaatctactatatgagaaagtagtacatagaattatatactacccttagatttactctgcaaaacctatactacaatccatgtctatgatgcagcacctcgtgtcctccaatggatctctcctcaacgcatgaggggatatagatctcctttataacccaacaaatggaaagccaagcttatttgagagttttgggttaagcgcaaggactaatgaattaaaagtttaggttcattcacttttcaaaaaactctcacaataggcatatataaaatctagtggacttagaataaatttaaaagtcatattttaacaaaaataatttagaaacttaaaaattttaaaaaggtttggaaagatttcatattttaaattaaaaaataattggaaagattttccttttaaaattcttttccaaattccttaaaagatttggaaagattctctttttaaaattctcaatttaaaatttatttccaaattatttttattatttgaatttttttttaattctcaattttaaatccttaatttaaaattcctttttaaattatttttattatttagaaagacttttctttttaaattctcaatttaaattctttccaaattaattttatttctaattttcataagtccattctatgtcttctatgtcattattctcaaatgacacaaccacacttacatgtttagtctcaagttgatttttttggcaacctagaatcttcaaaggaataaaaatcatgggaaagtacacgaagtctcaaactaggatggatgaaacaaaattgtcaacttaatctaaatagcctaatgcacttttcctatttaaatttttttaaatatagataatatgggcctatggatggagagttttcaaatacatactacatgttttattagaaatttcactaagtatgtgaaatagttaatttttcaaaatttcataacttaatacaaaaaaaatggcagatattgttattttcgtgttggtaatactcaaaataacttttctatatttttatctttgataattttacttaggtgaactttttttttctaagaaaaatcagtaaaagctgtcaatttataacaaaaattgaaaaattaggttttgatttacttggaattaggttttcaaagtatttttattaaattcaaaatggaaggtattttgttatttacattgtaaacttaaagtaaatgcagatataaatgacaaaataaaaaataaagttggcataacgtaaatgtaatgttgaggatataactatgttgaggtgctagagtcagtgtggttgagttgagaggtacgccaactacactaagaggtgcaccatttttgttgcatgttgtgcactttaaaacaagtttagcacaccttaccttttaaacatattctggacaccactagttaatttgtgcatctcaccctttaaacaaatcctatgcaccatcacttaagttgcacaacttatcctttaaataaatcttgcacaccttaagatagaaaaatcttgtgcacttcaacctgttgttcctttatttgtcacacctcaacttgttgcaattagcgcctctattataccttagatgtttcccatttttcatattttctccattttttgtgcattgaaaatatctaaaaatcatttctaaacccttattgaataattttaaactttaaaaacttatttacaactaaaaacttatatttataatcaagataaatatatacatatccaaaaaagatgaacattaattgggttcctttaagcaatagttatttttatagagttatgagtataattctttgttcctttcatgtacaactaactagcataaagcactccaaatacattagaaatcgatagtaacaatagttacaaaatattgtgtgtgtgtggggtgtgggtgtgtatattggtgaaatttcatttttccaaatgaattctattgtgttactataaacaagtattaaataattattttataaaccttttagttataaataaacttttctctactgagctgtcactcatttttttctctaaaggtgtatatatagcatttccacactaagtcattttcaacttattatataccttcatgtacctcaacaattagcattttgttttcaaccatgaatatctatattttagggactgttattcaaggacatacatttatacccgctattctatccccccatggatattcttaaggtatgtcttgggtctttcacattatagtattttatccttcttcttttaaggacactcatccagggaccatttctctcattattttccataaggtaaacctatcatggtgccatgattttaaattcataatgccttcaacattcttcatgttgctcatactgcatatccaagttagtttccagcaaaacaaagcctattacacataacaaagtatatcacaatcatgagctataaattcttagcatttcaatcaacatactttgcattcagtcattatatatgcttagaatttcctcacacatccataattcaacatgttaattaatttcacaccttaaaatatcaaccaaaatatcaataaacaatttaattttcaaatccataaaaagaaaaattagagttttcaatagcaacttttgtacctattttatttctcagtttttcatttcatctcctttggttttttcactttcaagaatagttctcagtttttagaattttttttatcagttgatacaacctattaaaattatatattcttgctagcaacttacctttcttaacctcatgagcttgtggagaggcaaaagggggtctcgcgtgcctagggtgtccaagccaattcgaaagggaattcgggtggcttgggtcgaaaaatccttaatgcatgacatgtccgtacacacatcctgcatgcccccccacccctttcccacgtacacgcatgagtctaatgactttttacattttgaaaactaaaattttctatttttaatttttaattttattttgagtttgaaattttgaattcttctattggatttttaatttttgttttcaaatttggtcaaatgatcttcaattcccttccattatgagtttattatctggtttaaatggggttttatttgggttttagttctagagtcatttagcctttaatttgattgttctcctggagagactacctataaataggcttctcctcctcagtgtttcacacctatttactagtacatctctctcccaattgtcatcttatttagacactactcctctctctctcattctggaattgcaacctcagtttctcgatgcaattttcttaatgaaggcaccctacccgaacactactagttttattaaaaaaaaacaaacaaacaaacgttctcttcatcatttcgtctaaaggaatatcagtttgagctacattactacttgctcaaagtgtgcaccaaaagcaaagttttttggttgttgaatcttggaggtaggttgtcggttcccttttgcactgcattttgatacccaaagagggtagatctactttaagaacaatgattatcatgcctcagcctaattctataagtgtcatctctcacttttcctatcgctgtttgtttgtttgttttgggcttggccaacttccttatcccattatttgagacctaattttttaccaacaccttgctttattttttccataagtattatgactaaaagcaactaagaggtttgtcacatcccaaattctaaaattatggtttaattataatattcaaggattaatccatgatttgaaatgtgaattaatgatatgctataatgtttgtcatataaaatgctaatcttttatttttcatgttaaaaaattctagttctattgtacatgtaacaagtagaagtttttttttaaatacttatttatttattattacatattaattattttaagtaataatagttgaaagtttgtaaatcttgcttatgaaatacctagtaggatgaataagtgtttaaactttttggtccaaaaaattaattttttttaattatgtgacaaccatttttcaatttaggaaagcttaaagacattccacacaaacacatagtatttacgtggaaaccacccacacgacatgcagatgtaaaaaccatggggtcaggacctcgaatcaacaatctactatatgagaaagtagtacatagaattatttagcagatactacccttagatttactctctaagacttatactataatccacgcctgtgatgcagcacctcatgtgctccaatggatcttatctctgggcctaaggagatgtagatctcctttacaacccaacaaatggaaagccaagcatatccgagagttttgggttaaacgtaaaaactaatgacttaaagtttagtttcattcacttttcaaaaaactctcacaataggcatatatataaaatcaagtggacttagaatcaatttaaaagtcatattttagcaaaaacaatttagaaacttcagaattttaaaaagatttggaaatattgcatattttaaattaaaaaaatatttggaaagattttcctttaacattcttaatttaaaattcttttccaaattcctttaaagatttggaaagattttcttttttaaattctcaatttaaattcctttccaaattatttttattatttggaaagatttttctttttaaatttttccaaattaattgtatttctaattttcataagtctattatatatcttttatgtcattattctcaaataactcaaccatacatgtttaatctcaagttgattttgtagcaacctcaatctcaaaagaatgcaaatcataggtaagaatgaaaagtcttaaaccaagatgaatgaaactaaattgtcaacttaatgtaacttgcctaatgaacttttcctctttttttttttttttaatatagatatgtggtccaatggatggggagttttcaaatacatactacatgttttattagaaattccacctagtatgtgaaataattcatttttaaaattttcataattgaagataaaaagtgacggattttgttattttcatgttagtaatactcaaaataatatttctagatttttatctttgataattttacttcggcaaactttttttttttcctaagaaatttaataaaaactatcaatttataactaaaatttaaaaatcatattttgatttacttggaattaggttttcaaagtatttttattaaattcaaaattgagggtattttgttacttacattgcaaacttaaagtaaatggagatataaatgaaaaaataatatatgaagttgacataacgtaaatataatgttgagtatacgactttgttgaggtgttaaagtcaagatggttgagtaagttgagacgaacaccaactgcactaagagatgcaccatttttgttgcacagtattcactttaacataagtcttgcacaccttaccttttaaacgcattttgcacactactacttaagttgtgcatcttatgctttaaacaaatcttgtgaaccaccacttaagttgcacacctcaccctttaaataaatcttgtgcaccttcagatagaaaaatcttgatcactttagcatgttgttcctttacttatcagagctcaacttgttgtaatcagcacttctgtcataccttagaagtttcccatttttcttattttcttcatttttttatgccaaaatatttgaaaatcatttctaaactctaatgaataattttaaactttaaaaacttatttacaactaaaaacttagatttataatcaagatcaaatttgtacatatccaaaaaaaaaaaccttcatcaagttcttttaggaaacagttatttttatagagttatgagcatgattctctattcctttcatgtacaacaactaactagcaaagagcattccaaatacattagaaatccacaataaccatagttacaaaatattttcgaacttcataaaataattctcaagatatatatatattagtgaaatttcatatttccaaatgaattctattgtgttaaaacaaatattaaatgattgttgaataaaccttttagttataaatacacttctctgctaagctatcatcattattttctttaaactgatttttggaccaacctgaaggtgtatatataacattttcacaccaaatcattttcaacttatcatatacctttcatgagactttcatgtacctcagcaactagcattttctttgttttcaatcatgaatatctatattttaagaactcttattcaaggacatatatttatacccgctattctatcccctcgtggatcttctcaaggtatgtcttgggtctttcaccttatggtactttatccttcttttagggacactcatccagggaccatttctcccattattttccataatgtaaacctatcatggtgccatgattttgaattcataatgccttcaacattcttcatgtttctcatactacatatccaagttagtttccagcaaaacaaagcctattacacataacaaattatatcacaataacgagcaataaattcttaacatttcaatcaacatactttgcatttagtcattatatatgcttagaatttctgcgcacatccataattcaacatgttaattaatttcacacctcaaaacattaaccaaaatatcaataaacaatttaattttcaaatccataaaaagaaaaattagagttttcaatagcaacttctctactcatttaatttctcagttttttgtttttgtctcctttggttttttcactttcaagagtagctctcagtttttagaattttttttgtcagttaatacaacctattaaaattaaatcttctggctagcaacttacccatctctaactactaccacatgtcatacaacttgtcattcgaagtgtcttgaactcaccctctcctcacacctgttccaaccccttttaattaaatctagagatgacaaatgacttccatattagccaagtaagataaagaagaatggttgaacttccaatcacacaaaaattaagcaagcaattgaataatctgccaacttaagtgcaactgttgttacaaaaaaaattcactattgtcaaacacatttaaactaatttatagctaaataatctgtcagcttaagtgctattgctattacagagaaattccactattattaaccacttttaaactaatttacagttagtttaacatgctaatcacccaagaaaacacatccttcaattaaatatatggtcaaaccgataatcgaatcatcaatcttcattcaaatattaagaaaatcaatattaagcttattaataataacttcaagtctttataagatcaggtaactcaagtgctttaggagttataattgactctatcgacaaataacatatctgtggaccccgcatttcgactcatgctcgaatgcgtttcccactcgatagtgagctcgatttttatttttttaaaaatttgatttttattgattaagaaaaaaaatgacttggagtcgccacttatttttgttttatttttaaagggtaaacaaaataagaaaaaaaaaccctaagtgtgactccttattttggaaaaggcggtctgtgaaaaaccggatagggttcgggggtcaggttacttatcgggaaggtacggtaaagaccgtagcacccctctaagtccctaaagtcgggtctctactaatagactgaagctgacgtggcaatcaatgagggaatcgatgaatactcaaatcgatcatgcacaatatgagaagcaaatcatgtataaagaatgagcaaaatacgaatagatgcgtacctgggcggcaatcttgaatgcgctatcatgaaacagggttagtgagcaatgaacaagatataattaagcgcatatcatggaacaaaataaatcaaacacgcacgataagtaaatcaatcaaacaatcaatcaatcgtcaattcacatatgtggggcccccaccaaagcccgttttatattgcatgaattaatttcataagttccattaattggaattacggaatttaattcttacttatttcaaagcattttaaaatatttttaaaaattcatggaagttgtaaaaattgcatgccgaagaaaattggcggcaaattttattggaaatgagattttgaatgattctaaaagaaaaacctaaagatgaaaattaaagataaataaaataaatcctttgataaaaatggaatttggaaaattagaaagaaaactagaatccggggaattatataaaaaatgggaatgcaaggaattattttaaaactctgaaatgagaaaataatgataatgaaaaaaaaatgaggaaagacacgcaacctaaagttgcatgcccaaaatggccatgcaagccatgcagcagggatggagccattctgaaggggtgctcattctgtcgtttctcttttcatacctacttctgaaactactgctgtttagcctttttcctctgaattgttttctggcgagactcataaaatgcaaaatcttccaagacacatgtattgatggagtgttccttaaagacttggagcatctgaagcccctgctctagcttaaccccttgttctttcaaacttacataccttt

SEQ ID NO: 12983 - DNA, 16845 bp, Vitis vinifera
  Intron number 2 from transcript GSVIVT01035309001 (locus G SVIVG01035309001) derived from phytozome v7.0 (chr-ID chr4 ; pos 280801 to 297645)
aaagaggttttgaaaattcttcaacagtgcagtcctcaagagggccatggaagaaataaaaaggaccatgaagttgcacctccacttcaaaatggcacttatcccaccacttacaagttgtgaggataaagcccttaaaaacatgatattatgtaataaatttggaactcattatttatttaacgatgttctgatttcacttttatctattcttattccatgtattatactttatgagcattcttgtctgcatcttttgcattgcacgtaacttaggtgcattaaaagttgcacagaagatctaggtcatgggttcctcgcaaatatatgacttgttcacaaccagttcatgggtctaggaagcccattagaggttgtaaaaaaccacttcctaattggaagaatggctagtcttagctattgggatgagttttccatgataagtgcattagtgtgtatggttacatattggacaagacctatggtgaatcatgacttaaggttatcaagcagtcatgacctcatcaaactgcttcattgtgttgtctctcaaccttgagagaatattgagcttgtactaaagttagcaatgactttgacatacaggtgagatcgtaagttgatcatatattccctatggattgagtcactgttgatggaagatggtagcgataggtattttcaataaaaacaccatgatgtttcttgggattaagacaatgtgccccttttggtgatcttaaagaggtgtgttcatggaaactatggtcatagtagttccttaagtaaaaatcgacataggctctttgagaggtaagacatgtcaattgaatacacaataggaggatttataactcaaggatggtagaggtagtcttgaaagactaataactttcactttgttagactatgaatatcagttcatgggaagactaaacacaataaatagcaagtcacaaacctgaacatttggtatctcattgttattttcaataaaataacaatgagatggtaagttgatcatatataccctatggattgggtcactgttgatggaagatggtagcaataggtattttcaataaaagcaccataatatctcttgggattaagacattgtgcccccttgggtgatcctaaagaagtgtgttcatggaaactatagtcatagtaattccttaagtaaaactcaacataagctttttgagagctaagacatgtcaattgaatacacactaggaggatttctaactcaaggatgatagaggtagccttgaaagactaataactttcactttgttagactacgaacatcagttcatggggagactaaacacaataaatagcaagtcacaagctcgagcatttggtatctcattgttatttacataggataccggagttcaattgattctttgtagtgggatgttgaatcaactttagaattggattttgagagagtcggtattcctatgggtcccaatggtccttactctaagcttatatactttgttggcaaggattataagagtcggattagctctaggtttacttttgtacataagggcattttgataattacgcaaggttacacaaaggtaaatgaacaaggtttttagattgggttaattgattaattagtaggccctgtttggttaattaatcaattaggactttctatattaagtgacctaagcccttagtgggctcaagtcacttaaacctaatagaaaaccctataaatacccccttaagggttagagtttatatagtttttctaaaaagccatcttctatctctaaagagaaagagaaagagtcatagcatccaccctcccttctatctccactagaagtgtgtcgatcaaggttcaagtcattgggaggaaaactttgaatttacgagacttctgcgatttcgttcttcattttcacaatgtggatttgattcgagaacatccgaatttgaggtatggttttcattagcactttttgaatccctttaaagtttaaaaatgttatttttccgttgtgcataggattaatttagaaaatgcttagaatagttatgcaagttcctaacctgatctgagcttaggaaatggagagaacctagttttttcccttaatgtttgtgctccaaagtgttgagatagtttagagggtgacatgatgattgacataataccttatgtggagaacctagtgaatcccttctccaagacattgatagggagagtctttgttagtcacatggatagcataggttttaaatgagtatttggcatgctttaaaggcatgatgctttgagggctaatgggagaatgttaggataaagcccttaaaagcatgacatgatgtaaaaaatttggaattcattatttatttaatgatgttctagtttcacttttatcaatccttattccatgtattatactttatgagcattcttatttgcattttttgcattgtacatgacttaagtgcattaggagttacatagaagatctaagtcatgggtttcttgcaaataaatgacttgttcacaactgattcatgggtctaggcaacccactagaggttgtagtgcatcataccaccttctaattggagggatgactagtcttaattatcaggatgagtttcccatggtgagtgcattactgtgtatggttacacattagacaagacctatggtgagtcatgacttaaggctatcaagtagtcatgaccttaccaaccaacttcattgtgttatctctcaaccttaaaagaatattcagtttatactaaagttaataaactgaagttagcaatggctttgacatacgagtgagatcataagctaatcatatattccctatggattgggtcattattgatggaaggcgtgaaaggcagacgcccgggcacgcaaagcccgtctcaacgaacgggaggagaaaaggcaagaaggaactttgcggaaggctcttggtgataaacgccccgcatcccctccacctgctggcgcactagataaaaagaagaagaagcaggttttcaacaagggaaaagaaataaaactctcatctcccccaaaggaagttgtaataccacctccaactttcgtaagaggaataacaataagaacgccagatctctccgttttgccctctgtttcaagcggctccagacatatcgcgtatctaaatggatcggggccttcagtgccagtgccagcggctagacggctggctcttctggctgaggaagcgacttcagtgaatcagcccgactctccttatccggacgcgaatgtagccggggcctcttgtacttaaacgttgcttcttatggcgcctttaacggaagaaacaggggttgaaagtcagggtttgcctcattgcgaaccaagcttccttgcccttgtaccggtgaaggggccagctataaggaggtctcatccggcccgtgatttaaagtctggcattagcgggcggcttcaggacattcttctggaaaccatcgaagtcagctgctcatccgcccaggaggatcatccggaggagagtgagacggagatggcagaagagaacccaaccgccccggtgctggtcccggatgagggttcacccgaagagatccagccggccgtgaataatggggccctagatccgagggaggagtcacaccctaccgcctcgtcaaggggaagtctagttgatgatgcggcttgcatctccgctagccctttcaattatgcggagttgggagagatgctgaaacggattccacccggctcagatgttgatgtgccttcagcaaaaatgtttgaagtggcggaaatggtatagttttacttcttgatttttcttgccatactgatgtgtttgtcacatgggttgtaattttgtacttcttgtttgtgggtttttctgcagctggtgagcggtattcgtggcatggcttaacaacatgatcttttttcagacctgctgcgtactgccgattatatgaaggtcttcgtctcccatcgcataaacagtaaagaagaactgcgcttgagattggagcaggccgaagctagtttatccgctgcccggagggcctctgaagagagtgtcgaagctttgaagaaatcccaagaggacaacgaggttctccgggtagagctagctgagccaaagagtcgggaggaatctacagacgcccgtctgcatgaggcggagggtgagatggcccagttgaggggagaagtgaggcaactccggacagaggtgtccattgagaaaaagcagagagaggacttgcagttgcgtttatcagcgcaaaaagaagagttcgaggctgagtttgctgcgaaaagggaggaactcgagacgaactaccagaagtaggtagatgagatgtatatctttggctaccgctgttgcatgaagaagcatggcatcaaacgggacgtcccttcgattcccccgggtgaggaagaaaagttgcgtcgcaagccctcccaatgagagtttttctttttttatcttttattgcttttttctttttgtattttgtagtccggagaaccttttttgtatacaattttcacaagtattaataaaacatactcattcacattgtacttgtatctttctttcattagtaatactgctttaaattggacacattccatggtcggagcaatggggttccatctagcttttgtagatgatagactccattttcacttgtcttggatactatataggggccttcccaattggcttgaaactttcctgctcctgtctcaacagtgttttcgaaaaccttcctaaagaccagcattccacttttgaaacttctgggccttgctttgcgattgtagtgagcggctgccctttgttgatagtctgccatccggatggatgcggtttctcttacttcgtctgcccagtccaagtttcttcctaacttcgcacttgcattatcctgacttcctgcctcggtccggatagtgggtagccctatttcagtaagaatgactgcgtccataccgtatgcgagggcgaagggagtgtttcctgtcggacgtccgggtgtggttcgataagcccacaggacgccgggtagctcctctacccatttccctttggcttgctcgagcctcttctttaaggcagttattagggtcttgtttgtggcctctgcttgtccattgctttgaggataacgcggtgtggagtatgcatttcggatgtttagttccgaatagaaatcccgaaaagttttgctatcgaattgtggaccgttgtaggctataatggtttgggggattccaaagcggcagatgatgttcttccatacgaacttggtgacatctttgtctttgatgctagcgtatgcttctacttccacccatttactgaagtaatccatggcgacgagtaggaattttttctgggcagctgcggctggtaggggtcctactatgtccatgccccactgcgcgaaaggccagggacctgaaattggtttccacgtctccgacggcacatgtggtatggggacatgcctttgacatttgtcacatttttttacgtaggctgccgcatcctttttcatcgtgggccagtaatacccttgcgaataggccctgtgcgccagagatcgacctccagaatgatttccacatactccctcgtgcaattcagctaatacatacagggcctcttagtggtttaggcaccggagatagggacctgtgaaggactgtttatacaaatgccccccaatcagggtgaaacgggcggcttgtagcttgtgtgtctgcttgggctcttcgagcagagtgcctgtctggaggtaccttataatgtcttccgtccactcttggccgtctgcttggtttgcctcaatggtattgcaaatggaagcttctgtgacggaagggttgacttgcacatgtataggcaacaatatggcttctttgatggggagggaggcagctatgcctgccagggcgtcgacacgtccattttcagctcgtttaattttttcgatcgtccattcggtgaaccgttgtaaggtgtcccttactttagtcagatacagtgccatgcgcgcattcttagcttcgtattccttttggacgtgccttaccacgagttgagaatcactatagacccggagccttgagacggatagagccaggacgaggtccaatccgaatagaatggccttatactccgcttcattgttagagacgggaaaccccagccggatggcttgctccagatgttctcctgttggggactatagcaggagccctactccggatcctgatgatcaggaggttccatcgacccgcaaagtccaccactctttttcacttggttccttgtgctgggtaggcttttgggagtattccagcacaaagtcagccatcacttgacctttcatggacaacctgggttggaactcaattccatattcgctcaactctatggcccattgaagcattcttctggttaggtccggcttatgcaaaatgttgcaaagaggttggtctgttagcacgaccaccgggtgggcttggaagtaagggcggagcttctaggcggcacttcaaagagctaaggtcattagctccatctttgaatacctggtttctacgtccgtcaacgctctgctgacgtagtagataggtttctgctccttaggtgaggagcagcagaatagaacaacgctaattgctcactccgatacagccaaatacatatacaatttttcttcagggagggggttgcttaggatgggcggttgcatgaggcagtgtttaatttttttcaaaagcgctctaacagctgtctgtccatccgcttgctccattttttcatattgccaagaagaaaggtcgcagttcatcaatgaagcgggctataaagcgtcctagcgcgacgagcttgcctatgaggcgctataattccttcttgctcctggggggtggtgtttccatgactgccttgacttgatccgggctgacctctatccccctttggctgaccataaatcctaggaatttgccagcacttacgccaaaggcgtatttagaaggattcaacctcatgtcatacttctttaagaggtggaagacttcttgcaagtggaggacatgttcctctcgggttttgcttttaaccacgatatcgtcaatatatacctctactgtgcggctgaccagaggtttgaagatctttgtcatcagtctctaataagtggcgccagcgtttttgagtccgaacggcatgactttgtagcaataaaggtcgtgtggtgttatgaaggctgtcttttcttcgtcagccagggacatggggatttggtggtatccggagaaggcgtccaagaaggaaagcatcccttgcccagtagtggagtccacaatttgatctatccgtggcaaagggaaactgtcttttgggcatgcattattgaggttggtgtagtcgacgcacacccgccatttgccttcttttttgggtaccaccactacatttgccaaccagtccaggtaatccacttctctgatgaatccgacttctaacaaattgtcaatctcattccagataattttttgtctgtccgggtgaaaacgtctaaccctctgtcagacgagtcttgctatgggcaagacattaagcttatgggagacgatggaggggtgaatccccttcatatcataatgcgcccatgcgaaaatgtcatggctttgttggagggcgttttggatgttccgggtctcttctagagttaggagagaactgatatatgtaaggtgagtaagtaccttctttcgaaatttggatcgcctgcaagggatccgcttccgggggatctttgtctgtcagactcaataattgctattggtcacgtgcatggctggactcagggagggatgcatcctcctggctggtctctgcttctcgtgctatctagtagcattggtgagcagctaactggctgccgtataagtcaatttgcccatccttggtaaggaagcttaccatttgatgatatgtagaggggatggctttcatgtagtgcagccatgtgcgccccaagatgacattgaaggatgataagtcttgtaccaccaaaaattgtacgttgagaatgactaggtcagcttggaccggcagtacaatgtctcccaatgaagtagttgacgccccgttgaatccggacaagattcgcccaggtttttcgaggcctgtgagactgtgccccatgtggctaacgaccgatgcttgtacaagatcggccaagctgcacgggtcaattaggatgcgtcgcacgtcgaaatctcctatctctagggacaggatgagggcgtcgcggtgcggctgtaatatccgggtggggtctactggtaggaaaatgattgtcccatctatggggcgagggcccccccagttatcctaggccggatggagttgacacactcgcgcaccgatgctggtcgcaacaacttttgtctctttcgtttggaatcgtactcctcgtcggatgggcctccgttaatatagtttataacggctttagaggtggttggggccctaggggctccagagttgtgatttcgagaagcgtcttcacctctggcatctgagcggaggtattgctttaaatgtcccgcctttatgagcctttcgaccaaatgatggagacacctgcacgcctccgttgtgtgaccatgctccttatggaagacacctgaactctcctctgggattcagcaatttatgaatgtatctttaggcccatgtagataaatccatgcttggtggtagtatgcttattgatgatagtctagagatgtggaaatcaaatgattctgatgaactaaatttgatgcgtgatgagatagatgacgtgttatctaaggatcacaaagttcatcaatagaaactcgtttgatgatgcgtcaatctgatggagagaatccgttgataaaaaatgatgaaatgccaatttgaagataatgactgcgattcatctccgaagatgaatctaatgagaacgttcaggattcagaaatggagagctataatggcagtggtgatttgcaacaacatcgatctctggtggcagtgacagcaaactctaatggtggtaaactacgccgacagagacaatctccatgaattgcgcaacaaacttcaatggcgatctccagtggtggtgatgaattctcctacaacaatgaactctcattctcctgtagagatgaactctcagatgtcggtgaattatttttatatatttttttaataaattttaaatgaaataaaataaataaataaattttaaatcaataaattaattttatatatttttttaaactcatttaacttattttaaattttcaattataaaattaaataatttgaaaatatataaatttataactaattttaattatattttattttcttttataattttcatatatagtataaccaataccaatgttttcaaaatcagaccgctgcttgaaccggaaaagttaccggttcacgattcacgattcacgattcattaattgaactggtggtcaaaccgtagtcaaatcaatgacatcataaataataatttttttcttttttctcactaactaatcccacatcggaaatggataaaaaatatgtaggaattgtggtataaaaggcaagctagaatcattaacttgcaagactaaaagcttattgggcttgatgacaaacaagttggatgggctcctcatggagtgatccggttctcttatggtatcaaaacctttttttttttgttttaaaataaataaataaataaattgttcggttcgctaagaatcgcctggttggggcggttcactagctcaaccactggtttgatgcccaaacggttttttgggtggaccaaactggttttgttaccgatcggaccaactggtccggtccaatttttaaatcattatcaaatacaataaaataattttttttaacattttttttatttttttagtacttctcaaaaatcaaacataatcataagactaatcatattttttatcataatatcattcgaagacaatgccccaagtgagaatcccaaaacttttcaatgttttactaatattaagattttgaaaatctatacaatttatttttctttttctttttttaatatttggatgatagtgcatgagtatacaagaaaggtcaacgcaaagatcaatgtctacaatcttgaaattgcacttccagagttgggccctaaaagagaacccaataaggggaaggggcagcgtataaaccttgttcaatgggcatgaaaacaccttggagaaggaaagtcattcctctaccggttgactaataatttgatggtaatgacagtagttcggatcattaacatgactcatttcttctaaacatttgcacttaggtagctcaataacttttttatggaataggtcttccaacatgttaggcacatcagagtcaggaaaatgatatttcttatcctttaattccttcaaggtgaatcgacgcctctcattttcctaaattggtctagtctctcttacttccttctttttatctcgtgctgagattttgatgggcgttatatttactgtcattgacttgtggatgggttttattgaggcccgatcacttgttttctcatcatgtctctctctttaccgatcaacaattaataaggtcttttttagcaccatggttagctatgttgagcttcatgtcatgtgctcaagtagttaactgttcaaaaatgtgaggtcatatcccttagaggatgtacaaaacaccccaatgcattccttgtatgcacatttccatggctgatacatcaaataatctatctttgtagtcgaaacttaaagaacgccaatgattgacgtagtttacgaccggctcatatttccattgcttagtattagtaagctccatcatgcttacagtccgtcgggtgctatagaaatggttgaggaatttgcattccatttggctctaactatcgatacacttaggtgtaaggtctatgtactaatgaaagcattccctcaaaaggaacgaacaaattgtttaactaacaagtcactatgtgcacttgcattgttagaagttttaacgaaatgacatgttgttttggatttctcttcccataaaatgattgaaactttggaggttgataacctacaagcatacataggttatcaatcctcttagtgtaaggtttagagtacataagtgtactctgtgagggtccatcgtaccgcactctaatggtgttagttattatgtcttgaagttgctagacagataacaactccatcgaggcaaattccatcatttttctttcgacttgcactgttctagatgcatgtggtgcatcatcgagaagagatgcaacattcaaaaggtggttaagtctttaacttgactcacttgtattttgtacttgtgcctcaaccttgtttatgagagaggctatctgcatatcattctcctcgactatcgtagtgaatttggtaatggtgtcagtcatctctaccaattgttcctctatagatgtagtaccaactgtcattaccggcatagtcattgagatgagaaaaataaaatagtcgaaatgattggagtagttttcctcattcgacattccaattggtgattcggagtgtgagctggtgctagagttaatattggtaataaagcaaggagactcatcccgaaagtcctttagtgctaaagagagttttcccctactatgaggattgtggctctttgcccctaaggaggccaaagtgatgaatggttggtgttcatcatgtgtccttaccgattttagtagacaagtagacctatttatttcgttgaaagtgaagatgttgattttgatttgctacgagtcatgggacccatagcagtgttgtgtgttgattatgcaatgatgatcttgtcattgtccttgttgacatgcacaacttgagttcttttggatatcatcaacgtagtagagatcaatcttctaacaaaagatatgagaggcagagagatcccatcaaacatgctagaaatttgtatgcacaaatttcataaaggtcctgcaaaattagcaaaacaatacgaaaataatgtgaacaaaatatttatcaaaattaaaaatattgtggtataatataaaaaataatactctttacaaaacaatatttttttctctaattttttttgccttgatcacaatttgaaagacgacaatgtcgttttcttattttgaagattaattgagggccacaagtgacttattcctaaatgaacacgttgaatgatgaagaacgcatgtagcaattctatcatttgccgaacctatagggagattcgatgatttttttttttttttttttttgtaaagccttttttcccatacaaagttacctctagattttcttctttaggattttcttttctagatttttctaatttttgagtttctcccatttcttgaaagaattcacctctatttataggtgaaggtaggaaattcgaattttgaattcccaaattttagttgcttaattcaaggaatttagttaacttttcttcttgagaaggtttctcatgatgatgatgatgataataataataataataataataataatatttttttaattatcattattattatattttcgatttttttaggaaacttattcgtaataggatatttatttatttatttattttgaatatcaaattagtggtaattaatccactaaaatttttatgtctacatccttatccacaagtgtagagacaaatatgtcgtaagtaaataaactatgaatgacttcatttgagcttaaaataataaattaagcaaataagcatgtagtaaaattagaacttacgaccctcctactaaataaagctctaataatatgttggataattgatttttttaaaagcttaaacttaagatttgcatcccgatggatgtgcatcatgttttctaataatatatcacatacttttctagattttatgttagacttgtgattacttctctaaattaatttttcagcatattgtatatatgcatttgttaggatgaatcaattatcaatcaatgcagaaatacaagtactcctcatagagcctctctacttatttccactacaacagcttagttggttgaacttaaaagaattcctaagtgctttcacaaatgttttgaacttcaaacctgcacaaagatggaaaccatatcattgaaataattaaaacaaatcaactgaaatcaaactgctattgccttgtttaaaaatttaaagaaaaaaacaaaaaaaaaatcatgggcttttacgcaaaacttaacagtagggttcccaaagttcattattcagaatactaacaagtgtcatgtatcagttcaactcggcaccttcttccataaataaattatatttgctttggaagaaaacttgagttttgaacaaatataatatatttgaaaaaaaaatccataaaatggatcttcaatcaaaataattctcaaaatagtgtatttgtacttgggcatccaaatagtttgagaatattttttatgtgataaaatcctaattgataactatgattttaatttattttttttaaatataaaaccgctgttggtaattatagttttaaccattttaaaagaaaattcaaaatcataattaacaactatagttttataaggtggatatgttagctcttttcttataatgtgtgatcatatataattatatttgtgtaaatattatttaagagtatcaattgatagataggtgaatcaattgattgggcattcaagagtcttatgtatggaagactcaaattataaatggggagttagaaaatttaatttatatgaatgtggtgtttataaccccatcattatgaaatttattttgtacattatatttatgagtaatagaggaaaatgaaaaactataacctatgcatttatataaatgcattcaagttcataactcaccattacccattaatttgtacataataggtgtaaataatgagtataactctcgtataatcttttataagaagactaagagatgtacaactttttataagttaaggtctcaagtcacattctcattcttatgtcattttgttgttttattttttaacaacatacaccacataagtgactcatccactatatgagagtagtgagttgaagactttgacaatacaattcacaaaatgattcaatttcacttcaaaaatgatattgatattatggatcaaggtaagaatatgatcattattttaatatttatatttattttgttttatgcattcaaaattatttttttttaaataatgatttccacataaagtttataaaagtttagttaacaggaaacccatgtggatgagatgcactaaaattattctgagatggaatctaacctgtggaattttttttaaataaattatttttgttcaaaacttagaaaaaaaaacttgttgaaaactaaattcaactatacactttcgtatttttctttttataagatcaaatccacgttatcacttttccactagaatcctcatgattaattgtagaattcttgagatgaaatgaaatggttgttgaaacttcagttttcaatcttgatcaatgttgtcccttcccttagctgtgcattattccaatgccagtttttctccacaaacttagtccagagacaagattagattccgtgtggaaccattcatgtgtggatcccgttgtgagacttgaccatcaatatccttctctccatttgtggggtactgcccacgtgaccactgctttggaaatttgagtaacacacctaaattctcaaagacccaaaactacagatttctgcttcatctttctcctcattcatgtgcaccttttcaaagtattcagtggagattggccccatcagtcacgttttccataatgcatggttacgtcaccatccatttgctaagttgtcatgccttttttctacaccaactcagaaaccccacccggctggtatggttttcattttttatttatttattttttttaaccaatataaataaggcatgaacccatccattttcatatctgtacctaatgttaatattaagtgattctacttaaaaatacttttagtttatattattattatctgtaatacttttattatttagagataattacttaatatttaaatatataaataagaaaaaaaattcaaaaaaacatccatcaatatataatataacaaattattgtctttaaaacctaatttttagcataaaaaaaaggtattttatctcactcaaagttactcccaaatcaactcttaaggattgtttgaaattgcaaatttaacttttatattgataaataaaagaggtaaaagtaattgttatgtttgaaaattatatgtcaaaaatattgttattaaagagaaagataattttgaaatttttagttaaataaaaattttctaaaatatatatatatatatatatatatatatatatatatatatatatatatatatatatatttaatgcatatgaatttctattcacatccaattatgatctaatattcttatataaaacctcattcaatttaacatgagtataattacttattttattatttattaatatatattataattaattaattaatttatttattttaaaaaaaaaaactatgaatgattgatatttccataaaatcaaaacgtgatgtagactaattggtgcctagcgttgacccaaagtcaagtcttttctctagtgtggcattttacacatttatttatgattaccaagacttggaaaagcaacattaggaattggtgttccccaattttttgtcatcaggtttaaaagataaaatagagggtaagacatggatttaaattttataatcagattaaaaaaccgaaaacaatatctataatcaaacaatttcacatgtgttttgaagttttattgttttatttatttatagattgattcaacaacctaaattttattatatatatttaatgatttagattttttattttatatgtatattctctctcttaacattttctcaaattccatcaattcatgagtttccaagaagtatcccctactccactccatgaaacatatcttgaaaatgaagttgtcccttagaataaaatatctatcctcaagacttaagacctcaaacctaaagctaaggatagacctccaaccaccatctggaggacattaattagtcttgttttcttaatttttattttccaaccccactttaacaaccgaaaagatttacttgtctttatttatgatttaaaaataaataaattcaactttatattaacttgactttcaaatatactatttaaccgttggttttcatctttcccacccatcttcctcccaactcatagagaagcggtaaggaactcaatgtcaccaaaatgcggaaaccaccatttttatttaccaaaattccattccccgctctatttctcctcctcgtcttctccttaacctttcaagtaatttcccaaaatctagatgctgaacgatcaatcctactagacgttaaacaacaactgggcaatccaccgtcactccaatcgtggaattcctcatcctcgccctgtgattggccggaaattacatgcatcgacaatatcgtcactgaaatttcactcagctacaagaccatcacaaagaaaattccggccagaatttgtga

SEQ ID NO: 12984 - DNA, 1446 bp, Vitis vinifera
  Intron number 2 from transcript GSVIVT01019467001 (locus G SVIVG01019467001) derived from phytozome v7.0 (chr-ID chr2 ; pos 881936 to 883381 reverse strand)
ttacaagttacaaggaagcttctacttgaagcctagtatcatgaaagtaatggagaagggacagaggaaaacttgtgattcacatgttttgaaaagccttctgtttttaatattttttttcaatttgcatcattgtatacaggtggggttttgaaattgctaagcttctggacaaaatcatggtcatcatgatttgaaatttggagagagtccattttcagagctctgaaacttgggtggcttgttttatatttgggctgttggcattctgttttaatgatttaaaacaaaagctggtatctcccaagaaaacccaaatgtttcatgcattttagtcaaacagttaatttcaagtaataatggaggagagtccattctccattgattcatttgagttgtttgcacacacataataacaaatgaactgaaaatgcttcttgtcctttggtcaatttctgttatgaaagacccattttctatttcattattgcaaaatcatttttcatgtaaataattatagtaaaggcaaataatttgtttttgcaggggcagggtgtgaatctggatgatctatgctggttgctaaaagcctaaaacatcaaacaagtacttgattatcccatttgacttctctatatatgattcaacttcataatcattttctccatctgttgtttgtatggtttgtacttggtgttttttgagtacttgggttgaatcagtaagtaacttgcatgagcccctttggcttgcctggacttgataaagatggtttttgtctcttcttgggttcagcttaatgggttttttctctgtgatgtgaatgcccttttctctgagctgaatcagtggatttgtgagtgtttctggttttttttcttctgggttctgtttgggtattctggatatttcattctagctatttgtctgtttatatgaagtcttgatatttctacatctggtgtgttgcctttagagcttgatttgttctgcactctacttttatgtttttgttccccaaagagattcgattttattatatcatgcttttagcttttccatttttttcaacaggaaaagttttaaccaggacctaccaaagaaagagggttagtttctatggagacttcattgatttcttctaccgtttctactttattaacattactgtatcacctccaaaaagcttgaatcagagactggtttacttttgaaaattaatgtgcaatctatcatgagataactttttgtttgtttttgttccccaagtcagattccaggttgagagaacagattcattgaggttttatgtgtgtttggtcagtggaaaaacagaagaccacatagtctgcagtaatcagcaaagaatttaacaaaacaaatgtgtgatatctatgagatgatatgcttgttcattgtttgatggcaaagaaaaagtgtgtaggt

SEQ ID NO: 12985 - DNA, 1961 bp, Vitis vinifera
  Intron number 1 from transcript GSVIVT01032682001 (locus G SVIVG01032682001) derived from phytozome v7.0 (chr-ID chr1 3; pos 1571293 to 1573253 reverse strand)
caagactttgtgctactatgagataaggaaataaagttgcacatctactatcggtttaagttttttgcaaagtaataagcgcttaatcttgttaattggtatcagagagaggttgtaggttcgagtccctcgagtgtcgcctctgctatcaacttaagcttttagcaaagtggtaaacgcttgatcttgtcaaatatggtgatagaaagaataccatgctacatcatcgcttgatagagaatcaaaatatatttgttgatgaatcatgaaatgctatcgttcttgaatatgatttcttaatttattcataagtaattcatacgattatgcacctttctttcctagtcataacaaaagaaaaaaaaaaaatgcaactcgtcgagtccaacctattctttaaaaaagatcaacacaccaaatactacacttaaatttattgaatttattactaaaatatcggtattaaactcaaaaccgccgacagatggccagtgatccaaggaagcagaagaaaactaatttaaataacaaataataactccaaacccttataaatctcaaatccaaaactttggatggagcaactttttagtattagatttaaccgtcccacaccatttataagccccaaatcagtcccaaccaccaatcttatatggacccaaccagaaatgatttaacctacccttcaatgtcggcatcatcaaggtatgatacattcataaatatgttaggtagaagtttaaatatggcaggaaaaattgtgtgtttgcattcatataaaaatacccaaaaccataaaattcccaatatctgtctttttatttttattttttttacatgcttggattaattaaattttcttaaacaacatcatacataaatgatctttatttttaagattacctgcgaggccattgaaaatgatacctcacatgcatccattgattttgaatttatcaaaatttgagtcacattataaatttatttatttatttatttattgtagtggttgatgagtgtcaatggacccaattcattatatgctcataaatgtgtgtagttagaaacattcatgtaacaagattccatatcatatcattttcattgcaagcataagaaattttcacagaacaccctcaaattcaattgaaatatgacttcatcaccaggattgccccacccataaaaaaaataaaaataaaaaaaaccaaaaaaataaaaataaatatcatctaataattcatattcctatgcatatctggaaaagcattcaaggtacttagcaatcttcaattttgagaggctgcatggtatataacctaaaacatgagtcattttcagtaataggccatcctggctaacaccctttctcacctatgacccctcagagctacatacagagaataaatggatgaaaaaactccggacttgagatctttgattaagctgtaattttgatatcacatttaagctatcaacttaacccaaaaattttaaaaattcagaaaatacttttaaaaaattggaaaatcatttgccgtgctttctagagagtccacttgatagatgttatcccaaaaacgcatctaaagaaagaatttgaactaaaaacacttcaattaaaactactttaaaatatattagagcttgtttaacaatgactttaggaagtatttttaacatttctagcacttgaaaataattcttttgattaaaaatttcaagtgctagaaaaatcaaaaaccctttttagaaacaataccaaacacactcttaatctaataagcattcttgactcattctccccatgagcttaactccgtcccctcatgcatttaaccaggaaaacagccccaacaacccgagcctcatatggacccaaccagacacctttgcagttactcaatcaacactataaaaatctccaaaaatatcagtatgagtgagtagtagtggcc

SEQ ID NO: 12986 - DNA, 16145 bp, Vitis vinifera
  Intron number 6 from transcript GSVIVT01012904001 (locus G SVIVG01012904001) derived from phytozome v7.0 (chr-ID chr1 7; pos 13205351 to 13221495)
ctgaagggtctgatccaggtctcaatacacacacacaaacatacatatatatatatatatatatatcatattctcttcatatattttttttttccagcattgctcttttcttatctagttggaggcatcaattttaattatctcaacgatattaatctggtttcatgtcttttctttagattcaggacttttcaaattgccctataatgaagtctgatttggccatgtaatcatagcttggtcttttgttacctgggcaaggctgtggaagtgacatttttatgcttttccttgaatctttcttggtctgttatggtttctggcaatggtgttttggatacgtaatgactctgacacactgatgtctttgtagaatatgtagatctgttgtaaaattgagtgattgtgtagagattctaatgccacatcagacaattatagcactgcaaacaagcatgtaatttttggtgttataagtgcttatgagtaaatatatatacatgcaaaagtagatcattataacactgcaaaacttagatcagtgtaacactgcaaaagtagacaattgtagcactgcaaaaagcaaataatctgtgcatcttaaataatgcacacaacatctagttaggaaaagtgaaagaaagtgcacaaacttatatttaggaaaagagaaagaaagaaagaaagaaagaaagcaaacattaattaatactctttgtttgtaaaatgtggaaaaattcttaagatttttttgagtaaactaggaaatagaacatgccatgcatgttttgcatggaggataacactttaaccttcaataatgctgtgtacaacctattaatggtgtgctgaggtcttggaaatgttttgattcgaagatgtaaactagttgtaagggtttaccagaagattttgaaagtacatatttgccggaatttcagggaacaaagtgctaggatttctgacagcaactaatttaaggttgtggataggcttgtaagaaagtagggtttttaggttcaaaaaataaaggaagcagagccctgttgtttatgaaaagtgtcacacaaaatgtggaaatagaagagaaaaaggaacaataagaacaagaagaaaaggacattggggaaagaaaaagaaattgcacagtcatgccttaaaatcaactaagacaaaccatgactagaaatgtcaaggctgcagtttatggattgaaccaatatcctactgaagtaaattgtagatgtgtggttctgtacaaaattgatgaggaggtgcatgaggtcattgaaacattaaggttcaagttaggcaagtgctgttggagaatctgtgtgattctataacatttagaaatcaatgtacaacttagagattttggaaaacatagtttcctaattgtgacaatgtcctaaacgtgattagttgggttgtcacctgatatatgaggatagataggattgtcaaactctccttaagtagtctctagttgctttgtatatgtattccctttgtgtatattattcataataacaagaaatcatattttcccttaggctacgtttggttggtgggatatgataggataggacatgtatatcctaggatattatatcccattggataggatatgcatatcctaggatatgatttccaatgggatatgatatccttggatatacatatcctatgaacatgatatttcctatgaacatgatattttaaggtagcatatcccattggatatgctatattatattatatttatatttaatttgtgaaatgaacaaaaaataatatgaaatatatattatttttaatgtttaaaataaaaattatatcacattgaaatattttttattttaaaaaaataaaattttgttatgtttaacaatatttatgattaaaatacaaataaattttttatgttatgttacttaatatataaaaataatttatatatcaaatattaaactttatcatttaatttaatttaatttaccaaatataaaaatcaaacattattaaaatttgtaattttatatatttttaatttttataattatttttaattttatataatatataaattatatatttaattatttattacatcaccgattcaatagcggttcgaccgtcggtccgaccagtgaaccgtggaccggtaacttttccagttcgatcaccggtccggtttttaagacattgtgtgaaagagataaaaaaagagagggtggataatatatcctatcacttttcctatgccatgtttggttgaacataggataggataagtgatggaataacttatcttatcccatcaccaaccaaacatgggatatgatataatatcccctcttatcctatcccatgctatatccgggcgaccaaacattgcctcatggtattaaagctcttgttctcttggaaaaagttctgaaaaaccctacaacatatcttctcatttttttttattttttattttattttttgaaaaattcaactctctgaaaaatcccttttaattgtccattattcaatcctacccattatttagccatgctcgaaacatatgaagtcaaccttattgctgtgattactgaaaaccaatttggagaggtggaacaaaactcgccaaaagaggagttgcagaatattcaatcatcatattgattgaaaattgcagaaactacctattgtggtcataagtggtgaagactttttttgaaaggaaatgggagattaagccatttgatgggaactagacttgctcagaatgatcctatatttgttgaataggatgaagaagatttcatgatcgaagatttcatgatcatcttagtgatggaatttggtgttgctgacaacagtgagagagatctaagaaacagtacactagacctactccgcaagatacaacctttataaaattaaaacaaaatcacaactaaacaaggtaactttttggtcactgaatgctataatgtcatgaaaggactttggcttgaatttgactattacaaaattttaaaatgaagagtagtgaagatgctgccatgttactaaagcttgtagaaagggaaaggatttttaactttcttgtaggacttaatgttgagtttgactaagtttgagtgcaagtttcgggaaggaaactctaccctcattgcatggggttttctcaataagtcgagccgaagaaagccgaagagctgttatggtagactcacaacccacacaagttttgccatggtttccataaaaacaagtgatgagggaatcaagaggaatgttgagggacaaggaagctcaattgaaaccattaaaaatgaatcaacaaggttgttttgccacaatgaagtgtggttcactaaaagtttagagaaaaaattgttcatttttttccttaaagtttaggattacaatatatatatgactgctcttgagtacatgaaaaaggaaaagaataaaaggatacaactgtacgaataatcattaccttgaaaaatataaaaatagtagataatcctaaatttaaaaacattgactccattaaatcagatcataacatcccatttactccactaaatcagaacatataacatcccatttatagcataaaatcaaatcaccctcatattttcagtttataattttccatactccccctcaagctggttcgataatgttttaacatttccagcttgcttactagaacttcaaacaactacttttgaaggtctttagtcaggacatttgctagcaatttttttgtaagaacatatggcatacatgctaaaccttccccaagtttttccttaatgaaatgatagtccacttcaacatgcttagttctatcgtattgaattggattgtgggttacgttaatcactgccttattatcatagtataatttcataggtttctcataaggaactctcaattcttctaatatcctcttcaactaaatgagttcacaaagttcatgagcaacgacttgagactcagcttttgcaccacttcgagcaacaatattttgtttcttgcatctctaagttaccaagttcccttcaacaaaagtgtaataacttgaaattgatcttctatccttgttttctcctgcccaatcagcatcagtatatgcttcaatctgcatatactcctttttgttgaatagaaatcctttccctgggcttccttttagatatgttataacttgatacatgacttcaaaacattcttcagtaggtgaatgaatgaactagctgaccatactaatcccaagtgctatatcaagatcatgtatgtgataagtatatcaacattttttttttaccagagataagtatatcagtttacttacctagcaaactttgatagtgtcctttatccacacttgagcttaactctgtcttcctcaatttcttgttaggataaactggtgtatcagttggttcacaactcaacattcctgtttctttaagcaagtttagagaatgtttttgttgagaaaagaatatacgatctcgagaccttttaacttatatacctaggtagtatctcaactgaccaagatctttgattttagattctttagcaagtaccccatttaatttctccaattccataaggttatcatctgttcaaatgatataatctacatatactatcaagatgataatcttattgtcacttgaatatttgtagaacatagtgtgattggcttgactttaggtatacccaagattccaaatagactttatgaaatgatcaaaccatgctcttagagattgctttaacccatagagagatctctttaatttacacacctttccaattccaaatgattgctcaaaactagggggcaaatccatttgcatttcctcctccaattctccatttagaaaagcattctttacatctaattgttgtaatgaccaatttagactgattgcaagtgtcaattagacttagattgtattcatctttgcaactggtgcaaatgtctcttgataattgatgctataagtttgagttagccattggctaccaacctagctttgtatttctccaccaaaccatcagccttgtacttgacagtaaatacccatttgcatcctagtggtatttttcctcatggcaaacttaccaaatcccaagttcctttcatttaagagtcttccacaactacattgctttacttaggaacaactagcatcttgtacaaattttggaatctccacaaaagatatgtcgtggtaaaggttctaaaggaattagacaacctatggtataacgcatatttagaaatatgatgcatagtaccagatctagttcctttcctaagggtaacgagaatatcaaggtcattggaaacattagaatttctatttgaagagagatttagtgaaacagtaccttgctgggtctcataagcacaaaatctcctgtatactctttcatgattgtgcaacgcttagaacccgtctaagccaaccttcctagaaactgcacgaaattgaagtacaaaaccaacaaaatgcctatgagagagattatagggcaccgagttcaacttgtattttattacctcttgaataagaatacaagacacaactttagtacgactcccaaaatagcactggtgaattcatgcttactcaactctttatctctctacatctctcttaagaggttctccagtcctccctatttatagagtggcaccacccattccttgttagactaggagtacactacatgaactcccgttaatagactatggcaccaaccactcctacttggactaggagttttagtccagcttagactgcaattacaataggaatcaaagactcctactcatgcttgacttgtaatccctcttccagtccaactctacatgttgttgccgcgtgcacctatataagcagctcgtgtgcatgccaagccctctcttggtttgcatgtctatgtctcatccatgttgagacaactaactatgtttattctatgcccacgccccatgtcgttgtgcccatgggttgcattaaaccttggctccttgcccatggttgtgtgctttggcaagggtcactaccaccccttactcatgcctgaagcccatgcctcacacaaccttgtttctatgatggcaccataccatatctcatcctttcttgatgtagcaacatggccttgtacccttgtgcgtagcatcttgcatcatgtcttgagtcaaatttgttgttgctacatccccatgctgcatctaagcaacaaaccatgacattgcacccatggctcttcaagtcgtctcacacaaggcattgtgcccttattccattgtcgggaggggagttcacatcatgcctcgtgccattgccaccatgagtttcccaccaccatatgtcgtggagcccatgtgtgggtgccaataaggcttgccttatgtgtcttgcttgtgttggagccttgcatcaaggtcctctagtttggccatgtccatgccaccttgaggcagttactccccccaccccccctccctacccattcttatagagcattttgggccattttaaatgtttatgatatttctggaggagacattacctatgcttgaggaacaataatggatttattaaataattagaaaaatctagaaattctcaacctttatgccgctgccccatgtgcatgacttgttgtgtgcgtgccctatgcatgcaacttgttgtgcgcacatcctgtgccctgtggcctatgcgcgttgcccatgcattcaacctgctgtgcttgcatgtgcggcccatgcgtgcgactactgtgcatgcacccagtgcatgtggctatgtgtacagcgcatgtgtggcaccttgtaccaacctaagcgctacaatacttgcctttttgatgccacaaacactccactaccttgtccctttgcttagttttccccatgggtgcaaggtgttcacctataaggcccttagttgctttagtgtccgggtaagggtaagggtgctgacaaacccacccccacctgaaggagtctacgccctcatcaacttaagctactttcctatccttggatgctcttctcatgttcctaattcctcttagatctggaacttccattccaagcaaagctttccatcggcttggaaatccctttgtgggactcttgtgctccttgcactatctcaacttgctggtcattgggcctcacattagtggatttttgcacctcttgcagaacaacataaggaattcccttaacacaatttgatttgcttcccattcatgtgacaacataggtcctctgacccttttccgatcccttctccatttgaagagtagagagcctactctctttggatgacttacccctctttgacaccttattcaatccccacacaaagcaaggttgagtttcatcctcgaaaagcaatccattcaagtgtgacaataccatcacttttgccttcatgtagaactcattccctaaaattaagtcaaagtcatctaaaggggtattgagcagattaaccgtaccgttctatccacccatctgaatagccacgtccttaaccaagccttgtgtttcctatgcttcactattcagaccttcaacttgcaatcatccttgcacaaaaccttgttgcgtctctagtcgcaacaaaattgtgggttgctccactatccactaaggacaccactttctgaccacccatctcgatcttcatgtgcatgaaccctttatgggtttgctctattcgaattgcattcaatatttgaagaggttcattcgtcaagtgacttttgattcaccatcttcactttcctcttctgtcaccaaggcatataacttttccttcttgggacaatctttggcctggtgtagaccattgcaaataaaacaacccattaccttggttgttggaatcatggtggacttctttgtcacttggcctggaactgtatcatccttgtttcccttcttgcctctcttcttcttggaggctttggattccccttctttgccttgtctttgctactgctgttgcaaccccttccccttctgacttgtagaagatgaagcatccaactgataatcgattaggcagcgcctcaactttgtttgggtcccatccttgcagcctagagatgaacttgaacaacttatcaacttttgacatgtctttcatgttgaggatcaaggaggtgaactccttggcatagtctctaatagtttctgtatgttttaaccttttaagagactctaatgccatccaatccatagttttgggaaggaattgatccttcaactcccttttaagggtctctgacgtgttgattcttggccttcctgactcaacatcatcattcaatcaagtgtgccaccataaatttgcatctttagagagaaacatggtaatgagggtcacttgctcttttggaggaatacgttcaacatcaaaatattgctccatatcctagagcaaattctccaaatccttagcgttttgcaccccgttgaagggttttcaggaactcgcaccttaggtgaggcagattctgaagcaacatgtgttccctaaacaacaatctgcttcagtatcaaatctcccccttaagggacttgattttgcccttaaactcttccaatatagttattaaggttgcaacttgatcttccaacaccttattgcaaccttctagtatacctcgttgaacactaggtttagtgtagatttccgtcattcttccaaaaaaagtgacatctgcatcttgaggttcatctcccacatatgcctcaaggcatgcaagttgctctcgtaatgcttcaaatgcattgacgtttctccctagcatttcagtgtagctttgataccgtcataggcatgaaatctctcatatgatttttcgcgattgtgtagcgcttagaacccctctaagctagccttcgtagaaaccacatgagattgaagcacaaaacccacaaaatacccatgagaggttatagggcatcgaccctaacttgtattttattacctcattgaataagaatacaagacatgacttcaaaaagactcccacaatagcattggtgaattaatgcttactcctcaactctttatttctaaatccttcttaggaggctctttagtcctccctatttatagagtggcgccacccattccttgttagactaggagtatacatcctagttctacttggactcttgctgataaattatggcaccagccactctcacttggactagaaatcctagtccaacttagactacaattacaataggaatcaagactcttattcatgcccgacttgtaatcccacttcgagttgaactctacgtgttgttgccgcatgcccctatataagttgctcgtatgtgtgccaagccttctcttgatttgcatgtttgactctcatccatgccgaggcaaccaattgtctttattccatgcccacgcccatgttgttgcacccatgggttgcatcacaccctggctccttgcccatggctacgtgctttggcaagggtcactaccaccccttgctcatgtctgaagcccatgcctcacaccttttggtcgctgtgatggcaccataccatatctcatcctctcttggtgtaacaagtcatggcattgcacccatgactcctcattcgtgcacaagacattgcgcccatgtgcataacatcttgaatcatgccttgagtcggctttgttgttggtacatcctcatgctgcatccaagcaataggccatggggtattgagcccatgactcttcaagttgtgccgcacaaggcattgctcccttatgccaccgttaagagaggagttcacattacaccctatgtcgttgtgatcacggggtgcacaccaccacatgtcatggagcccatgtgtgggtgtcaacaaggcttgccctatgttctttgcttgtgttggaggccttacattgaggccccttggtgtggccatgctcatgctacgttgggtcacctacacccccttccctcccttttcgggttgttttagatgtttctggaggagacatcacctatcctagaagtagaattatggatttgttaaataattagaaaaatctagaaattcctaaccctcatgccacttgtgcatgtgcctcatgtgcattgcttgctatgtgtgctcctcatctatgcggcctatgtgcattgcccatttgcgccacttgttatgagtgagtgcacaccacccatgtgtgcgactactttatgtgcgccttgtgtgtgtggcctatgcgtgctacccttgcatgtgacttgcgcgcgacacttcacacccgcccaagtgttacaacacttgcctttctaatgccataaactctccaccaccttgcctctttcctcaaggtttttcctcatgggtgcaaggtgttcacccatgaggcccttagtggctttattttccaagtaaaggtataggtgctgacattgggtccttatgattggttttgacttttggatggtgacaagagtatgactttttggattacgtggatgatttctccttgtgtagacacaaaactcaatttaaggttttgtttgtagttattctccccttgccaacaattctttattgtttgacataatagaattgggctaaatagttgaatttgaaagaggttggataggttcttgttttcttttgagtgagattcttttttctctcaaagtcttcaagaggcacttcctaagtggacctcagatcatagcccaatttgcttggaaactaatcctttaaaatggggtccgactcctttcaggtttgagaatatgtggttgctccatcctgagtttaaggagaagtttagtgattggtggcaagagtgtacggttgaaggttgggaaggtcacaagttcatgaggaaattaaagtttgttaaatcagagttgaaagattggaataaagtggcctttggagatctaagagagaggaaaaaactcattctttcggacttatatagaattgatctaattgaataagaagggaatttgaatcttgatttggcatcagaaaggaccttaagaagaagggagctaaaggatttgttattaaaggaagaggttcattggagacaaaaatctagggttaagtggattaaagaaggggattgcaattctaagttctttcacagaatggccaatggaaggcaaagcaggaagttcattaagtctctgatttttgagaagggggtggctctaagcaacattgaggttatctttgaggagattgtaaatttctttgggaaactctattccaaacccgaaggtgcttcttgaagggttgaaggagtagattgggtccctattcatggagagagtgcggtttggctggacaagcctttttctgaagaggaggtacgaatgacagttttccaattgaataaggaaaaggcccctagttctgatggttttactattgcagtatatcaagagtgttgggatgtgatcaaagaggatcttatgagggtgtttcttgagttccacaccaatgggataataagtcaaagtacaaatgcgaccttcattgctatggtgcctaagaaaagccaaacttttaaaatctcatattatagacctattagcttggttacaagtttatataagataattgctaaggtcttatcagggcgtttacgcaaagtcctccatgaaaaaatctctggctctcaaggagcctttgttgaagggagacacattttggatgctgtgttgatagccaatgaagtggtggatgagaaaagaaggtcaggggaggaaggggtagtcttcaaaatcgattttgagaaggcctatgatcatgtggattggggctttttagatcatgtgctagaaaggaaggggttcagcccgaaatggagatcttggataaggggatgtttgtattcatcgagttttgcaatcctagttaatgggaatgcaaagggttgggttaaggcctctagaggtttgagacaaggagacctcctctctcctttcctttttactttagtagcagatgttctaagtaggttgatgatcagagcagaggaaactgggctaactgagggtttctttgtggggagggataggactagagtgtctttgttatagtttgcagatgacaccatctttttttctaaagcctttctggaacatcttcaaaacctcaagattatccttttggtttttgggcaagtatcaggtttaaaaatcaacttagaaaaaagcaccattttaggtattaaaactgggcaggggttgttgtctagtttggcctcggttttttattgcagagtgtcagagtggcctttgtcttatttaggccttccattgggagggaacccaaagacaataggcttttgggatccggtggttgagagaatttcgaggaggttggatggttggaaaaagacctttttgtctctgggagggaggattactttatttcagtcaagtctgtctcacatccctagctacttcctttccctcttcaaaatcccagcatcaatagcctcaaagattgagaagctgcaaagagattttctttggtctggggcgggggaagagaagaaagatcatcttatcagatgggatgttgttagtagaccaaaggagttggaggtttgggttttgggaagacttctctaagaaacattgctctcttagggaaatgactttggaggttccctagagaaaggagtggtctttggtataaggttattgcgagtatttatgggacacatcctaatggatgagacgccaacatggtggttagatggtcacatagatgtccttggaaggctattgctcaagttttctaggatttttccccttttgtccgcctagtggtggggaatggggagagaattcgtttttgggaagatcattggtggggtaatgaaactttgtgctctcaatttgttggtctttatagagttatttctgtgaaaaacctcactatctcaaatgtccttggcaattccttaaaactgtcttggaattttaattttcgccgcaatcttattgattcagaaattgatctccttcagagtttaatgtcctcccttagttcagtgcttttctctccttctttggcagattcaagagtgtggtatttgtcatcttcaagcctgttttcagtgaaattttttttcttagccttgtcaaaagtctcaaatcctatcttgttccttccggtcaagttcttgtggagttcaaaagccccctcaaaggttaaggccctcgcttggttagtagcacatgggaaggtaaacaccaatgataaattgcaattgagaagaccctacaaatccctctgtcctcaatggtgcattctttgcaaaggaactggagaatcgatagaccacctttttcttcattgccctattaccattggactttggcacaagttgttcaaactagtacggttggcttgggttcctccaaggagtattgaggacatgttggttattggttttaaaggcttggggaactcattaagaggcaagacactttggcaaatcgcttgccttactttgttatggatggtatggcaagagagaaacaataggatctttgaggataagaggagaatggaagatgttatgagacttgattctgttctattcctctttttgggcctcttgtactgtagcttttagaggagttcctttaagtgttttacaactcaactggactgcggtttgcgcttcaaaagtttgagagtgttggggtttttctatgtttttagttttctttagttgggtgttttatcttttgttcagtttttgttttgtgggaaggacctctcatccttatcttggtttcttttctttctcttgtatcttttcctctattaatatacttttcttcgtttttgataaaaaaaaaaaaaaaaaaaaatataggtcatccttatgagagtttcaattcaagtggcttagagattggaggatttagtaaggaggagatggagaagttgagaaatctccttagttcccttgaaaaaccaagtggattgttttcatttacataaacaagtaagtttcctacttcttatgcccttagtgcctcaaacacattccacaatggttcttaggtcataaactagggagtaaccgatcatgtgatatattcttcttagacatttatctccttgtcctagcaataggaaaatcaaaattgcaaatgactctttcactaccgttgcaagttagtgagctaaatcagtctcttagagcgtggtttggaagatttactaaggtaatgttggagatgaagtatgaacaaagttaaggagatcatacatttttcacgaaatgctcgactttagggggaagttacaacattgattgtgtatgttgatgatataattgtgatggataatgattcaacagaaatgtaacttcttaaaaactggttagccaaggaatttgagataaaagaacttggaaagcttaagtatttcctagtaatttaagtagtttgatcaaaaggattaatatttatgttgcaacaaaagtatgtatttgatctcctcaaagaagttgcaatgttcggatgtaagcctttttacacactatttaaaatgaatcacaagcaaagtgaggccaatgataatacgttggtggattgaggaagatattagaggttggttggcaggttaatttacctttcacacaactggtatagcatatgtcgtgagtgtgacaaaccggtttatgcacaatccaaagaatgttcattttaaagcagctttaagagttttacgatatctcaagagtatcctagggaaagaaattttgtttaagaaagggacaaagttaaagccttgaagcatacacaaatgctgattgggcttggtcaattgtggacagaaggtcaaccttagggtattgcacactacttagaaggaatttagtaacttggagaagaaagaagtagattatggtggcaagatcaagtgccgagacaaagtttagagccataactcgcggtatttttgaacttttgtggttaaaattaattcttgatggtcttaaaatttagtgacagggaccaatgattgtattgtggcaacaagttggccatcaacattgctcataatccaatttaatatgaccgaaccaaacatgctaaagtagttagacacttcatcagtgaaaagcttgagagcaggtcgatatgtacaccatatgtcctaacacatggataattgatagacgttttaaccagggattggccagctctttgttccaaaagattacaagcaagctgagaatggataatatctattcactagcttgagtgtaggagaggggagggggtttcataaatgaatgtacaagtgtagagatttagaaaaattagaatagtttcctaattgtaagaatttcctaatttttatgtaattagttaaagctgtcctctgatttatggggattgataggattgtcaaactctccttagtgggtgacatgagtttgttaagagttgatcaatgggtgggccgcaccaaaagttctagcgtggggtactttgttgtgtctggttgaacatgtgggttaagaaggctgttatgggtgagatgaacatttcaagcatcagttaaaatatcaatcaatatcattttttggttttgtataaatgattcaataaattataatggcatgaattattgccaaatctgggcagatgaagtgttcttatgcttatcttttttcctactttatattcattcaaaatcttactatgttgctccttatctgcagtgttattgactaccaagcttacaacattatctttatgatttttctcatcaatttatactatgtttattcttttgcattaagtagaaggtgtgcattagggaaattagaacagcctcctcagtttcttgtttgacatgtgactatcttaatgggaacaaaaatttctcctttctttcctcttagtaaatttgcatttctgtcaaaaataaaaaattatcatgcaaataaaagattttctccttgtaggacttatgtcttgaatgactgacttttgatcaattcaggtgaaacaggagttgatcaaagtaagcc

SEQ ID NO: 12987 - DNA, 20556 bp, Vitis vinifera
  Intron number 9 from transcript GSVIVT01022623001 (locus G SVIVG01022623001) derived from phytozome v7.0 (chr-ID chr2 ; pos 13623044 to 13643599)
gaacacggtttgagtaagttctttctatttcaagtaaagatttttatgaattaattccaaatggtcattattatggtcttttgaagaatgtattctgtatatatcatccggcaggtctgcttcaaacctcatttaagttattttcttttagaaacttttcgcatgttctttctttatagcatacataaaagtggtcatgcccctatgcaagtcaaagttacagtgatgggaattacttctcatgaaatttgcctcatcttttactgattttttggaccatttattaattttttgataggattttcttgacaccttatgaaaagcatatactcactgacatgattcttagtttaaagttcataatatgagcattcatacatgacatataacatgtcaaaccgaatatatttactaccttacgtgcattagttatgttttatggttaaaatatccaaaacttatgaaaataaattaaataatttttagggtttattacactttacccccctaatttatagcgcgttttgcacattgcctccttgagtttaaaatcgagtaatgtaccctctatgctttataattgcatgcaatatgcatttgttgtacgacgacgttagctataatgaacggaagacacatgtgctaaatatgtgacatgtttaaatgagggcaaaattgtcattttgttttcaaatcttcaaatccccagaaccccaacttgccctcctccttccttcgatcgtctggtagattcctaaatccccaaattgaagttgaagccatagaatggccactattggaggaattcaagattctaatggatctcaaaacgcacttgagattgaaaaccttgttcgattcgccattgatgagcacaacaagaaacatgttttgttttttagtttttaatctcatttttcctttctctgtttctgtttgtttcttgagaaattctctccttttgtatttttttttttgtttttaatctcatttttcctttctttgtttccgcttatttcctgagaaattctctccttcttcttgttctttttttctttttttttggaggaaggtagagtttggcttatgaacgtttgcttttttctgaggaaccaaacaaggatttttatttttaaacaaaattcattcgttccataagtacaataaaatattatttttagggcaaaagaaatgatcatttggttgatggaattgaagttttcatttttttattttgtgaaataaatcattgcaaggagttagatccacaattgaatttttgtttcccttcctagggtttttgagtagccaaacgaggtgctttgttggttttttttcctctttaatcattccttgaaaaatcaattttttagatgagtttctgatcaaggattccgcttctcaaatagtaggaacctcctttatatccatttccaattttctcttttatttttggttgatttgtttgattatgtaatttgaattgattgttttaatttagttttgataaattgaaaaaggctactgcaatttagggagacgatctcgaccccaatttaggaagacgatcggaggaaggaggagggttagggttttaaaatgaaataacgattttgccctcatttaaacatgtcacatgtttagcccatatatcttccgttcattatagctaacgttgttgcacgacaaatgcacattgcatgcaattataaagcatagagggtacattgctcgattttaaacttgagagggtaatgtgcaaaacatgatataggttagggaggtaaagtgtaataaagcctaatttttatttatggaaatctttaaggtgaaattaattccctcctttaaagtaatgaaatcaatacgaagattttttttttgtcccatagttgtagcaaatgattgtccttcacttttcagcaatataaataaagatttattgtgtattaatttgaagctcctctgcaatatatttttagctttaccatgcccttgggcatttaacggttcaaaattatgaattttgattaaggaaatttttttattttcaacagtgtatgaaaatttacaatagttgggaatcaagaaggatgatttgaaacttatatagaagctttttttgcatatgggattgtttgttgggttcacactcatgctaccatttttagttctttgatccctaatattaaaagatctattcttctcagtgactgtcaaccaattaaccttgtaggaagttcatgcatagcgatcaccagagctttgttaacaataaataaataaacgagctctttgaagtttgttgtgatatgacatgttattcactgagggggcctttgtgaaggtggacaatcatatattcaaatttatgaggacagtgttggacattgtgggaagctggataatggggattggttgtgaaattggagtttcttagattatgtgagacagattttggggttctgtgatggaagttaataaggggttgaatgctcttttggggcttcaataggtttggttggttcaattttatgagctaacaaatgtcttaagtagatctacatccatagtggaatagaaaatctctttctaggttcccatttaaaagaaattggcagtctcctatatagcatctatggtttgctaatgatgtgatcattttcatctcaatgtggaaagcgtaaaaattttgaattttactgccttttgttttgagatagtttctggctttaaaatttaagagcattactttgtcaccatctgaagaactatgttatgtggacacttcaaaatacacaggtctgatgacacataattaggatttaagggtgtggatatggtttgttctctctcttccacatccatattcccaatgtgagtgaatgtctaacaagaggaacagaggattgatggagacaagtggcagccacctttaaaattttatcagagaagtaaaggagtgggctccaaggctcaaactttaatttggcactctcttgatgataatgggcttagttgggatcttatataagtcaatataggtttagcctagaaagtactttcagaaattaagttatgggcctagtcaatggttataagttaccattttcagtcattattattgtcattttccaatagtctttaatgtggttagtagtcagtccaagtttgtcattttcaagttgcattattattgtgtctagttccaaggagttataagtctctagaaaagtcttatatagtagttgattagttttttgagaggaatgaatgaatgaatgaatgaatttttaaccacttttttcctttgtgtgatgcaaagagtacttgggtgtgaagcctaaggtttctaggagtgattcctaaggtcctttcaattgtactctccttgcattttactttctgtactgcatcaccaaaaatctagttttctagaagttcctttatgtccttgattcgttcctttcaattatggtacttcaaatgaatcaagtactagggtgcaataggccattgtacaagtactagttttcagctgaagataggcatgtagaaaattacattgataatgcaactatgtttccaagtcctaaggtttggatgttagagaagacactattttacacctaatccacatacttgcatgcaaaaattgcaaggtattggagcaaaattgacagtgtggaataagatcacttttagagatataagagagaggaaggattccatcattaaggatattgccatggtatagattctcttgagccatccttaagggctacgaagaaagtagagttggaggaaatgttgttaaggacaaagaggcattggaggcaaaaaatctagagtaaagagggccaaggaggaggatttaattccatatattttcatagaattattaatggaagaaggaaaaagaagtttattaaatctttattgagtgaggatggaaccatgttagatgaccaagttagcattttaaaggaaatcttgatattctttgatgaaatatatagcaagtctaatgaagttttgtggagagtagaaggattagagtgggcccctatccacttttttcatttcttttttactattttagcatatcttttgagtagattgatgttcaaataggagtttggtattttttagggcttcttagtggtagaagtacggcaatggtgcttcattaatggtttgttgatgacaccatactcttttttttttgataggaaacgacaaagaaatatattgatagaattaaggagtacaaaagaaggatgaggaatcctcccacaaaagcaaactaaacaacaagaatacaaaaacaagatgctaaaaggtaacaacaatgaacaaactctcttagctagaccaccccattggagctgcacattgctagccaatctagttgcagcacactaaggggaatacccttaaaaaccatggagcaaaaagcccagaaaaaagcaaggaagtgaatggaatcccatagattctctaaattcctagctttatcctcaaaaatcctagcatttctttcccgccacacaacccaaattatagcaatacactcagtttgccacaaaactatgcctctcttggattttccaaaacctttataatcgatggtcatcatgtcagaaatgctcctcggagggacccaatccatcttagctatctgaaataatctgtgccacaaccccatcatcaaagaacaatgtaagaaaagatgatctgttgattcttcatgcttcatacacaattacagatgtcaggattaagagctttgtagggtcttctcaattgtagcaagtcattagtatttaccttcttgtgtgccactaaccagacaaaggacttgaccttaaaagagacttgagaattccaaacaaaattagtagggaaaactggagataaattagaaaggtgggacaagggtagaaaaaaagacttgactgtaaataaccctgaagaagataaataccaggatctcgcatctaaaactgatggggataagtgcaaccaatcaaatgaccacataaggctttctaaatcttctatctcaaaatcagaaaggttactacggaaattaaagttccaagagaagggacgagcagaaccgagaattgaagatatgggaatatttttagctgtaactactctaaatagtcttggatattggaatcccaaaggttggtccccttatcataagtctttccaaaagcgaattatttccccgtctcctaccacaaaccgagtatacttggaaaaatcctgaaagacatgtgcaatagccttctgttgaaatttggcattcaaagttagggttttaatttaggaaagtattttaggaataaaaaaggagagatcatttaggatatttccttaggattcagtttcctaatgttaggagagaatcaagctagattgatattttcttattcagtcattttgtgtatatatatgtgtatggtgtgtaccgaataaaaaaaaaaaaaaggaattcataaattcttcatggtatcagagccagttttctgaaaccctaatcccttctggccgcctcttattcaggccatcattcattccggccaagtctctctagccatctctcaatccgaccatctctctctctggccatctctcattccggccatcagtccctgttctcagagccaagggagaaaacgctttttggtcggtcgaatcgtcgtcagaaaacattcaccgccggcgacatctttttcccacaccacaaggagcgcctggaggagatctccaatttttcccaaagcaccgaagccagaaaaccacccacgcgccggccacgcgcgtttttctggtcggcgactacatctcacgcaccggcgcgtgagccacttttcggcgacgcgcttcctcctccagcctcgcctgacgccgactagccacccttcatacccgttctgccatccgagccctgcacgtgcctcttttggggttcttttgcctccgtgggccctctgaacagttttccgacgtcctccgactatttttttctcaaccccaatccctgcacgtgcctagggaagtgttcttctacctttccggtggtgccacggttgtttttcttttccattaggccggtatctctgattttctccttttcccaatttccagcaaccatattcggctgtcttcctcatctccatgacaaaatacggaatggcatcatcacaagtatccagcgccacgacactagaatcagggggtagttatgaaattccaaaccttggtggcagtgattcctctcctattctcatcacaagacacaaattaaatggccataactatttacagtggtcacaatttgtgttgttgttcatttgcggtaaaggaaaggatgagtatctcactggagaagcagccatgccagaaactacagaaccgagtttcaggaagtggaagattgaaaacagcatgatcatgtcatggcttatcaattccatgaacaatgacataggtgaaatttttttgctgtttgggactgcaaaggacatctgggatgcagccaaagaaacttactcaagttttgaaaatacttcagaactttttcaggttgaatcagccctacatgacttccgccaaggagagcagtcagttactcagtattacaacacactcacaaggtattggcagcaacttgacttattcgagactcagtcatggaaatgttcggatgatgcagcaacatacaggcaaattgtggaacaaaagagactgtttaagtttttcctaggactaaacagggaattggatgatgttagaggccgaatcatgggcattaaacccctgccaagtctcaaggaggctttttcagaggttaggcgtgaagaaagtagaaagaaagtgatgatgggatccaaagagcaacttgccccaacattggatgcctctgcccttgctgctcggtcatttaatagtagtggtggagatcgtcagaaacgggataggccttggtgtgattattgtaagaaaccaggccattataaggaggcttgctggaagcttcatggaaaaccggttgattggaaaccaaagccacggtttgacagagatggcagagcacacgtggctgccaactctgagagcacatctgttcccgagccgagtccattcaacaaagagcagatggagatgctacagaaactattaagccaagttggcagtggcagtactactgggatagccttcactgctaattgaggaggaatgaagccgtggatagtggacacaggtgcttctgatcacatgacaggagatgcttccattcttcaaaattacaagccaagtaatggtcattcatccgtccatattgctgatggttcaaagtaaaaaattgtcgggacaggttccataaaacttactaaagacttgtatcttgactctgtcctccatgttccaaatttggattgtaatcttttgtccattagcaaattggcccgtgatctccaatgtgttactaaattttatccaaactcgtgtgtttttcaggacttgaaatcggggaagatgattggcagtgctgaactgtgttccgggctctacctcctcccatgtggccaattctcaaaccaagtctctcaagcaagttgcgtacagtctcagagtatgttagagtctttcaattctgtgtcaaattataaggtcaataaagatagtgagattataatgttacactatcgccttggtcatcctagctttgtttaccttgcaaaattgtttcccaaattatttatcaataaaaatccagcatcttagcactgtgaaatttgtcagtttgcaaagcatactcgaacagtatatcctcaaatcccatacaaaccttcgactattttctctttagtacatagtgatgtgtggggtccctcacgatggtttgtgacattcgttgatgatcatacacaggtaacatgggttttccttatgaaagaaaagtcagaggtcgggcacatttttcaaaccttcaatcttatggttcaaaatcaattcaattccaaaattcaagtcctcaagtcagataatgcaaaggaatactttactagtagtctcagtacttatcttcaaaatcatggcattatccacataagttcttgcgttgacaccccacaacaaaatggggtggctgaatgcaagaatagacatctcttggaggttgcccagtgccttatgttttcctctaatattccaaactatttttggggggaagccattctcacagttacctatttgattaatcgtatgccatccagagtgcttacctttcaatccccacgtcaacttctcttaaaaaaattccctcacacccgtgtagcctcttctgatttaccactcaaagtatttggttgcagggcattcgttcatgtgtatcctcaaaatcgtagcaaatttgctcctcgagccaataagtgcattttcctagggtcttctccaacccaaaaaggttacaaatgctattctccaaccaacaaaagattttacaccaccatggacgtctttttctttgaacatgtcttcttttatcccaaatctcatgttcagggggagagcatgaatgagcatcaagtttgggagtctcttcttgaggttgtatctttttctcactcagagtcaccaaatccttcccaattcgcgcccactgagttgtccacacccatgccgtcatcagtccagccagcccagcccacaaatgttccttctcccgtgaccatccagtctcccatgcctattcaacctatagccccacaacttgctaatgagaacttacaagtttacatcaggaggaggaaaagacaggaattagagcacgaatcacagccaacatgtggccaatatattgactctatttcaagtctacctgaagagaacataggtgaggatagggctggagaggtgttaattcccagcattgatgattctactctgctgattgcattgaggaagggtgttaggagatgtacagatcatccaattgggaattatgttacgtatgaagggctatcaccatcttacagagcatttgctgcttctcttgatgatactcaggttcccaacacaatacaagaggcattcaaaatttcagaatggaagaaggcagtacaagatgagattgatgcacttgagaagaatgggacatggactatcacagatttgccggttgggaagaggcccgtggggtgcaagtggattttcaccataaaatacaaagcagatggatcagtcgagagattcaaggctcgtttggtagcatgagggtttacacaatcctatgggatagactatcaggagacttttgctcctgttgcaaaactgaacactatcaggattcttctctcattggttgtcaatcaagattggtgcttgcaacaactggacataaaaaatgcgtttctaaatggtgacctagaagaggaagtctacatggaaataccacctggtttcgaaggaagtatggcaaagaatcaggtttgcaaactccaaaaatccttgtacggccttaaacaatctccccgagcctggtttgatagattcacaaaggcagtcttgaagctgggctacaaacaaggtcagactaatcatactctatttgtcaagaagtctcatgccgggaaaatggccatattgatagtctatgtcgatgatattattctatctgggaatgatatggaggaattacagaatttgaagaagtatttgtcagaagagtttgaagttaaagaccttggaaatttgaaatatttccttggtatggaagtggctagattaaggaagggaattgtagtctctcaaagaaaatacatactcgatcttcttaaggagaccggtatgcttggatgcaaaccaattgatactcttatggatagtcagaagaaacttggtatcgagaaagagagtacaccggtagacagggggagatatcagcgactcatcgggcgcttgatttatctctcacacactcggccagatattggctttgcagtgagtgctataagtcaattcatgcatagccccactgaggaacacatggaagtagtttacaggattcttagatatttaaaaatgacaccagggaaaggtctattcttcagaaagacagagtatcgtgacactaaagtatactcagatgcggattgggcaggaaacatcattgacaggcggtccacttctggatactgttcttttgtctagggaaatcttgttacctggaggagtaagaagcaatcagttgtagccagaagtagtgcagaagctgagtacagtgcactagcacagggaatctgtgaagggatttggataaaaagggttcttagtgaactgggacaaacgagttcatctccgattctgatgatgtgtgataatcaggcaactataagcatagcaaagaaccccgtgcatcatgacagaaccaagcacgttgagattgacagacacttcatcacagagaaggtgactagtgagacggttaaattgaactacgttcctaccaagcaccaaactgcagacatcctcaccaaagctttacctaggcctaacttcgaagacttaacttgcaagttgggattatattatatatattctccagcttgagggggagtgttgaaatttggcattcaaagttagggttttaatttaggaaagtattttaagaataaaaaaggagagattatctaggatatttccttaggattcagtttcctaattttaggagagaatcaagctagattgatattttcttattcagtcattttgtgtatatatatgtgtatggtgtgtaccgaataaaaaaaaaaaaaggaattcagaaattcttcaccttccaagggcaacgatgtgaccatctgactatagtgttgacatcccaaccattagaatgtgtcccataaatgattagaatgacctgatgccacaaagttgaactctccctaagatacctccacaaccatttccctaaaagagaaatcttcccaaaccccaatcccctttttgtcttcggtttacacactacatcccaactaataagatgatctcttttacattccccaactcttgaccaaggaaaaccctttacaatctctcaatttttgtagccattgaagcaggaatcttgaagaaggatagaaagtaactagaaatgtgggataggcatgagtggataagagttatcctacctccaaaagataaataagcctttttccacccatctaatctccacgaaattctctcaatcactagatctcaaaagccacaagcctttggattccctcccaaaggaagacccaagtagagtataggccaatcagaaaccttgcaatcaagcaacaaggctaatttagagagatgatcttgatcaaggttgatgccataaaggttacttttgtcaagattgaccttaagcccataaatttgcccaaatactaacaaaataaacttaagagtttgttgttcttccacacatgtgctagaaaagaagatggtatcatctgcgaattgcagatgagacacccttattctattcttacagtgaaaccctccaacatacttctttcctctactcttaacaacatcctactcaacacatcaatgacaataataaacagaaaaggggatagaggatcaccttgtcttaatcatctagttgccttgacccaccctttagcatttccattcactaaaattgcataagagatcgatgacaaacaacctctcatccaggacctccatctagtactaaaccccttcctatccaacacatgatccaaaaaatcccaatctacatggtcataagccttttcaaagtcaattttgaagacaactccttcctcccctgatcgtcttttctcatccactaactcattggctattggaactgcatctaaaatttgtctctcttgaacaaaagcaccttgagtagaatggacttttgttattatcttgtagagacaagtgatcaagctaataggtctaaagtctgaaatttttttgtctggatttttttaggcaaaagagctatgaaggtggcattggtgctttgattaattatcccgcatctgtgaaactctgcgaacaccctcactaagtcctccttgatcacatcccaacaatcttgaaacactgcaatggtaaatccatcatgccccggcttcttatccctacctaactgaaaaatggctttagaaatcccttcttcagtaaaatgggagtccaacctagaagcactcttttctgagataggagactaatctaagccttctactctccaagactctccaggaggactcgagtagagcttttcataaaaaagtaagatctcttctgtgatgctatcaatattattcaacactaagcctctttcattctccagaaacttgatgaatttcctatttcgtttgccattagccactttgtgaaaaaactttgaattgcaatccccttcttttatccatttcaccttagctttttgtctccaatgaacctcttccctcaaaattaattcctctaactcccctttctcaaagctctttgtgtgaaagttcagaagaaagaaccccttcttgctcaacagcatcaatgttagcaatatcacaaagtatgttttttttcctttcctttagcactccaaaagattccttattccactctttcaatttggccttaacaaattgtaacttcctcataaacttatgaccttcccaaccagctccctgaaagcctctccaccaacttctaaagcaatctttgaaactaggatgttgcaaccacgtattctcaaacctaaaaggagttggcccctacttgaatgaaatggtgtctaaaacaatcagccaatgatccgatgtccatctaggaagaacttcttgaaggctttgaggaaagaaatgctcccactcatttgtgtaaagaaaccgatctaatctcttacacacaaatgaatcttgcaagtttgaccaagtgaatggggcgttccttaaagggaggtcaattaattcacaatctcttataaatccatcaaagtctctcatgctagaagttaaaatagagcctcccaatttttttgaaattctccttataacattaaaatcactgcccacacaccagaaaggaaaggaaatgccataaatgtctaagaactccacccaaaataccttcctaagtaaggaattgtttggaccataaactgaggacaaccataggggtccacatccatccaacaaaaacttaactgagacagaaaaggagcctattaccacctcctcactgcatagtttctttgagtcccaaataatcaaaatccctcctgaagccccacaagtcggaagagaagcctactccttattcctaaccgaccagacactaccaacaaaccttctgtcatactcctcttttttgtttcctgaaacattacaacattcggattctcaagatgcaaaaaatctttaaccacccttcgtgttttcgtagaacccaaacccctagtattccaactgatgatcttcatgataaaaacctctctaaccctaaacctccaagccatatgctacaggtctcaaatacttgtggagaatctgctcttccgcttggaatacacttaatatccaaagaacttaagacctcacgaactttagccattttcctaggagaaagaccatctatttggaacccacccaaagaggaaaactcagctttaatcgggcaatctgtaacaaggttaggggcctcaataggcatgttaagcaaggtcttaagggagttaaaaccctcatacaattggttcagacaaactaattgggattccacatcaactaggttaggattgccaacaaaatcttaacataaatcaccatcatcattttttttggaaaacattttaggtgcaactcgacaattcgtaggagactgagacggaattactgaactaggaagactgggatcagaagaagtcagaggtggatgagccaagccataggaggggggaaaaatgacaaagatgattgagaaagtggagcaaaaactacctcattgttttccactaccatcaatccacaagtccccacagaggttagccctttttcactggttactggattagaaggaaaaaccaagactgaagagtcgtgatgagcaaaacccccgaaaccctcagagttttctctatctacaacgttagaaaatttgcaccattttgccttcccctttgaatgaataaaataagagaagacctttgatgattatccgcatcacctcttgacgacgaagccccttccccagaacaactgcttcggaaccccaacggacgactaagaatgagaggactcgagctaaacctttgcaccatctgtgttcccgcttcgaaagcaacgtcctttagaggggctacaaaatctgaagatggaatctcttgcgttagaggctcgcttcgtcttcgccccttgtcggcatttagaaattggagaaatatgactagtccacaacttctttgaaccaaactttgtcatggaacccctcaattgagaagaagagaccactaagaccgacttcccctttcccattgcagatgagtcttcactgcgtaaaaagcccttcctagagttgggctgctttccatccatttcttggcccaaagttgtcaccgggccttttaaattaacacccctctcccaacccatatttgcttccaccactggcctaggtttttgaggagaatgggcccttctctcttgcagtgcattagaggcccggtgccattcctcaacacttgagtggaccttaacccttctgaccctaacttcacctaacagctttggcccaaaggaccctattctctctttatttgaattcaaatttaacggagatgaaggttggacacaattgttcccttcatccgcccttctcttgccatgtgtcctctcagccttttgatttcctacaccatctttcaatttgtcagctgccccattagaagaccatcctttagccgttgatttattcttctcaaccagccttctaccacttgtccacgagtgagactcacaatcccctcaagttgactcactcatttctctaactcgcctttcttctccagctccaaccactgcaattgatattgtaaaaacccaacccccatctaacacctcaatcaatgcaggaaggactgaatgttccttcattaaaattctcacccttgtcttacagagatcatacaatttcatcgttcgccaatcgatctttgtcactgtcccccactgctctacaattttatttagatgttccattaaccataaatgaaagggcaaaccccgtaattgaatccatccttctttgaacttcccctctacttttgagttttcccttggcgaccaccttctcaaatgggttgtataccctcccttaaccttgagaaaccttaactcttggagagagaaggcttcctcaatagtttctacaaaaaataaaccttttccgccagagaaagggacgatagtcaccacacctttttgccctaagaatttcgccagagcacggccaaccctagcctagttgacaaaagcagcgggacattcacaaaccacggctctcgcccatctcccaactggaacaaggcctcctctcctcggtccttccttttttactacattcacaaaggacccacttgtttgtaatttatgttttcaaccctgcactgcctttccttttcaactatattcgaagaggggaccatcagcattgaagaaaaagcattttttagttgctcccatcccttgccccgctcgccctcagggattaccaggaaagttgaccttttgttggaggcaaacttcgaaagccttataaacctaccgtggttgttgaagcatacctccattaaatgaactttggactttcctctgtattttctgttgaaacccatgtaagtcttcagctcgatagcctttgccaaatgtttgatcaaccagccaacctcttccttctcaaagcctgaggcgaaaaccgagcctctgctatgctctgtaagcgagcaccaaatacctccggactcaccttcaaacctaaccaggaaggtcttcctctccacagagactttcagcgtcctcaccattttttacttttaccatgctcttttcaatagctagtttaaatgattacaaggccttaactaattttgttggtatttgagcacatttcaagtttgaagataaattaagacaatgaggaaatagggttgcttttgaaaatgaggatctatcggtccaaaggatggaatattctcttgttagctatttgtggtcttggttcaaatgttgcatagttgaagggcctaattctttaatcaacttttttgagtgggtgggctataggtgagagaggaggggttagttttttgtttccctcttccttttttttagtctataggtgctcgtttctatacctcctgtatgctttgagtttcccgttgggcgccctgttctttaatatactctactgtgactttgcctataaaagaaaaaaaaaaagaagataaatctagacaatggtatcttgttgggtatcaatgtgagtttagcctatatcttttttgggtcttcctttagggaaccttagagccatatctttttgggatttagttttggataggagttgccgatggttagatggttggaaaaaggcctacttgtctctatgtggaagaataacaatagtgtagtcttgcttttcccatgtccccctcattattattattattattattattttattcttaaacctccaattaaagtgggttatacaattgagagattacaaaggaactttctatatttaggtgttggggaatggaagagagatcattttagggatcaatgtctaagctaaagggagaaggggccttggagattagaagaatgactttgaggaatagagtcttttcagggaagtggttgtggaggtttcttaaggaaaacactactttatggtacaacattttttgaaatttacgagccacattcttactgatgtgatgctaatgttgttgttacgtgatctcatcaatgtccttggaaggtcattgcacaagtgttctttggtttctgtcattttactcggtgtttagtggataatggtacaaaattcactttttggaggatatttggtggagtgcccttttgtgtttggctcccaaacctctatagagtagtaagggcgagaaattcatgtagttcttcaatttccattccattctcctcttcattatggaattttaattgtttgcacaatgttaccgatgattaaatgaaggaactctataatgttgactttagtccatgtgtatttattgctcacattctttgatatgagagtttgatctttgacatcctatggtttatttagtcttagtcagtttattctttagaaccctctttgtttccaccaatttaagatcctttctcttggaaaatttcttctagaaatctaaatctctatcagaagtcaaggcctttgcatggcttgtggcaagtaggaagattagtatccttgatttgttgcagataagggaatctttcaaagcctttaccctggaatggtgtgccctttttttcattttttttttgtattttccattagcattaacattattacgtaagttgtttggactataagattgattgggttccacctaggagtgtggtggagatgccaacaatttcctaaaggttttggatgtcttctaaaggaaactcatggtatattgttagtttcacattaatttggaatatatagctggagaggaatgcaaagatttgaaggatagatgaagaattttagaggcattgtagaattcaatctatttcttctcttccattcgacatcaagtagtacatcatttttgggcactcttttgagtgttatattgatacattggacataatatgtagtttaactaggttggctaagaagatactctctaaatggactcccccagtaagttgtgtcaacttgaattttgatggttgctcattaggaaattcataacaattaggagttggaggaatgtctattgatcatcatgtaacactaatgagaatattttctaaatatattagaattggtctagaaattgtggtggagattctaaccttgctgagaagttggtcaaagtggagggtctttccaacctaatgctggagtgagattttgcagtagtccttggttgagtaagaaagaaagaagctaatggaaatttgacgggtggcttcattaaactttttattttgcttgaaggatgggatgcttctattattggattcctcattcatctatatattaacaaagcagggagccaaacttctgttctcttctgtagggggtattttggaatatgttagcaaaacatcgagccaaacatttgatctcctttgtaggggtttctctacctctctgaatatcgattttgtaattgtatccacttttcaatgtgcaatgacctatggtttctaaagtagatagtttttttcccctacttttgattagagtagtggttgtttttatagaggaaggatttaccatacttttttgtacttatttcatagtaatgaagtgttttcttctgattagaaaaaaaaaaaaaatagacaaatacttgagccatgctagatatcctacagtacatgaaacaatataatgatctattaggactctaattcttttcctagagcttctaagtctttcaaaaagtggaatgaaaatatagaatggaaactttccaaaatagaaagtttaaatatgttggaactctatatttttgctccgtggtttttaagggtattccccttaatgtgctgcaactagattggctagcagtgcgtaacttcaatggggtggtctagctaagagagtttgtttgttgttgttaccttttagcttcttgtttttgtattcttgttgtttagtttgcttttgtgggaggattcctcatccttcttttttacttcttaattctatcaatatatttctttgtcgtttcctattaaaaaaaaaataaaaaaaactccatatgataagagacttccacaaaagtataacttttcaattctaaataagactcaaataggaaaaaggagtaagttcagaaagtaggaagttcaaagtgtataagtttcttaaaacaaaaataacaagacttgccaagctctaaataagactaaaaaaaccaactactactaattatgacatcaaagaattaaaatgtgtgaaattatacaaatgcccttggacaaatcaatttaggatttctttgcttcttttcttcctttgcttggagaccttgaaagtttagtctcatcaccaaggctatatgtttttgttttgtatttttttggatcttcctttttgtttttttcttctgaggtgactatattacatcaattatcttatcttgatgttggtagatgattgtcatttcctgtatttacctacttttaatttgttccaatagtgaggaagtagtggaaagaatcttttcaattttctgatataggtttatttttctgattcctttccatgatcttgttacttgttgatctcccaaccaacagccctgtagagtttatctgcaaaatggaagtccctcataaagcttaagctttttcatgggctatagctttataaagtttgatcatattgtatatctattgttacatctcatgaagtaacaaatttgtggggtgagctttaggtcccatactgttctcatgtcatagttgttgctctctgtcactgtatgggaggttaataactgatcctcaaccatttgacggtctgtttgtaggaatcagtagttgaatgacacttttttctgatattatctaatgctgaaatagatatctcattttgtttttgaaaaataagctttcatgtgaaagggtcataaagatggaaagtgcatcattttattggcattgtatcatgatatatgatagtcagattcttatccttaaaaatatagctgtccttaagatgacatggcagttagagcctgttagtatgtccagaactttaaactcctatccaatattttagctggaatgcatgtaatattttgttcatgcccatctctagaacacccagtatttggaagtcaataaaattaaaatggttagtagtactattattttgttcaatttaagaactgtattacatgtagtacttttattagtgtgtgaaatatatgatatgtcaatggtgattcatacctgatatgccactttctccaatatattttagacacattgcagttagtgcctttactagagtccatgactccatgtcatatgactttccaccccaaaaaaatcaagccatagtaaggaagagcctcttagtcacttgaacaaggttactattggattctaacaccttcaaatttttgtgattagctaaaacctatgatttcttttatatgtgtgcactttttcatgtcattaacttttcatgtcgtgagtaggtgggattgcagtttccaat

SEQ ID NO: 12988 - DNA, 2392 bp, Vitis vinifera
  Intron number 2 from transcript GSVIVT01028932001 (locus G SVIVG01028932001) derived from phytozome v7.0 (chr-ID chr1 6; pos 17306454 to 17308845 reverse strand)
gaggccctgggggagataagtgcaacccctgatcatgatttccaccctcttgtcttttggtttcattgtttcgaattcagcacttaataaaaactttgctttaatttttgtggcacaaaggaagaatttctcattccatatatgtctgtgttctttgttattttttctgccaagttggttgtgagacaattaaagctctggctacctgaaaattaataactagatgagttgttagtttagggtacagtatgatatctctttgaattagacaaatagattctaaattacttggtactaaatcaagtaagacttgatgtttaaaattctttaatgaatctactaatttttaaaaataatttaaaatttaaaaaactgacttaattaactttagaccaaatcaaaactagttcaaaatattctctctaattaagtactatatgtgcatatgtaaggaaaaaattaattatttctatatttaaaaattaaactttgtttgcttttatatttattttaaataaaacattatcaaccactattattttaaaattatgacttatttttaacataaaaaatcacatccatatttcataaatatatatatatatatatatatatatatatatatattaataaaaatatcatttataattttattattcatattttaacaaaaatacttatttttaattataaaactaatttttaataagacttgaattaaacttaattattattatataaattgaatttgaaaatttttacaaaatcaaaatagaaaacacgacttaggccatatttagtaactattttagaaaacagttctgaaaacagttttttagaaaattttaaaaattattctctaatgttttataaaacaaaaatctgtttggaacctaaaatgtttttaacttgtttttttaaatatttttaagtatatttaaaaaataatttttatatttagtattttatttttaatcattctacatgtttgtataattatttttttaaacggtttttttattttttatttttaagaatagaaaacagaaaataacttttgattgttaaatacatttttattgtttttgtttttgtttttttgttttgttttgaagatcagacaattgtcaaaaaaatcattgtcaaatagacctttagtgtccaaagattttttggtatatatttcaaaccctgagataaataaaaaataaaagaaaatcccatattttatttaaaattataaaatcttctacaagaaataaatgacttgctatgataatagaattatttctccgtggtataaacaactctctatatttcaattaaatttggtacttggatgaaagtgcatatcaatttaagataaggttatttatattatttcttaggtaaaacgtgaagaaaaaacaaataaattagaaagcacgttattcattgaaaaggttgaaaaataagaggttatttttggatcttaccctcataattattacatatcttcgctataaaaagaatgaagcgaacttccaaactgagaaaattgacctcttcaatatttcctacattttccattattaacatgagtaaaaatctcttccagccaaaatgtaatataccctaattattcttagttgtcacttgggtaatatatatgatctcgattaatatacgattcatttctaaaaggaaattatcctaaaattttggctgcttaatatccattatcaagaagataaacccatttgagaaattattataaacttttccatatatatatagaacgtaataaaatctattgaagatggtgttgatccctaaatgaagggatgattctaatgcatgtatgaccagctaaccagaacatccataaaatccacagttttgaagattgtaggagatgcctcaaccccagatatagatagaaaatatgtggaagttataaaaatgtgctcgtgggacaaaatcttagtgtcttccagggtgagttcgggggtggagatgagggtggttgtggttttagctcttcttctgtggggaatcagtcatgaggtggagggaggaagggctacttctatttctaaagaagatgatttggagctggaaagagaattaaggcgtttgaacaaaccagccatcaagagcttccaggcacgcaattcttttcttgaattttacatgctatatattttgcctttaatctctgttttgatctggaaaagcattgtttcatagcaccctatttgccaaattttatgaatacttgactggtatatgtgtcttggagtggtcatgagcatagtgagatatcaattaaactatgatcatctagggttttgtttttcattggatgattaaaaaagtaacagtagatttgttgatttctttttcctacttg

SEQ ID NO: 12989 - DNA, 3417 bp, Vitis vinifera
  Intron number 1 from transcript GSVIVT01019547001 (locus G SVIVG01019547001) derived from phytozome v7.0 (chr-ID chr2 ; pos 1527478 to 1530894 reverse strand)
agagaggagaataaggtaattttatttcaggttttttcttaattattatgatatattttcccaacatcttatttgttgtgataatcctagaatgagttcaacactatgtttggaattgaaagatttagagaaaagaaaaaaaaaaaaatacaaattttgagacatgaatttgtaaatggaaatagtcttagagcccaatctttgatatagaaaaaatggaggaaagccttaagctatatttgacaactattttagtaagtttagtaactataaaatcattttttgttttttgttttaaaaacaaaaaacaaaagttctatttattaactgtttttaaaaattgttatataatattttatagaacaagaatttgtttggaacctgaaatgtttttagtaagtttttaatatttttaaataaattttaaaaataagtttatatttagagttttatttttaatcattatgcatatctttataataattattttaaaataatttttaaaaaataagtgaaaacaactaaaaaatgttatctaaaaatactatattttcttttttaataatataaaacaatttatgattgtcaaacgtatttttcaaattttcttgtttgttttaaaaagtagttgtcaaataagctcatattgttttcaaataatatttttttagttgttttcacttttttttagatttattttttaaaatgattaagcaaacattaaaaattattaaaaataaaacactagatgtaaaaatttatttttaaaaacataaaaattatttttaaaacattataaaaatattaaaaatacgataaaaatattttaaattttcaaataaatttttgttttacaaaatattagagaacaattttaaaaaattgttattgaaaactgttttccaaaaccaattttgaaaataattaccaaataaaaccttatattttcttaggaaatccaaagattttatttatgtttatatgattcgtgtaaaaatacataatcacattgtatactttgaaggaaaatgaggtttaattaaaacttttagcttattgatttggattaacctttaaaaaatcaattttttttaaaacttaataatagctttttcatatatacgtataactttatcaaaatattttttattttaaagaatagtttaatatgaagattataataatatgtattttctagaacctctttttagtttatgtagaacatttttttcatataaaatacaaaattttatcataccaaaattaccattttaaaattatgaatttaattttaattttgattactaacaaaaaaaccgaaaaaaaatattttaaatgataccttaataacttgtttaggatatttttaattataaattaagaaaataaattactttctttttaatcttctctaatttatatcataggccattaggttataagggaagtatgtgtagatcctgctcaaaccaaagcagggcatgcctagcctaaaatcatgccaaatattttgtctttcaattctatatttggtgttgtttctaaatttgaatcataaatttgaaagtagtttttgtttttgtttttttggttttaagaataaaaacattttttttatttattgtgaaacgctttttgaaagcaaaagattgaattacaaaacagccatcaaacaaaccctgatatttcacgaagcggctaaaggagtcccgtgatgtcagaactcagaagtgcattcccgaggatagttgagtacttgagatttttgggcccaaatttcagccatatggcaattagatgtcgctcacgtgaccagtgtttatagaagcaatccaaaacggagtaggcccaagatcaagtttaggattcatagtcatataattggctttggcccatggaatcatggtcactgacacattcgcatcacggctctgtcctatcatgccctcatgccccatattctcttcctattctcctccaccatagtcgtgaatttaattattaaatattcacgtcgaataacttttttggtttttgattttttccttcttttggtgcgttgttgcagtgaaatattctattcgaatgtcccctttcattactaagatcacctgaattcactccatttataatcagaaattatgtattattagagattgagagtaaatttgagagtgatttttaaaaatatttttaatatttaaatgataaaaattttcaaatattaaaagtgtttcttaacattattaacaaacgtgttattaataattttaaaaataactaaaaaataaattttaatatcatttttgtataaaaacttaaaatctaataaatcttttaaaactatttttaaaataaaaaatcatttaaattgatttaaacactataaaaaaaatcattttttgttatatgattattacatcgaaaacattataaaaataagttttcacgttttcaatacgaatctactaataaaagcactgtagctttatttgaaattcttcataattttaaatgcttcacgtaacttctttatcaatctttttttatttagtcgctatataaatattccaaggcccacactaacttttagcctacttttcattgaattgattttatatgcctaattagctaatgatgcattaaaatcactacttgcttttttaaaaagtatataaaattattaaaaaataaaaacactaaatataaatttgatttttttaaaatgttaaaaacaaatttaaatattttaggttttcaaatatatttttattctatataaatcaaaaaaatatttaaaaaaattatttttgaatccagatactgataatgcttttaggtgcttttggtaaattaataatatagtctaagatgttgcaattttttttggtaggggtgggggtggggtggagtgggggagtagtttgtttttaaagaaacaagatgaacgacagaggttctacctaaaccacctaaccaaacagttcctaagtagctgaagacaagtgtaaaacactcattacaaagcccaaagcgttcaaagtcgtaagttcgtaacagctcttcctcaccaataaggcaataacaccaaactttcttccgttatcatccaaaaataaaccctttttcgtggttccacgtaaccttcttccaccgcccctttttgaaaaagccaacagaatattccacgtgatctcgattaaaatcaacggctttgatctcaccaatctcgtgacctggcgctaatcagggttagttctgtcaattcaccatatccgaatctttaaatatcagcggagaggaaggcttctataagtgccctattttccctcttccattccaactttgttttgtttttataatatttattatttctggagttttctctgtttctctcagtgttcggactcggcgata

SEQ ID NO: 12990 - DNA, 10823 bp, Vitis vinifera
  Intron number 6 from transcript GSVIVT01013176001 (locus G SVIVG01013176001) derived from phytozome v7.0 (chr-ID chr2 ; pos 7100982 to 7111804 reverse strand)
gtgacatcaggtaactgataaatgacttactttcaaatcaattagcaatgttatactatgtgttaaagtaatgaacacatcttatgacttcatgtttccacccatacacaatgtgtcaatttgttatcctgaatattttttaggagaaaacgttaattttatgtagtgcatagaactctaaataaattaaaagatgaacataaggaaggaaacaataaaacattgttggaaagaactcagagtaattcaattaattaagctatatgattacatctcacatccttatatgctggacttcctttattctagggaaaacaaacttagctaaaaaataggaaatgaaataacaatctaactaattcaggtaatattatacagtcaataataagcagaataaaactgatttttctacactccccctcaagttggactatacaagttaaacattcctagtttgtcaatcagtttctcaaacaaggtctgggtagcccttttgtaagaatatccacagcttgctcagttgttgggacataagacatgcagatcattctctcttcaatctgatctttgataaagtatcggcctacttccacatgcttcgtcctatcatgacgaaccggattgtgtgcaatactaatgccaaccttgtagtcactataaatttttaatggaagttttacttttgcttgcagctcttctagtagtaactttagccatagtaattcgctaattccatgggcaatggctctaaattcagcttcaacactacttctcactaccattgtttgcttcttgctcctccaaatcaccaaatttccttagacaagtctacaattgtctgaggttgatcttctatcatttacatacccaacccagtttgcattagtgaatacttctatacccctatcttcggatttgccagaaaagagacctcttccagggtttccccctcaaatactttaggatttgataaacatcttccatatgctcctcagataacgaatgcataaattgactaacacaacttactgcaaaggcaatatctggcctcatatgagataaataggtaagttgctgcttcctttgttcactgggctttcattggattgctctcttagctttaaatttgggtccactagcgtgtctactggtttacaccccaacatgccaatttcattcaacaagtccaatacaggcttcctttgagacattgaaatcacttgcttgctcctcgcaacttccactccaacaaaatatcttagagtcccaagtctttcatctcgaactcaactgcaagttttttctttattccttccatctcatatctgtcatctctagtcaaaattatatcatcaacatagacaataggaattgtaactttctcacctctatgcctgtaaaccaaagtatgatttgactgagcttagttgtattcctggtggcgaagagctttggtaaagtgatcaaaccaagctaccttgccatcttccttttccttatcgaaactcgacagtaagtccaaataaacttcttcttccaagttctcatttaggaatgcattttttacatccaactgttgtaggggccattccaaattcactgcaagtgctaatagaacctggacggtatttatctttgcaataggagcaaacgtctcttggtaattaataccataagtttgtttatatccctttgcaacgaatctcactttgtagcgctcaattgatctatcagctctacacttcaccataaagacccacttacaacctactagcattttctcccttggtttctgcaaaatttcccatgttttatttttttttcgaggacctgcatctctttcactacagctttcctccactttaaatctctccatgcttcttgtatgttttttggtatttctccattcaataggtcgaaaatatgtggctgagagttgaggggttcaaagatcttattcgaaattggtggcagggaattgaggtcaggggcagtgccagttttaaataggctgcaaaattgaaggagatgaaacaaattctgaaagattggaacaggaatgtgtttggaaatctagaaagcaacaaagctgtagctttacatcaagtggaatactgggatctggtggaaagtgagaggagtttgactgaggaggaaacagaagctaaaaagggtgctaaggagaattatgctaagtgggtctccttggaagaaacccattggagacagttgtctagggagctatggttaaaggaaggggacagaaacacgagtttctttcatcgcatggcttctgcccatcgtagaaggaattgtatggacagaatcaagataaatggggtgtggttatcagaggagcaagaagtgagggtaggggtagtgaatgtctatcaacaattgctttcagagaacttggattggaaggcagacataggaggcttgcaattagatcaaattagctagcaagaggcagagtttttggagctgcctttttctgaggaagaagtccattctgcactaatggagatgaatggtgacaaagccccaggaccggatggtttcaccatggcgttttggcaaaaatgctgggagtttgtgaaagaggaggttttggatatatttaaggaatttcacgagcaaagctcgttccttaagagcctcaataatatgttcctggttttaattcccaagaaagggggggctgaggaccttggggattttagacccatcagcctattgggggggatctataagttattggccaaggttttggctaataggcttaagaaagtgttaggaaaaatggtatcgtcagatcagaatgcctttgtaatgggtaggcagattcttgatgcctctctaattgcgaacgaggtgatagatgcttggcagaaaaggaaagagaaaggtctcatttgcaaattggatgtggagaaagcgtatgacagtattaattggcagtttctgatgaaggtcatgcaaaaaatgggatttggttcaaagtggttggggtggatatggagctgtatttccacatccaaacattcaatcctggtaaatggtgtgccagctagtttctttccaagttctaaggggctgcgccaaggagaccctctttccccctatctttttgtcatggggatggaagtcctgagtgctctgattaggagggctgttgtagggggctttctctgtgggtgtagtatagggggaggtagaagaccgacggtgaatatctcccatctattgttcgctgatgatacagtcgtgttctgcgaggcaaaaaaagaacacttattgcacttgagttggattttgttctggtttgaagccgcgtcagggttaaggatcaacttggccaaaagtgaagttatcccagttggagaggtggaagaggttgagatgatggcagcggagctagggtgccgagtgggttcctcacctactgtctatttggggctgccccttggggctcctaacaaggcttcttccgtttgggatggggtggaagagagaatgaggaggagacttgcgctttggaagcgccagtatatctctaaaggtgggagaatcactcttataaagagtacgttggctagcatgccaatgtaccaaatgtcccttttccgtttgcccaagttagttgcaaagaggttagaaaaattacaaagagactttctttggggagggggaaatcaggaaaggaaagtccacttagtgaagtgggaggtggtttgtgctgataaggagaaaggggggctaggtgtaaggaagctagccatcctgaataaagtcctccttggtaaatggatttggagatttgcttgtgacaaggaaaatctttggaagcaggtgcttttggctaaatatgggcaagagggccttgggtggaggacaaagaagagttatggggtgtttggagtaggggtttggaaggagatcctgaaggaaagtgcttggtgctgggagaacatgacgttcttagctggaaagggcaataaaatcagattctggtctgatcagtggtgtggctgtccggtgctgtcccaaagattcccccacctttatgccatggctgtccagaggaatgctacggtggaggagatgtgggaccagaattgtggccaaagaggatggaatttaaggtttatcagggattttaatgattgggaattggatatgctaggtaatttgctgcatgatttaaggggcagcaaaacttctttggaggaagattctgttctttggaagggagaaagaaacggtcactttagagccaaggcagtgtacagccttttggccaatcctttggcatccgatttcccaaaaaacagtatttgggtggaaagtgttccaactaaattagctttttttgcttgggaggccacttgggggaaggtgctcactctagataggcttcagagaagagggtgacagctccctaattgctgttttttgtgcagtagcgaagaggaatctgtagatcatttgctaatacactgtatagtggtcaaggttctgtgggatcttgtcctagctttgtttggtgtacattgggtttttccagaaactgtaaagaaggtcttactgagctggaggggcctttttgtggggaagaaaaggaaaaagatttggaagtctattccgttgtacattttttggacagtttggaaggagagaaataggctagcctttagagggggtatgttagcaatccagaagcttaaaaactcctttatatgtaatttatggtgctgggctagaatgtatattgttggggagccgctttccatcctaggcttcttggagtggttagctgctaggtaaggggtggtaagggtttccttgctcttttttttgtttttgttgtgaggccttgttgccttgtataccccctgtatgcttcttggcttctttgcctcttctaatatactctgtgcttatttatcaaaaaaaaaaaaaaattgaaatgggatgttttgtgcatcttctggttccttttctcatggttacaggaatgtccaaatcacacttctttatgttcaaaccaggttccgcgtcagattcttgacagtgggttttttttccagattttcctcctttgaattctttttctgtgcataggtcagcagctctggttgtgtgtgcaaaataaaatcccccctgtttcagatagctccttgttttgaggatcaggattttttatcttcttggatataggctgaggaattttctatggagtaaaggaatttaaatttgccaagttaaatggaaagagattcggctgatcaaaattcggtggagattcagccccaaggaagaggattttttttaattggattctgggaaggctgggacggatttggtggagcagcaatatcaggtggatttgatgaggaattcaaatttatttctagaggaagatttggaatttgaattgctactagattaggtgtgaatcttggctctgaaaaatctgatggaggatttggaggatttgaaggattcagatttagcaccaaatgtggagactctacaaaattcaaattttgaactgtgggaagtgaaattttttctggattaggtgcagcagaaagaaagaaatcaggagaaatattccaaaaatattcccacagttttagatttgactttaaattgtcaggatttgtttcccaaaaaatatcttcacacacactctcctcctaaacagatttttttgaacaaaatggctgatcttcaagaaacataacatccataggagtgaaatattttcttttctcagaagaataatacttataccctttctaagtggctgaatatcctaagaaaatacatttaggagaacgaggacctagtttgctacgattttgatcatgattatgaacaaatgcaaaacaaccgaaagtttccaaatccagggtagaaaacgcatgtgattttggataagactcaagaagacgatttaatggggtttgataatttaaaacatgatttcgcatctgattaatcaaataccaagtagttaaaatagcatccgcccaaaaatattttgaaacatttgtagtaaacactaacacctgagccatctctaatacatgacgattttttcttttagaaatctcattttgctgtggagtattgacacaagaactttgatgaatcatctcactttcaataaaaaaattcacctaacactgtgttgaagtattcaattcaattatccgtgcaaaaaactcaaatatgcttattataccgagttctaatcatagactgaaatttttgaaaaacttgtgacgttttagatttttcttttagaagatatacccaatagacacatgtatgatcatttataatgtcataaaccaccttttatttgtgagactttgaatacgagagggaccccagatgtcactatagattagcatgaatggttcaaaagcacgatatgaaatactaggaaaagaaacacgtttgtgttttgctaactggcaattttcacattgaaaggaatcatgagttcgaaacaacagtggaaacaaatactttatactaaaaacttggatgtcctaattgacgatctaaccttattatttcttgttctcttggggaagaattgcacacagcggtttgaacttgactacacacggaaatgtcttcttgaagtagtataacccttcgaattccttagcactatcaatcgtcctccccaaaatctggtcctgaaacacatagatggaaggagaaaaattaaccacgcaatttaaatctttcataattttacttatagaaagaagatttcatgataatttagggacatgtaaaattgctttcattgttatgatatgacttatttcaatagtgctgattcccacaaccaccgaatagggacccattggcaatctcaactctgtggttccctaggctaggaacatatgaagtgaagagctttttgcatctggtcatgtgatctgtagcctaggagtcaataatccatggttctccttttcctatcataccactgaaagcagtcagagttacacctttctgaactatttgggaaccagcagtgaattgttgcacagagaggtatttgcagagttgctccatttgctctttagagagtgtcattgtcattccaggattagttttctctgcctcgggttcatgcacaagttggagtcctatggcatcttgtcctctagctctacttggggtccaatttgctggttttccatgcaatttccagcaattctctttagtatgatgtggtttctggcaatggtcacaccagagttggccagtttggtttccatgtgagtcagaaactctcaccacgaaggcagaatttttgcttagtggagaagatgagtatccaagcatcaccttctttcgatactcttctcagcgaacttcagaaaaaacttcttcaatttgtggtagtggctttggccctgtccttcatccaaatctttcttgagtccagcgagaaaatcatagatcctatctttatctgccattttcctatacataaggtcatagatctttccaattgcaatgttgaaaaaagatctagctcctaccataattttgtcaaaagttgttaaaatattgggtaacctcttgttctatttcgtagtttgaacatctaagaggaattttccaaatctgagtatgttgttgtaaccaaggaggaaagacatttggtgcaggaacacccccctttgtgaggcttttccttccttgtttgatttagcgggttctaaagatgcgtgggttgcggactattgggacccaatgggggaagtgggagggtggactccacttttccttagacctttcaacgattgggaggtggaggaggtggagagactcctatcgtccattcaagataagaggttggatgctgatggggaggataggatgctgtggaaagggacgaaaaatgagattttcactgtaaaatctctttacaagtctcttgatcatagttgtgcagtctcgtttccgggcaaaattatttggagtccgtatgttccttcaaaggtgagtttttttgcttgggaagcttcttgggaaaaggttcttactcaagatcagctcaagaggaggggttggattctagccaatagatgttgcttgtgttgcgctgaagaggaatcaataaatcatatccttgttcattgttctaagacgaagattttgtgggatcttgtgttttctctttttggggtcaattgggtgttgccgttttcggtaaaagacactcttttaagttggtatgtctcttttaaggacaagaatcatagaaaggtttagcggacagctcctctctgtttattttggacagtttggaaggaaagaaatagaatagtcttcgataacgaggttttgtcgactcaaagattgaaaaactcttttgtgtgtaatctcttatccggggctaattcttctatagttgtaggccctttatctttatttaactttgtggattggttgggttcttgttgagggccggtgagtgcttgtgtttttgttgcttgttttaggtgtctcttgtatactccctgtatgctttgggttgcctttcaagctccctttctctaatatatctttgtgcttttgcctatcaaaaaaaaaaaaagaggaaaatgtcgggatatatcggcgatatattgtgtatcgggagacatcaacacgatattttctagagaaaaatcgctgaaaatcggcaaaaatcgtcgatatatcggcatcaggtgataaatcgccaatataattgaaaaaaagggccaaaaatgaagaaaatcggcgatttttcggccagtcaacgcgctacagtgctcccgctacagtaagctacagtgcacccactatagtgcactctctcaaaaatgcatcttttttgtgtcgttgaagggattcgaaccccaaacaaaaagttttgggtttagctcatcagatcaccagggcaagcttgccctttgttaaatgtattgcacttaaaatatatattcaaagtcatcatgtaaagaaaattttaaaagaaaattttaaagagcaaattaattataattattttataattaaatacaaaaatttctttttattgattaccaaatatataaaaattatcataataattttcttcatagtgtttttaatatcattaataaattaattaaatattaaaaaattgtacatatatcataatttattttatatcatttaattcaattgaattaaatggatcataattttaatattaatacatatttttaaattagacatattataatcaaatatcataatattattatgaaataatatttgatataatttaataataaatgtacacttataaaattcatatttttatcgatgcatataatattattatcaaatatgataaatcatattatacatatatcaaattctttaataaaacaactttaaaatatctattatacttctaattacatttttatgaagtttttcttgtatttttataaattttgatcaattttaggcttatcaatatttttttccaaaatatccgccgatatatcttcaatatatccgtaaaatcaaagtaccgatatatccatgattaccaatattttcatctttagttgtaactgcatcccaaattcccttagccataggaaaaagtaaatatgcgtctccaattttgtcttccatggaatggatcagtcatgccattaccatggaattttgcgcatcccagtttgaaaacgagggatcatcctgctcggtttagtgatggtatcttccaaatagcccattctcccttttaccatgaatcaccattttaacggatttagaccattgaagaaaatttttcccatttagcttatgagtcgtgatctgaagagaggtattttcagagaaagcagtgagggcaattgtaggggttgactgagaagtgcctgaggcaacctcagagccattgcccctgcttgctccagtcatggccattttaaccattgttcccctcaacttaatgctacctaaccttgctttgataccaaaaaatgaacacaaggaaacaataaaacactgctggaaagaacctgagtaattcaattaatcaagctaaaggattatatctcacatccttatatgctggacttcctttattctagagaaaacaaacttagctaaaaaacaggaaaggaaatagcaacctaactaattcagctaacattatacagacaataataagcagaataaaactgatttttctacgtaaattagttttcaggggaaaaaagcaaccaggctaatgtatatgtcagccttttttgtggaaggaatttgcaaggaagaaagatgatggaatgttgttagagtgggaactgatcactgtcttccccattatgtgctgacgtatttggggttctttacagtttgacatcaagtgatggtgttattcctactttcatccccttccctcctctttactctttgtttgtgcatagaaattgccttttatgcattggttcattcaagagtgacttgtttacattacttttactttaatccattttatgctgataaatcgatactcttttagtttttcaaggtggtcaataaggccctgattttaacctgtggtttttatccccttgggttttttcatttccatattatcttcctagggtgtgcacaaggatttttgtatgatcatttttgtatgagttggtcacttcaaacttcacatggtatatctattgttgaacaacaccaggagtaactcatttcttgttatatcctgaatatctgcagtgcatattcgatcttca

SEQ ID NO: 12991 - DNA, 1962 bp, Vitis vinifera
  Intron number 5 from transcript GSVIVT01024029001 (locus G SVIVG01024029001) derived from phytozome v7.0 (chr-ID chr3 ; pos 1657558 to 1659519)
cggtgttccaataattcttgtcgggacaaagcttggttagattctcctaatccaatttttttaagtgctattaatttttttttttcaattaccagaacaagtgagctacaaatgtaatgtttataatttttctctttatggaattgtaggttagattgtatgttcagttgcctgttattttgtaccataatgtgccctgatctggatttacgtattttcaagtaaactttacaagttttaagtaactgtaaaaattacaaatccacaagtaatttcaaattttgctaaccataatacaattaaaagttaccagaattttctaggttgtaaactttaattttttaatttttaatttctctatacactagatgtttctgattttgtgcaggaacctttatttggagtctaaaaaaataccttatcacctatttatattattaactaagattacaaaaattcccaaataagtaatacccaataattcttcatagaaacataacaaaataaaataaaatctgacattttggatctttggatatttttccactgaaaatataggagcatttatgatacagcccttatattccaaatataacatttccaacagtgtatttagccttttctttggcattgttggagagttatgaaaaccgggaagaatcaaacaattatcattgatggaaatgttaataattaatgcaataggaagctgctctgaggactgtgaggaaactaatggaatgtttgtctatcattatagaagtgtgcaactaaatgttttcttcttgaaaattttcctagattatgatgtttgtattatttactgtatgggatcagcatcagatgacttgaatggttgaatatgttgttaaagtaataagaatggtggtaaacaaccttctgagggtttatgtaagttgtccaagcatttcagaaatgctctttctcataacaaaatgttgagtttccactgtgttttaacagcacttcataataatttatgttgaatttcaaaggtataaagttgttcaattgtttatgaaatttcacaataattgatgaagggggatcatataatttcaaaggtataattgaagaggattttcaaatttatctttcaaggtttcttttacttgtctaaattttatcaattctgaatcagtaccataattgacatcatttatgctggctggtccttggtaattatcattcatgttccactagcatgttattatgcttgttaatttattttactcatgtaccttttggaatagaaatcataacccctgtttggaaactgttcttgaaaacatttttatgttcttaaaacaaaaaatagttttttaatttagaaaacatgtttggtaaacttttgatggaaacagttttttgagaatttgttctaaaaacgggctgttttttggaacaacttttaggtgattttagttgtttttttgtaaaatgttttgagcaacaattgaaaatatggagaatacttcgaaaacttctgcattatttgtaagtgtatcgtactttcatcgaggatgagtagaaaaaactgtttttcatatttgaattctcaaaacagaattttgttcttgaaaacaagtaagaactgttctcaaaatttgttttttaagaactattttcaaaaacatttccaaacatagccatagtttctcttcatatgaactttggaggttttgctacaatttcttggttctcccttgtattttaacttttttctgttttagagacaccaataggaagccctctttattttgaagtatgttgaaaacagacctgcttccttttattgtcattgttttttgtactagttatagaatatctcagagatgctttttgtgtttacaatattctagaactataaatgtgatccctttcccttttcaacaagccttcaatgctaattacttgcaaatttgcttgtagatcttcgag

SEQ ID NO: 12992 - DNA, 8760 bp, Vitis vinifera
  Intron number 10 from transcript GSVIVT01021670001 (locus GSVIVG01021670001) derived from phytozome v7.0 (chr-ID chr 10; pos 9041320 to 9050079)
ggtttgatataggcacttgcttagaggtattgttgcccccttcacaaccctgaggttccataatcttgctaattgatccttaaataatgcacctaatggttttttgagttctttttttaattgtcatttttagcttacatcttgatctatagtaattttacaaagtgattctcccccttccctcttgtccttttctcatcctcctaactttatttattagaattttatgaggtacaatacaaggtttgtggggtgtttgcgttgcatttgcagttgtgaaactgaaaatgaccatgctgcagccagtagatattatttggtgtgcagacatagaagtaaactattgataagatgtctaccattggtgtcatgcatcagattttatcctgatgccaaatttaggtgtacatgagtacattgaatgaaaaatgacagcatttataaacattaaagatggatgttaaataatcaaaagtttgcgtatttactagaaaagtacaaatgaaatggagcagaaggctattcagtgtaaaaacttactagtgtcaatcattcttatcacagttggaagtgcaagccagaagtgcaagccagaaaagatatggggaacagaggtggcaagtgcaatttataagatctatggggaatttgaatcagaaagatgatctaggatcaaatgagaaactaaaatttttttatatggaaatgcagtgcctaaagcaagggcacacaacccaattacattcatgaaaccttcatgatgaagacaacccagaaaatggatctaagaaaaattaacttatagcacgtctataaagtaattactatggattcaggtctcttatttataaaatcagccccacaatacaaatattttcagtgtaaggccttaagcactggggagctccttctcctcaaaagtttgcccgcctccaaatgttccaaagttattgtgaaggctgcactccgaacaggtttatccctgcaaacctcctgcaacactgaaataagctttctaacgtcctagtctcagatcaacaggtgagtcccaaatgaagcaaatatcagggctaaaagcgcctttatggccctaaaatttcaataagagatgattggccaactcttcacccttgcatatgcagcactaaccaggaagaatcttgttcctgtaaccagttaatggtaccctgataatttgtccagcaaagaaaacaacctttaacagaaaaatagagaacctcgctcctttcctatggagatgaccgtctttataccctatcaaagcttgtaatatacacactgaaagcagccctcctctccatctaatagtatctttatcctcctttaaatctgagccccatgaacatggtatctgagaaagcacctgttctctctgtcttccaatcctgaagacattgtaaatctaggattctgcactcctccgcatcccaacatagaatatcttgtcacagtatgttggcagatttggtgcagtaaattaggcgattggtgaaacagattgggagagataggagagatttttgaaattgtttcctctaatttttaaatatagcagttcctatttttagtctaatacttagtctaaattacctgtgtatatagaattcctctatagtaagtgttgtaaataaataggattgtaaactctgaatatattttagatagaaaatataaagcaaatgtttttctcattagctcttcagccatggtatcagagcatcccttccagggaccatttttttttttttttttgtttgctggttcttcaaatcaacaatatttgtttattctggttgattgcaagatacgtagaagactattcttctattgttcttcaattgttttttggcaaattagttgtgtgtaatcgtgtctggaatttctaatgaggagttctttggtgactcattgaagaaaacttctacctagaacacgcagatcgtattgtcaggttctagagacaatctgactttgcaaataactactcatagattgaatggacataacttcttaagttggtctcagtctgtgaagttgctcattagaggaaagggaaagattagctatctaattggtgcaacaaaggctccaagaagagatgatccaacctattctatctgggatgcagagaacttaatgatcatgtcttggcttgtcaactctatggaaccataaattgatcaaatgtacatgtttctcactactgcaaaaaaaatatgggaggtagtaggtgggacatattctgatttaggaaattcaacgtggatgtaagaaatcaaaacaaagattcatgagactaagcaaggtgatcaaactgttacaaagtattataactctctcaaggggttatggaaagaacatgatctcttttatgagtttgagtgggcatgtgtcatggatagtaccttattcaagaagatgttagaaaaggatcgagtgtttgaatttctggtgagactcaatgcagatttggatgaggtaagaggccgtattttaggcaaggaaccattaacttccactagagaagtattcttggaggttagaagaggagagagcaggaagatggggatgatgggaaagaatccagttggtgtctcatctaagaaccctgccttgaacaccatgactatagaaactgcagctgctataaccaataaaaaaatgcagcaaaaggttgaagacaacgacaacatttggtgtgatttttgcaataagcctcaacatacaaagggtacttgttagaaattacatggctaaccagcaaactagaaaggtggctgatttggagacaaaacatggtgaggactgaggaatgcaagctgcaacagagatgcaattttctggacctgagacatctgcctttagcaaagagcacctggaacatctctacaagttgctgcatcaaaccaaaccctctcaaactctaattccaacttgttctcttgctctaagtgccctcaccactttaaagaactctacatcatggatccttgttcaggccatttaaaagttagaattgctgatggtagtttgtcacctattgctggaaaagggttcatagtcctctcaaaggatattactttaaattctgttctgcatgttcctaaactttcatgttgtctattgtttgttagtaaaatccctaaagattccaatgtgaaagttgtcaattgtccaaacatcattgtgtctattttccttctcaaccctatcaagcatctagcctttttctttaatacatagtgatgtgtggggtccatctcgtgtgacaaatgttattggaactaggtggtttatcaattttttttttaccatactagagtgtgataggtatacctatgaaaagaaaagtccgaggctaagagagtgttgatagaattctattctatgaaaaccaatttcaaatcaaaatccaaagttattttccatcaattcacttggtttgataccctgcaacaacacgatatccctaagaggaaaaatcgacatcttctttaagttgcaagggtagtaatgttcaacatgttggttcctgaatatttatggggtaaaattgttcttacaacttcatatttgattaataggatgtcaactcgggacttaaagttcaaaactccttgaaacagtttgttcaaagtcttttatcatattcgaatcttcatctcactgcctcttagtgtttttggttgtgtggcttttgtccatattcataaacaaaatcaatcaaaacttgatctaagggctgaaaaatgtgtgttcttggatattctcctagacaaaaagggtaaagttctataatcctatctttgaattcttttttttttttttgttagtatggatgtcacattctttgaaaaccaaccatactttaccaaaaatactcttcatggggagaataatgagagggaagaccatttttggaaagtctcagctattttacctttacctacctcttctttgttgaatccctcttgatttgatcctaattctattagtctgagtattatagactatgaaaaatcactgagaaggggagaaacactatcaagaaaaaccccaaagtgaacttcatgtttactctaggagaaagagcatcaaccaactaaaccatgccaagaaacttctccggataaaggcaattggaatgaaacaagtaattcgatccctaatttggtttgattcccaagtctattagtaagagaatttcctttgatcttgatattcccattgcacttaggaaagatactcattcttgcacaatgcatctgataggcctcccatatgttatgtgtatactagaaaagggaagaggaatgtactgccacctggcagttagttgtaacagccttagcataggctaggtcacaatctggatacaggctgggagggtttaaaataggaaaaaggagggaattacagggttggatattgtgtggatctggtaggagagtgatagcctctcgaatagctatctgagtatcaattaggtctcttgtttcttgaaattcttgaaattcaataataaaatctccattagatacctatcagcatcctattgcgaaatgtgtcttatcatagactattgcccacatagagcttttaccactaatctctcaagtgtttctattcctagaaccatataggaagccttgaaccatgctaaatcgaatgcaacaattttggaagagatgcagactcttgaaaaaaataaaactcgggagattgtttattttcctcgagaaaaaaagacaatgggatggaaatgagtattcatagtaaagtacaagtcggatgggaatattgaaagatgtaaagcaagatttgttgctaaggggttcacacaaacatatgaaatagattatcaaaagacctttgctcccgtggcaaagatgaattccatacgagttcttctctcacttgttgtaaatctgaattggtcattgcaacaagtggatgtgaaaaaagcttttttggatggtgagttgaaggaggaagtttttatggacttgccactggggtttgaaaaagtttatgaagatggaaaagtttgcagattgaaacagtttatgagcgcactatgagttgaaacagtctcctagagcatggattgattgatttacaagagttgttaaaggtcaaggatatctttaaagttaggctcatcatacaatgtttttcaaacactttggtaatggagagatggccattctcatcgtgtggcatttatcttaattggagatgatgtgaatatcgaagtcatttctcgcatgagaatttgaaattaaagatctcggggttttaaagcacttcttaggaatcaaatttgaaaaatctaagaaagaaatatttgtcacacaaaggaaatatgtgctaaacctactctcagaaactggtttagatggctgcaaactagtggagactccaatggaatcaaatgcgaaactagaagcatcaggagtagaaagagtgggaaatcgagagcaataccaaaggctagttggaaagctaatttatcttttgcatacttgaccaaacatagcttttttagatagtatagtgagtcaattcatgcactcaccaggagacaaacacttgaagcagtctaatggatctcaaatatctaaaagggacactggggagcggattactgtttaaggatcatggccattggcaaattgaagcgtacaaggatgctgactaggcaggtagtgtaacagatagaagaaccatttcagggtactgcacttctattggaggtaacttagcttgagaagtgaaatccaaattggaagcaaggatagtgctgaggcgaagttttgagttaactgcttatggaatttgtgagttactatggctaaaatacctacttaaagacttgaaaattcccaatccattgcctgtgaagctctactgtgacaacaaagtggctattaatatagctcataatctagtacagcatgacaaaaccaaatatgtggaggttgatcgacattttattaaagagaaattggaaaacagattgatctgcatgccttacattccaaccaaaaaaacaactgactgatgttcttaccaagggattgttgaaaccgtgatttggtaatcttacatgcaattttggaatgcaagatgtttttgagccaacatgagggggagcagatttggtgcagtaaattaggggatttgtgcaataaattagaagagattgcaacagtttaagagaggtgggagagatttttgaaattatctcttataatttttaaatatagcatttcctattttttacggtaatccttaggctaaattacctatgtacatgaaattcctttatagtaagtgtcgtaaatgaataggactgtaaatgttgaaagtattatatatggaaaatacagagaaattatttttccctttggctcttcaacacaataacttccttgttttttgaatgaacaacataaatcaggattcatgtacagtttctcccatctcttagcatcaatgctaacaatgttgaaggcctccaatctcttgaaaaccaaacccgcgctttattaagtatatacttaatttaaatgaaccaaatggcaaacctgactcctgagtgaagggttttacttgtttctcaacctcatttggcctttagtctgccttttattagattaacttctccccttttgatgggtactgttacttccaatgtgctcaccttctgccaattctttaaactaccacattatacaccatctagctttggaagacaagcttaattgttgtagataagatgttggaaaagggcatcctggttgctcatatccaatatttacctatatcccatttcttgtgtaggcctgagcatccagtgttcctcccattctagtccatcattaggaggaaagatgccctgacaatttaggacctgcatcacttgggatccgcttctccctaactgagaattgtagattgtcttagatagttgtgtgactattgtcacgcccacaataccctctatgttatttatttatttttatttttatttcggtcaatgagtgaccctgagtgtaaaattatccaggcctcgtccaagaacatttaggcaataatggatgaatacaacacatgcaatagttattggaaagaagacacccaacttgtgttattaactcagcaaatacaagatgcaaaattgaagtggttcaagacttagcctttcacagacaatatccccctttctctatatctttgatgaattacataggttatatggtatctctggtgcaatctcccaaacataactccccatttgaaatcaaccagtgaggatcttacagcaccctctattgattgtgggagttgggacagttatctaactcgcataactacccaactatgtaacaaccaacccttagtcttatgccatgcacccaaatgatcccttgctgcttcttgtctgagtcaattgcctaccaattcgtgtctcttctcaacaggtgcaatgcatgagatgacgcaactgcctagcatgtgcatgccaaaaaactcgtgtttttttttttcttgataagtaaaaaaagaattgtatttctaagaggcgctaaaatagtgactcaagatgtacagaagaaagggaaatactcatccccttacaagtaaaacaaaaaactgtccataaagatgtacacaaaaacccctccctcaatgggaaccaacccaatcaatgaactcaacaaaggtggagagaccatcttttataaacaaattagtctttgacctaagtgagttaagaaaagaagttttcagcctgtggatggacaacacctcatcttcaaaggcgattctattcttagtcttccaaacagtccaaaaaatgcaaagaggagccgctctccaaataagcttgtgcttctttccctcaaaggaaccagtccaacccaatagggtttccctaactgacgatgggaacacccaagacactccaaaaagggtgaaaagcatctctcacaatgcgcttgtcttttcacaatgaagaaggaggtggtcaatggattcctcttccactcgacaaaaataacatctatttgctaagacccatctcaaatgttaaaactttaccccaagtatgcttaaactcttagcatgctgtcaagccaagttttttccaccctaatctactgtaattcaatcctggggattcttgtctggtttcatacttgtttaacttatagcaaattttaaaatatatggtccaaatcttagctaatatttgaatcatgtgattaagctatagaagaagactcatgactttgaaatggttctgttatctaaaaattattctagaatcatgctaaagttttagagttgagatatactacatccagataatggggcaatttgctaggatctgctatttgattgggcccttgttaatctaagatttctgaaggaaactacatagtttgttgccttgggtctcgtgggtttgacattaccataatggaatgaaaatggtggtgcacggtggggatgatccaatctgctggattctcatatagaggatcattggtcgtacaaaccacttcatgttaaatctttaacatgaaattttgtatcttaatctgtggttatacttgtttgaaaaaatattttgcctatcagaatatctgtagttctactgtttgtattgagatttgcttaactgctttcactagctgacattaataagaattacaggttatcgagcat

SEQ ID NO: 12993 - DNA, 6756 bp, Vitis vinifera
  Intron number 3 from transcript GSVIVT01020868001 (locus G SVIVG01020868001) derived from phytozome v7.0 (chr-ID chr1 2; pos 776417 to 783172)
gatcaatcaggtatgcctcatttttctaactattggttttatgatgaaattggcatgttcattcaaattttacattcttacgcagtggttgcaaccaataaaaagctactacctacaactggggcttagaaccgaagattcaacatcagcttgttaatcaaacttttataaattttacgcggaaataattattttaaaaaacaattttggatgtataaaacaaaataaatataagtactaaaataattatcatattcttatcttgatccatgataccaataacattttttaagttagattgagtcaccttatgaattgtattgtcaaggtggataggtcacttgtgtgatgtatgttgttaaaaataaaacaacaaaatgacataagaatgagaatgtggtttgggaccttaatttataaaaagttgtatatctcgtagtcttcccatcaaagactatatgagagttatactcattatttacattcattatatacaaattaatgggttattaatttgaatacatctctataattgcataggttatactttttccttttcctctattactcataaacataatgtacaaaataaatttcataatgatggggttacaaaaattgtaacacgacattcatataaattaaattttttaactcctcatttataatttgattatttcatacataagactcttggatgcccaatcaattgattcacctacctatcaattgataccattaaataataattatatatggctacacattataggaaaaacgctgacacaactaacaacatagatacaaaaactaatatcagacaacatgggtaacatggcatagattataaaacaaaattttgcaaagtaattatcaagcttttaaataggatagaaagaaattgatgttgttgctactattgatttaaaattggaactatcatgtacaaaaacacaagcaagttataatgatggatggaatatgtatgggggtgaatatggaagctaggaaccatgctagaatcgcatacatcaaatcctgcccatgacaagcccaccgtatctcaaaattgtgagtgagcatatatgggactgagataaaagagaaagtgaacaatataatgatcaactaatgagtgtcaggagaactattcaagcaaacccaaggatgcaaagaaaattacatgtgggatccccagacatcatttcctagtggaattcgggcaaaaatttaaaatattgaggatcaatataagaaagatccatattgacccaatgatatttcaaacgaagtctaagactgaatggtcttcgctcattaaagtgtttgagaacaactttaaaagagtagaaacgctaactgtgaaggaaaattttcaactatattgatatgggatcaaatgagatatcatgagtggtatttatggggctagaagtctaatgtcaaacagtcctggctcattagtgtttaagaacaacttttaaaaagtagacatgctaactgtggaagaaaagttttaagaatattgatatgggatcaaatgagatatcctaagtgacgtttatggtgcatgctatacaatgggagagtggtccagatttaggcacaaagcaaaaatctttagaacacaagtttggtttcatggcagggacattgatgaagtttgagaatttctcaataatgtattactattctgtttgaaaaatattacatttttacaagagattgtatgagaaaataaatacatgttaacaagggctattctaagtaagtttcctagaattaaggctatcgattacaaggaaaataaaggttgttacatccttgaatgaagactaaaaatctgcagtcatttttgttgcttgatttgagggattttcttgatttgaggatacttcctttatacgcccccgcaagatggagctgccatcggctaagccaatcttgtcccttaaaatttatgtcctttagcgagagaggccttttgtgagaaaatcaacaagctggtcctgagtgttaacatgatgaacatttagaacgccactttgaaccatatcttggaaaaaatgaaggtcaatctgaatgtgtttcattcgagagtgttagactggattaaaactgaggtgagttgcacccaaattatcacagagcagcttgggttgtccagataaaggcagacctagttccttgaataatgaaagaagccatgatgtctcggaggctgcattggcaaaggctctatattagacttcagtggatgaacgtgtcactgccctttgcttctttgaactccaggagataggattgacaccaataaatgagatatatgcggaggtgggggtctgatcatcatagttgcccgcccaatccacatcagaatatgtaatgagttcaaagctggatttttttatttttttttttatgtgaagtatatgaaatatagtgtgctttaaatagcgaagaaatcgctttgtagctgtcaaatgtgtcaccataggcttatgcataaactgagaaagtttatttacagagaatgagatatctggtctagtgagggacaggtattgaagagcaccaatgacacttcgaaactctatactattggtagatgaagtaccatcaaccaatttgaggaacatggtggtggacaatggggttgagacatctttagcaccaatcatattggttttagacaataggtctcgaatatatttatgttgagacaaaaaaaacccagattttgtagaaataacctccattcacaagaaaaagttgggttgtcccatgtcctttaaggaaagctgattaccaagttgtgcaacaatctcagacacaaagcacaaattattgccagtgataaccaaatcatccacatatactaataaatagtgtatgacaaagttctggcgaaagataaaaaaagatgagtcagctttggaatttgaaaaccaagacccataagtgccagtttaagagctgaataccaagctcttagggcctatttaaggccatagatagccttacgtaacctacacacatgatttggcttgttgacatctttgaatcctagtggttgtgtcatatacacagtctcagtcaagtcaccatgcaaaaaagcgttgttaacatctaactgtcttaatgaccacctctacattatagccactgtcaagacagtcctaatggttgcaggttttacaactaggctgaaggtttctttgtaatctaacccttctcgttgattaaatcctttagcaacaagcctcgctttgaatcggtcaactgaaccattcgagtttcgttacacacggaatacccatttgcacccaacaggattacaatttttgggcagggaaataagatcccaagtgccatgacgtatgagagcagtaagctcatctgacatagcatgtccctagtgaggttcacgaagtgtttggcccacacatgttggttcaatggttggtgggagcgggtgtttggtcacggagttgaactgtttggccttatgaatgttattcattgatcgagtggtcatggtgtggatgcggtgagaaggaggcagtggagggtcactgtgatggtcatcatgagcaaccatgggttttgagagtagattagtgttcatgtgattgagaggaattagggtatgaatttagggattgcatatctcgaaaaggaaaagaagaggagttgaggcagttacctggagatgaggcaaaaatggtgttacctctcgttggcactagcggtggttgcggcaaaagtgtgagcggcacaggtggcgcaggcgaaatggacatggttagaacctgtgtatcgactgaacaaaggagatgatgggtttgactttcatcaaacagaacgtgcctagataaatatagtttatgggcttgtgggtcaagacatttatacgcattctgggttggggaatagcccataaacaaacatggtgttgccttgggctgcaatttatatgtgttataaggcttggtgaaaggaaaacatagacactcgaatttttttagtttaagatagtcggggggctgatgaaataatgcttcaaaaggggatttgttatgtaggagaggggttggttgtctgttgataaggtaagtagttgttaaaaaggcatgaggccaatatgagagagataaagaagcatcatgtaaaagggtaagacccatttctaccaaatgacgatgacgacgcttggatacaccattttgttgtggtgtgtgaggagttgtggtgtaatgacttatgccatgtatagaaaaatatttttttaaggcaacaaattcaccaccgttattcgagtagatacttttgatttttgattgaaatcgattttcaacgagatgtttaaattgaggaaatatcatgcttacttgagatttggtttccattggataaaaccaaatatactttgtaaaatggtcaaccaaaatcaaataatattgtgatccatcaataccaattatatttgagggaccccaaacatcagtataaattaaatcaagaggtgcataactttgaaggctattgatccaaaatggttgtttgtgcgctttagtaatagaataagaggtacaaagatgagaactatgttcttcttgtattattggaaaagaaaaattcttaacaaagtgatgaattattttttgagagggatgtccaagatggttgtgccacccattgattgatgtccgttcatgcacatcagcaaccatttttggagaagcttgcaccagtaaatttgggagagtgtaaacgtcattttcacacgcacctttgagtagaaccgcccccgtgatcttgtccttaacaaggaaaaacaagggatgaaattcaacaaaaacattgttttgtgaggtgaagtaatggacagaaatgagatttttgtgaatattaggaacacaaagagtatcatttaaatgaaaagtgcatgtgggtgatttgagaaccaatgagccaacgtgcgagacatgcatacctgaactgtcacctatgacaccttcatcaatgtcgtcgtactcaaagtgaataaataaattggctaaatcactagtaatgttgtgtgaagttccataatcaataagccattttgggtttgttgcaggtgaagtggcaacataattggtagtgggctcaacaaagcgcagacgtggacaatgtttagcaatgtggcccagttcatcacagatttggcactttggagtgtatttgcgctgcccattggatttcttggaattatttgggcctccagatggccgataagagccctgattggaatcttggtgtgagaaacccccatttcaaccatacccatttttaaagttacctttagagtgttggtcgtcggatgaagaagtaggacgccgattggagtagttggccaacgcaaccagttgatgtgtggtggtttcaaggtgttagaggtagacatcatggcctacaagcagatcatgcaattcctcgaacacaagtggtttttcccttgctcgtataggtaccgcgatttctcgaaaatcactacccagtccattgagaattacaaggtgagatcatcatctgtaatgggatgatcgatgagagagatttcatcagcaagagccttgacaatgtgcaggtattcttgaactgtctgattctctttcttaatcattgtgagttcctccttcaattgcatggcccgagtacgagatttgctcgcatatatggtatgcaatttttgttatgctgttgtgatgtttgtgcagaggaaatgaatggggtgattgtggaggtggtggatgccaaaatggcactgaggataagtttatcttgtcttatccagtgggttttctatggattggtagtgaatgaatcacttggagaaggaggaggattgtcacctgtgacataatcaagtagattgtagccaattagaagggcttcaaactgggcacgccattgagggaagattaatggtgtgagtttttcatttatttgagtagagatgttgagagcaatgagagaaatattagttgggaatgatggagtggaaatcaggtggtgggtgttttcaaagttggggattgagttctcgtgagaggaaggctactctaataccatgatgaagtttgagaatttctcaataatgtattactactctgtttgaaaaatattacacttttacaagagattgtatgagaaaataaatacacgttaataagggctattctaagtaagttttccagaattaaggctatcggttacaaggaaaataaaggttgttacatccttgaatgaaggctaaaaatctgtagtcatttttgttgcttgatttgagggattttcttaatttgaggatgcttccgttatagacatcagatatgaaatgataagtggtcttcattgactatcaaaaggcatattgtggactgcttaggaaatctactatcgggatccaaaaagaaaagagtcctaacacaatataactaacaacctcaaggacctttctagtatcttattgaccattgcaagggcagatgggaagaaaggagagagaattcagtcataacagcataagattagagacatttacaatttataattttactagtaaaaaagtgaaaactaaaagggatgaaaagacaatagaaaacaaatttattcatattgttcattattttcttgaaacttttttaacattgatttgaatattccactgttgcagcaaatctgagcttgtcatatacaagctaaaggaga

SEQ ID NO: 12994 - DNA, 1036 bp, Vitis vinifera
  Intron number 9 from transcript GSVIVT01029533001 (locus G SVIVG01029533001) derived from phytozome v7.0 (chr-ID chr9 ; pos 21886445 to 21887480 reverse strand)
aaagctgttcttggtcttaggcctttgctacataagtaattttctctatcctcttttatttttatttttattaactttacttgattttcttatgatattccttagaattatgtttggttgtcaggaaagtacactaaaagatactatgaaaaaatgtatatatatatatatatatatatatatagatatatatatatatatatatatataagaaaagatattggtgttgaacttttgattttcccacgctcacattcatgttaaacttcgatacctattaaactatcaatttttctaaatgcttatacttgcaggaaaattagtagtttaagccttaaaaattttcaaatatttttaagcctgtaatattgaacaaattagcttaacttgtttagattttaaattggaaaaagtggatagcctttttagacttttttttttaaaagaaaaaaaaattgttaaaagcctaagtttaattgtgaaaaacctaacttttaactttgataatggttttagattaaagcaaaacataatataattctattatttgcttcgtatctatacaagacatagtcgattggaaatatattaattttgccaaatcttaaagtccatgcttgattcgcggaaaaattgaaagaaaatattaaaaaagcaaatagaaagaaaaataaagaataaaataaaaagtaaaaaaaatgacttaaagtctataaattattttgtatacttctttaaactcatttcactttttttttcttttatataaagattaaatattttgaaagtacataaatttataactaattttaattatttttatttttattttcaataaaccatatgagataaaatcattttctttaatattcatttttttcttttagttcatactttatgagaatcaaacatattcttagaggtaataccttgagccaaaacaccaatcaactagtttgcagtcatgtttgataactaactaaaccattgattctttgttctcttctatttgttagctttgttgttcttttacctc

SEQ ID NO: 12995 - DNA, 6185 bp, Vitis vinifera
  Intron number 10 from transcript GSVIVT01036799001 (locus GSVIVG01036799001) derived from phytozome v7.0 (chr-ID chr 19; pos 22405569 to 22411753)
ttgcactagtacaccaagaacccatactattcgtagcagggttcaaaaaattggtccagttcggtatgactcgaccaagtcgtattcgcctcaacgtcggccgcaacgagtccgatactagatacaatttataccaagactcgaccttgaatcggttggacttggatgacttggctgatatttcgagttaactcggtcaactcggaaaaaaaaaaaaaaccaatcaacaaattccttacaaaagaaacccatcacgacaagaatcaaatttttagaaaaatcagagattcctctacaaaagaaaacccgtgaaaatttgaaacaaacccatgacccttgtaaaagcctttaaaaagagcctcaattgaagaataacttacttaaccctaaatccaccattgatagagtgtagatttttcgtctttggtgcactgtttgtaaaaaggttgcagatcgtggtcttcatggtgtgttggggaagaagatagcaaggctgcagatcggtcttcgtggtgttggggaagaagacagagggcaagggtttgggaagaagccaacaggtaataactaatagaggtaataaaaggaagaagatcaatatttcttttgtttcttttcttttgcctcaatttggttgttgtgaaatcattgttttactacaaaatacacatttctctctttttttcccattttttgctattgtgttgtgcttaatgaaccatgtgaatatatatatacccttgtgtatatggtttagcacactttattgttgctataatctatcattccttttcagttttttttttcttttgtaaaatagaaaatggtggtaacttttattgacaatgcaataatttttaatacctcactttaaaatttttgaaaataatttttaacaacataagattagtatatacatattgtgtaagagagttcttactttttacatataagtttttatttttaaaaacaaaaaaaaaaaacggaaaatgtatccaaatgaagtaaggtatggtttggatatacttgttattttttgtttttaaaagcagaaaatgataaatcctatacaaaatgtaataattgtttgagacttgcaataatgatttttaaaaaccatttacgaaattgaagaattggaaaataatgtttatatgaaattggagaattcataatgataatattatgataatattaaatatatttatatgtaatgtttttattttatatggagattttatttttaatttattaaattatatgattttttatcttataatattaaattggttcactaaattctttttgtatggtatagaaatataaaatacatttatatgatacatatattgtatttttaatttatgtttttatcttataatattacaaaattaaattacattagaaaaataataattatttaaaacaattttttttcaaataatcttaaatgatttaataatacggaatgaaggatatgtatttacatggtatagaaaaattacatttatattttaatcaattttacttcattatatcatgaagattttttattttataatattatacaattaaattacaataggaaatcaataattatcaaaacaataaattggttcactaaattatttttatatggtatagaaatataaaatacatttatatggtaaactttatatggtatagatattgtaattttaatttatgtttttatcttataatattgaaaaattaaattaaattagaaaattaacattgatttaaaacaattttttttaaaaaaataatcataaatgatttaataatacagaatgaagggtatgtatttacatgttatagaaaaattacatttatatttgaatcacttttacttcattatatcatgaagattttttattttataacattctacaattaaattacaataggaaatcaataattatcaaaataataaattggttcactaaattatttttatatggtatagaaatataaaatacatttatatggtaaactttatatggtatagatattgtatttttaatttatgtttttatcttataatattgaaaaattaaattaaattagaaaattaacattgatttaaaacaattttttttaaaaaaaaataatcataaatgatttaataatacaaaatgaagggtatgtatttacatggtatagaaaaattacatttatatttgaatcacttttacttcattatatcatgaagattttttatttttataatattctacaattaaattacagtacgaaatcaataattatcaaaacaaacttttttaaaagaattttttttataaaaatattcgtttatttaacttttatttattttaattttaaaaacatataaataagtggaaaacaaaagatgatgaacttaggtgagatcgtgtttattgcttttttagtagaatttatttatatggtttcaaaacatgatattggttgggagcatgcaaaacctgttggtggtagtagaagaaccacgaagtgtaaatattgtaggaaagtcatacattgcggtataacaagattaaagcaacacatcgcacatatatctagacaagtggaaggatgtccacttgtaccggtagaagtgtcacgtagtgttatacaacatatgtctgatacttcaaaagaaaaagaagagttaaagaaaaaaaaaaggaacgacttttgagttccttaaataaagaaattttctatgaaattgataagggtgattctgatgatgaaattgaggaagttgttatgactgattttgaaagatgacaaatgaaacaagcaatgaaagaaagtcatcgaattttttaagaaggtagataagagcatcagaatggtggtagttcctcccaaccttctaatgttaggattaaacgcagactgacacgtagttttagtgtaagagaaggagctagcatacctccaaaaggaattgatccctacatgttcccatcaaagcataaatcaataaaaaaacttgttttctaatgaagacgtgaagaaaatgggtaaggctatttctaaattctttctctttaatgcaataccctttaatgcggctgacaatgggccttactatcaatcaatgattgataccatagcagaagtaggtccaagcatcaagggtcccacgggataccaaattggaaatacatatttggaagaggagatgcaagagcttgaggtatatataacaacattaaaggctagatgacctatatattggtgcacaatcatgtgtgatggttaaagttctaggactagaaagcctatcatcaatttcatgatttattgtgattgaagtatgatatatcattctttagttgacactgccaacatacctaagacaacaaactacatcttttcccttatagataaagttgtagaagaggttggggaggaaaatgttgttcaagtagtcactaataatgaagcaagttttaaagcaaccgatatgttgttgatggagaagtggaagcatttgttttggtctccttgtgcagcccactgtattgatttaaagcttgaagatattgtaagcatgaagtagattaaggagacattagatcaagctaagatgatcacacaatttatttataatagcttgaaagtagtgaatttgatgaaagtgttcaccaaggataaagatctgttaaggccaggaataacccgttttgccactgaattcatttcacttgagagtcttatacgttatgagactagtttgaagagaatgtgcacaaaaaatgagtggcgtgaattcaataaagattggagcataaaaagtctaagagataaggtatccaaccttatcttaactgatcgattttggaagaagacaagggaagttcaaaccatcatggaacctctcgtcaaagtattgaaattggttaatcaagataacccacattatcaatcatttatgaagcaatggatagagctaaattggctatcaaggcatcagtcaagcaatgggaaaagtattgggaagtcattgatagaaggtgggaaggtcaattgcacagacatttgcatgctgtaggtaataaaaaaattctttatatattttttattatttttttcaagtacaaattattataaactgattattatttaacttatgtcagcatattttttaaatccaatgttccaatattcaaagcatttctccaaccatttggaaattaaaattggattaaatgaggttattaagagattagagccagatttggatagacaagcaaaagctattaacgatgtataataatagtttgtgacctttatataatacattttgtatatgtaatgtgcattaacaaaaaaaaaatgttaatgatgtaggtaaaattatttgttgacggtggaggagaatttggaagtgcacttacaaagaaagcaataaatcaatatcttccaagtattcaatacatttacatctattacaaataagaaattatcatcattttttgttaaatatatcatagtgattaataagtatgcattttctttattatagcttaatggtggaacaactatggcaacgaaagtccacatctacaaaagattgttgttaaaattttaagtcaaacttgttcttcatcaggttatgaaataaattggagcacatggtcattgattcacacaaagttgcgcaaccgtttgacaatgaaaaagttgtataagttaatttatgtgcactacagtatgcgacttcgagttaagaatttgatgtaagagcaaaacaatgaagatttatacaatccaattgatctgaatcatatctttaatgatgatgatatattacatgagtggatatgagaaggaaatgagcctattttatcatctgataaattggattggttggataaaggtcttcccactaatgaagaagatagagaaacagtttatgaagatgatggtggcacaaatcatagagttaataggcatacaagtaatgctacacaagaaagatatgttgattctcgtcgtaaagataagactcttagaaaaatttcttcaaattctagtagtgatgatggtgaccatgagggcagtaggcgaggtggtggcactaatgggggcagtagaggagttggtggcactggtgagggtactagaggacatggaagcactgggggcagttatgttagtcaagtagatcctggcatgtcatgggcacaaggaggtgaaaattactatgccacacaaaatacagatcatggatatcgaccagggatatgggaacaactaaagcatttggaaacactaactacatttcccagtgatgatgattattctaatgggcatgattatcatatatcaaattatcatcgtatcgatgagcacttacagaatttgggtataggatcaaagtcatatttcagaggggtagatgatagatcatatcacaactttagagactatgatagctcttctagtacttttagtagaaatgattttgattgatttccaatgatgcatccaaagggatattcaaatactggaacacgagttagtgattcatatggatatgatcaatcttctagtagcagtagcattgtttatcgaggttttggatactatcaatatggtgttgatcccgaacaaccttcgaaaccatattttcctgattatggatcattaagtcaatcatctcaaccaacatattcgagttatgaacaactctttcaaccatatcctcattacaggaattgttaccccaatttgtatactcgtcgtaaaactcatgataatgattttgaaccctctcgtcattcaacatggattgattgttgtattgtatgtttgttagtaaaaatgttattatatttgaaataaaataatttttttttattagcattatcataaataactctgagcaagtacttttataactatttaaataatgttaaatgtgagacaattttattttattagttttttgagcttatttaattgtatatatttttatgatgatttacataatatttttataattttttgaattttctaattaacttattttacgtatcgcccgatactaaaccgatacaccgagaccgatacgcctcgggaccctccgagtcggtgactgatgctgctactttgaaccatgattcgtaggcaccataagagacaacattgtctacgaggcatca

SEQ ID NO: 12996 - DNA, 26929 bp, Vitis vinifera
  Intron number 2 from transcript GSVIVT01036366001 (locus G SVIVG01036366001) derived from phytozome v7.0 (chr-ID chr1 8_random; pos 4249795 to 4276723 reverse strand)
tagagcagcctgcataccttgagctgagcaagcatgtcgagaaagcatggaaagatataaaccaagacctagtgctattccaatgcttcttacacaggttgccaattttgcatgaacgggagatttcatgtacaaaggtcgcaaggatatattcacgaatgttggagaagtgatgaaggttaagagtgaatcactgttcattaacctgtggaaaaatgagcctggggattggtgatgctaatagagccagttgcttagcttgtatagattaccaaaataaatagattgattacattggtcaattggtcggtcgctctgatcaaccactaatcaactataaaagaaacatagaaaatgttgcacaagtgacatttaagaaattgggttgattcaaattgaaaacttaacatcaaaaacccttttttaatgataaaaaaacatatcaaacatgagcttttatccatgttttcaagcttcttccagccttgagaaaaatttctaccattcttttaacagtcttctaacaaaacatcaaacacatgcatgtgatttcctaggtaccaaagtaaagaagtttgaaaaatagtttttacacgagaataagatgatagctgacttgctatgcaaaaaatatatagacaaagatgaatggagaatgaaaggcaagtcaattgatttagcttgagtttagttaatcaattaagttgtgctattatagatagaaaaaaaaaaggatttgtttcctattttataaaccaaatcaacatctagatggttctgtgaagatgcactagccattggctccttgcatgcataataaggtagagggaagacccattagaatggccttgcacattgcaatatttgtctctaatggtgagttgttaatttggttggctatggagctgattgtggctctgaatctagaggcattcgacttctataaacccccctcaagttagtgaggatcatgcattgaactaccaacttgtagcagaaaatagagaaagcccttcttgatagaggtttggtaaaaatatttgctatttagagatgactaggaacgtactaaacacaaaggtgtcccataacaattgtttcacgaacaagatggtaatctaattctatgtgctttgttagagcatgaaacactagattttggccatatgtattgcactcatgttatcacaaaggagcagtggaggttgaggaagtggtaggaagagaaaggtgagccaattggccaatttgacaacggttcgttgaagagtgtgtgctattgtcccttgtttcttgaaagcccaggaaatacaattgtcatcaagataaatacaaaaactactagtagttctccttattattagataccttgcctaatcagaatcaacaaaacatataatgatatggaactttaagccaaaaagcgaattccataattgaggttgtattttaaataacataggatttatttcacaaccttgaaatttgctttagtttgttgttcgaggtgttggcatactttgttgactacatgagtaatatctggtctaatgaatgccagatgttggaggctactaacaaggtgggatacttggttgggtctacatgttataaatcatttgtacttggtgaatctttagcaaatatggcggtggccatggtagaacaatctagcttgtgtgctttctaaaggaggtctctggtatagtttgcttaggaaaggtacaaacaaccatgaaaacatttaactttaatgttgaggaaacattttagctaactgaaatctttaagagcaaattttaatgctaagaggatactttgttttaatcttatgagatatcataatgcctttattgaaaatacctattactacaagcttccatcaacaataacctaattcatagggaatatatgattaacttacgatctcactcataggtcaaagttactactaactttagtacaaacttaatattctcttaaggttgagagacaatacaataaaacaatttgttgaagtcatgattacttgatagccttaagccatgactcactgcaagttccgtctaatgtgtaaccatacacactagtacacttagagtggaaaacctatctcgatagccaaaaccaaccacccctttaattacaacctcaaatggattgtttaagtccatgaaccaattgtgaacaaatcatttacttacaatgaacccatgacttgattctttcgtgcaactgctaatgtacacaagtcatatacaatacaaaagatgttagatgagaatgctcataaaatgtaatgcatgaaataagaatagataaaagtaaaactagaatatcattaaatgaataatgaattccaaatttgttgtatcatatcatgtttttaaggtatctatcctaacaaaatggggctcaacaaaccttggaggttgctctatataaattgtttccttgagatgaccatctaacaagatgtttttcacatctaattacttcataatctagttaaaggtgacaacaagagatggggtaaggtgaatggttgtaggtttgacaacaaacgaaactttagatcttataaacccataaagagccattaatgatgatggcattagttggtctaggaaccaaattccatgtgttattttgttggagagcctatttttcttcttgcataatagttgtccattgagattgtttaagtgctaatttaagatttttaggttcaataggagtaggttactaacatgtagagccaaagaaggatcttgtctcaattttgcatgagtgaccatgccatgagtgttgttgctcgggagaagtggtgtatggtgttttggtagataagaaggatcaataagatcaaccactggtgtaaaattaggatgcgtacattgtggtaatagagaagggggtggaattggaagatcaacaaatagttgtttcattaaatctggggtggagtgtagagatggtggagaagaaggatcaggtgtaaagggtgcctagagtggacttcgttagagaaggagaagatgtgtttgtgataagaggtacaatgatagtaggttctgtgataggaaggacagtaggaggaacgggtgttgaggtgtttgatgtggcttgagcgaaggatgtgttacttgaatttagccattcataaattcttgcacagaagaaatagtatgagtagcaaaaagaaattcatgctcatcaaagataacatgtttaaaggtatagacacaatttgtttgaggttcaaggcatctatagcccttatgtaaagggctatagtcaataaatacacaaggatacgtttttctcttaaatttagctgtagcggggcatggaatttgtttaacaatgccacattgtccaagatgattaataaatgatgctattgtaacctcaccacctccattagattggaggattttgatcctcttaccaaattgattttcaacttgtctttggaatataagaaaacaagtgaagaaaaaaaaattaaatttccttttcaagggaaacaaccatgaaaaacgagtatgatcatcaacaaaaagagcataataccgaaaattttgagaactaataaccacaggaccccataaatcacaatggactttatgcaaaggaaattgttaaatagtatttgattgtcaaaaagataatttacaacttttgccttgctgacacgaaacacaaacgacaggcctttgaatccaattgaatatatttattttgtttttaaaccttaaaatatgtaaaactcggaaacttggatttctgagccttcgatgtcggatactagaatctgttgtagtaccctggataacactcaaactccatttttttttctttcaagttataaagatttccttacctaggccctcttaccaaaatcttgttgtccttgtccttaacgggtaaattaaaaagaacattgattattagaggtaagttgtcccagcaaattttagtcgtctgatttggtttgccacaaatttggcatatcataataacttcctgatttatagttgtttgtaattaaatttatttctttcttgttctgagttgctctacaagatagagtgccttgattgataatgatcatcttgattgttgaatcttagagaattattttgttgaacacctctccctcccttactatgggagaaacctctactttgatcaccaaacaagccacatcaatctttgcctttttattattattattatttttttaaaaaaaattatgctctagtttaaaaattttaaagactatcataaagaattatccaaaactaatatttaaaaattttaactattaaactatcatcaagaattatccaaaactaacatttaaaaattttcacttgagatcaattatgctaagaagaaaattaaatacatatatatatatatatatatatatatatatatattatcaagaattatccaaaactttttttttttttaaatctaacttaatacctacttattagtacacttaagcaactaacaaactaactacagcaagaagcttacaagtctaactgaatgcactagctcaccaacttctatttgaatgtttaaccactatatatatttacaaatttagaacaaagatttaattcatttgagaaataagagttatcattataaaaaatatacataatgtttataggtaatgatttcctttaaagaaaagtacccaagtgactataaaatctacatatgttgtctgcttaccaagaatgagtttgggagtcggattacttataaaaaaggtacaagaataaattgtatgtactacctctttaagcttttatacctattgtctctagtaagcaaatgttatgataattaaataattaatcatggataccgagaaaaaaagaacacaaatataaaacaagtcatggtgtttttcatgttacaaaaatatacaaaataaatgataagagaatttgcataagttgatttatgaaactaattaaaaacattggttttattatttctaattcaaaggattaaaaaagtttacttacataaaaaaaaaaagttattccaatttgatgatttcaatctattttaagtataaaagaaagttttagtttatttttttatttacaaaaaatgcttcaaagtattctattatttataaggaaatgatttttatttacttatcttaaaaaaaaagaataattttcacaaattctatttaccaacattccactttgattttcatggagaagagaatatttttatgatatttttattacaatatgaattttatttacaaaaaagtatccaaatctaatcttatctctaaaagaatattttttataacttatttaggaaaaggattttaaaaaatgtatttaatttacaattttgtttaaaaaaatgatatttacaaattactttaaaatagacttttaaaaatttattttgaaaagaataaatattcggatccaactttatttacagaagaaacgatttctttagttttgattcaaaataagatttttacaattttatttacacgagtataaaaattaaatttggttttatttactagaaagcttcttttttttttctttttttttttaccatttttattaagacatgatttttataattttatttatataaaaaaaagtttacaattttatttttaaaaagagttttgcaatttttttaaaggttttactgttttattaaaacaaaatgctttttagattttattttaaaaaatgattttcacaagttaaaaaagaacaagaaaactttacagttttatttttttaaaaaaatgattttccaattgtatttacaatttatttaaaaaaagattttccagttttattttaaaaaaacatttcattgttttatttcaattttattgtgtttttttttaaaaaagttcgaatttctctctctcttaaaaaaaaattcaaatatctctctccctatctctcaaaacatgattttcacaagttaaaaaagaagaagaaaactttacagttttttttaaatgattttccaattgtatttacaacttacttaaaaaaggattgtccagtttttatttcaattttattgttttatttccaattgtccagttttatttttttaaaaaaaccttgtctctctctctcaaaaaaaaaaaaaaaaaaaagaagttccaatttatctctctctttttttttaaataaaaaaagaagttcaaatcttgacttgattgatattaacccaaacttttggtctctctccaattgacttgatttctatattaacttaaacttttggtaactctcacattaattttaatgttaaggtatcaatccaattgacttgaacttaaaaaacttttggtctaacgacaaagctttgatttatataggaggtcatgaaggtgaactgtgaacctaactgatgcatgtatacccaaaccccactattgatttaaatatgagacactatgcattttgtcatgttaagatcaaagaaaacactagagatgcaataaaaagcaatagctagcagaggcaaacaaacctcaaaagacccaagccacaataatatcatggcacgtaataaaagatttgggaaactaaaagttcttttatatacaaaccaaaaattattttagaaaattaattaaaagaaatactaatattaagggaaacaaattagtgtctagatgaaaagaaaattacaaataatttgtttttcaattatatctatagtaagaatcatattattaattattttgattcttaattaaaaataattaatcaaaataaaaaatatataattattttcaattaaaatctgatttgagttaggataattcttaaatttttgacaaattttcaatcccaatatttcatttacataaatcacataatatttaataaataattctgatgtgtaagtcctacatcaatgaaatgatacttgatttgacaaatgtccttacaaacatgttcttcattttgaatatttataatgacaataataaaaaaataaaaagttactttatgtgagtcaaattaaactatccagaccctagaggagacgtatgtaaccagctaagcaattcatcacatgaaaatcattcctccaccttatcataataattgattcttcacccatcaataattgaactcccttaatattgcagtttacatctcctttttctattaatttctgtatgaaattttaacgtagtcatgtgacattatttaataaattccaataaaactataagagttttaaataatcaatgaatccaaaatattttcaactagttcctacacattataattagtcttcccatcactctaatgaatgtaatataaatcaaataaaatatttttatacataattattattttaaactaaattaaattatatgtaaatcattaacttaaaatttattatttaaatttactctaagttatagtgttgttttactttaattaatattaaaaaactaaaatcctataagtactaaaccaaatgatatttcaaaattagaaaaattatttattttgattttttactttaaattaattgtattatttaaaatcaataattaagttatattaaatcattattttcatttagtaaacatctattcagtcaaacttattatataatgaggtccacttattttataatttaactattttaatatttaaaaaaatgggaggatgctatgaatagggtagaattagttctcgaatagcatgtctaatttgatttgacatgagaaattggacttaggttaaattaaactcacaaactctaaagttttcgattggtattttctaatacaagtcgaattttaactcattcaaactttgatataataaaatcataagaattatagaacaaccttattatgagaaatgtatattaaattttaaaagaacatattttaaaattaataataccaaaatatttcccttaaagagattattcattctgataatcctatttcacgattgtttgagtaaaaattaattatctttatatatatatatatatatatatatatattttcacaatcttacatgcattcaatggttttcgtacggtgaagtgacctcaaacttttggtccctatccaattgacttgatttctatattaacttaaatttttggtcactcttgcattaattttaatgttaaggtatcaatccaattgacttgaattatattaacttaaacttttggtctaataggtacctagatataacgactctctctctctctctctctctctctctctctctctatatatatattggacttgatttatattaactcaaactttggtctctctccaattgacttgatttctatattaacttaaacttttggtcactctcacattaattttaatgttaaggtatagtccaattgacttgatttatatgaacttaaacttttggtataataggtgctagatataacggcaaagccttgatttatataggaggtcatgaaggtgaactgtgaacctaactgatgcatgtatacccaaaccccaccattggtttataatattgtcatcataatatttaaatatgggacactttatgcatttatcatgttaagataaaagaaaacactagagatgcaataaaaagcaatatctagcataggcaaacaaacctcaatagaccacagccacaataatatcatggtaataaaagaatttgggaaactaagttcttttatatacaaaccaaaaattattttagaaaattaattaaaagaaatactaatttttttttatgttttaatgaaacaataatttttaaattaattattatattatttatatatatattactattaatatcattcatttgttttgtatttttttgttagtcattttcttagtgccatgatgcactctaaattctgcaaccaagaaagaattggtatattattaaaaaaaaaatcatgggattttttttttaaaatatgattgaaaaattcataaaatatttagaaaaatattttcacacccttatattttatacataaaatttataatttagagaataaaactttatttattagagaattattgatcacaactatctaattttttttttatggaaaatttctttaaaaaatatatatattttttaaaatttataaatttataaatttgcatacctatgaaagttaaaaccaaagatggttcgataatttaaacctcgttcttgcatggactatcgggttaaatcaaatttttgcattcctttttctttcctttcttttcaaaggcccttggctttttatcattaagcttagggtttagattaaatagaggtgagtgaaaatttgttcggtgacaataaaattgtttattttttataatattaaatttaaatatatatatatatatatatatatatatatatatatatatatatatatatatatatatataatattgaatttaaaagtatgagatataagtttattaaaagaagtatgccgtaaatgatttataatctagtaaaaattatttgttatgaataaaaatttgtgataagattttacaagttatttaccataaattgatattatgattaaatttatttatttttatcatgaatacatcattcatattaaaatattatgaaaatttatttttttattatgaaaacatgatttttttatcttaaataaaaatttcatctctaaaagaacttttttgccattaaaaagaaaatcattacaattttttttttgtcataaaagattattcaagtaaaaaaatattgtagcaaaataggagtttctagtagtgaaaagataatagagaagggaaaaaaataataaaaaaattaaaattaaaatatttttatatgttattttaattattttaactcttttaaaaaatatataaatttataattaattataattctatttttttttttttttcatgatgaaaccaaattaaaaaacaattttacttcccaaaacatagctttaaataaaaagaaacggaagagaagagagatgtaactttctatgcttatcttggtatgatctgaggacatcacagcatcacctctctgacatcattggcagtacaattctgtctttgttgtagcattattttgatggaatcatgcagcaagaaaacgacaaatatgaagtttgatcaagatgtttgtccttcacaacacttttttcttgaagatgatgcctaactttttttttttttagagtttattaatttctttttaagattttgtttggttttcaaaaaaattaaaaaagaaatattaaaagaaaatgagggttatcaaatttatagtcattccataattttaatgatgtactttgattacctttttaatttttttttaatcttttaaattttatataatatacattagaataattatattattattattatcatcatcatcattaataaatattacaattattatattattcatgatattatacttattattaatattacattaacattattgtttatatttttatatataaatataattcttaaagcttgtaagttctaattattataatattttcttgatagttatattttaaagtaagataattcaaaaatgataaagtttatataataaaaatataataactttggttttttttttaattatgagaataaaaaaataatttgtaatatcattttatgatattattgatattaatattaatattcttatcatttttttatgttttcatgaaacaataatttttaaattaattattacattatttatatatatatattactattaatatcattcatttgttttgtattttttcttagtcattttcttagtgccatgatgcactctaaattctgcaaccaagaaagaattggtatattattaaaaaaaaaatcatgggattttttttttaaaatatgattgaaaaattcataaaatatttagaaaaatattttcacacccttatatttcatacataaaacttattttttagaaaataaaactttatttattagagaattattgaacacagccatccaatttttttattttatttttatggaaaatttctctaaaaaattcattttttttaatttataaatttataaatttacatacctatgaaagttaaaaccaaagatggttagataatttaaacctcgtccttgcatggactatcgggttacagctcaatcatgtctggggaattggaatcaagaaagaaagagtgagactgcctcttgcattccggcccttggctttcgattaaaggagttaacaaaatgatcagcagcgggatagcctcttcttctaccactgcttctgctgcgacttgtgttcttgatggtagttatgatatcttgtatgatgtcttcttaagttttagaggagaagacacccggaagagtttcgctgatcatctttacactgctttgaatggaaagagaattcacacctttagagatgaggaggaaatcagaatgggtgaagctttagcgccagcaatctcgaaagctattaaaggatcaagagttttcattgtcattttctcaaagaacttcgctgatttcgggtggtgtttgaatgaacttgatgagatcatggaatgtaggaggataacaggaagaatagtatatcccattttctaccatgtggacccgtcccatgtgcgtaagcaggagggggattacggaacgccattttccttgtacgaagaaaatgcagacaaggaaaaggcgaagataaagaggtggaaggctgccttacgggaagctttgtccgttatgggaatgatataaaatataaagaaactaatatacccttaaaattattttgagtattttctatcataatatttaataaatttttttattttatttttttaataattattctgaaaatttattattttttaaaaaactaatttttttttaaatacatcatttaaaaaaaataattttgacatatttttagttattttttacacacataatttaaaaaatatatattttctaagatatttgatttttaattaataataataataatttatttttatttatatttggaaaagggtgtattttttttccaaagcattaaaaatacatcatttaaaaaaaataattttgacatatttttagttattttttacatacataatttaaaaaatatatattttctaagatatttgatttttaattaataataataataatttatttttatttatatttggaaaagggtgtattttttttccaaatcattaaaaatacatcatttaaaaaaaataattttgacatatttttagttattttttacatacataatttaaaatatatatattttccaagatatttgatttttaattaataataataataatttatttttatttttatttggaaaagggtgtatttttttttccaaatcactaaattaaattaaaatttattgaggtttacaaaaaaataaaatttaaattaatgtttttctactttttttttcatagtcaataaaggtcatttttgaaaagataaaaaattcacatcattcttttcaattttcactctttttctaggtcttgagcttaaatagtgaacttatatggatcaaatcttaatttttgggtctaattaggtccaaaacacaattgtccctctatatatatattctctcttcccttcttgttagcataaaaatattagttatgtaccaatttttatgttttttctattaaaataaattcctttaacttagtctaaaagattttataataaaaaaataaatttcatttatattcccataagtttagtgaaatttcctcaaacaacacctctataaatatattccatttataaaattatttttttagagaggttttaggtagaaaattcacatagatgtattatataattctttaaaaaagaaaccttattctctataaaaataaattttatagatgaaatacacttagttataggggtgttaattgacaaaatttgaaattaatggtaatttagtatatttacaccaaatatcaaggagagtgaatgaaattaaccatactcaaaatggttgtaccttggatatgcatatataggacttgttgagcatttgaaatttaatagtggttaaaaaggttcacaacgtgtgtgtaagtgataagtgtcaaagtaattcctcaccatttttttgggaacaaaattagtttgtttatgaaggttgcagtccaattagtattgagggagagaatggctgcgtaaagtttagagaatgaatgacttaattctcattgataactttatacacatatttatacaatctacaaattataaaagaataaatctccaaaagttaaggaggtaaaatcaagaaattaattacctaaaatcataaaactaatcaacaagaaatatttacaagattttttaagaatatgaaaagtgaatattacatgcttctatccttatcatgccccccttccccaagatggtgctccattggagataacaatctcgactcgaagaagttaaagacattgatgagatagaggtttggtgagagcatccacaaattgatataaaaaatagacatgtgagactcaaagtttatcactttgaaccttgtcatgaacaaaaatgaaaatcaatggaaatgtacttcatataagagggaaatactagattgacataatgataagtagctcaaatgtaaccacaataaatgatcgatagagattgtaaggaaaccctaagttcatgaagaaaagacttgattcacaataacttggaagcagtggaagccatggatcaatactcattgtggatgaccgagttacaaatctctgcttcttgaaactccatgacatgggattgagaaaaagaaatactacaagcatactataaaagtataatccttagaattacttgcccaatccgcattaaagaaggtatgaaaagacaaaggggaactttattggagtagaaacccatgatcaacgatacaacgcaaataatgaagtagtcgcttgactatagtctaatgtcccatcgttagtttatgcataaattgggataacttgttaacagaaaagacaatatctagaccaaagtgagaaagttattctaagcccctaacttgcatatacttgatagcattcatgaaagtgagccatcattaagtgagaacttgattcattaagagaggtctatggacttccttggcttgaacaactttgtcttgtctagaagatcatgaatatactttttctaggaaagaagtaatccatgatgatgaggtaaaacttcaatgctaaggaaatatgaaatagccttgagatctatgatggaaaattgactaggaagttgttgggctaacttgctaagagcttgagaatcattacctgtcaaaacaaaatcatttagatagacatgaaagtaaatggtgaaaccataactcttgtagatgaaaagaaatatattgaaccaagagttgacaatacctttggaaagaagaaactccctcaactccttatactaggctcatggagtttgtttaagtccataaagagcctttttcaacttacacacatgattggtataattgcgatcaatgaagcctcgtggttgggtcatgaacatatccaccttcaagtggccatgaaggaaggcatttgacatcaagttgacaaagaggctagccacatgatagagctataaccaatgtaagtatgattatggttcattttataatagggttaaaagtattattataatcaatgccaagatgttggtgaaagcctttggccacaagcctcactttatacgagttgatggccacatcaagagtcatttgatatgaaataatgaaacacctacttgcaacttaccaaattttatgaaggatgagaaggtaccaagtcccatgtaccattgttcatgaaagcattgaactcatttgacatagcttgatgccaaataggaatcttaagggggcctaggtaatgatggttagtttagtagttttggttgtaaggtaaatgaggtaaaagaaaatttatgtttggttttgtgggtattgtttttgtctttgctaatcatggaattttggttttgcccataagaagtattccaagttcacaatttcatgattttcttctttcaaaattggaggtgagcaaggttgagatttgtctaagaatctcatgaaatcgtaacctacaagaaatgtatgaaattgaaatcttcaagaggtgtaattatttatggcgagtttgagaggggttcaggcgactacattgatggagattatggtttgattgttttcaaaaggatttatgatagcaagatgagagaatgaggaggcgaaagatttggggtttttttggagtgttaggattgacattggagcaccttgggctttgataccatatgaaggttgtagccaaagtactattgagtgatataatgaacatgtaaggtttggagaatgaatgaattaattctcattgatgaacttatacacatatttattcaatgtacaaattataaaagaataattttcctaaaatcaagcacctaaaatcaacaaactaattaacaagagatatttacaaaattttctaagaatatggaaagtgaatattaaacaactagtatttttaccatgattcctaccttatatgcgtctgtgtattgttgcatttatcatgggtgttcaccatgctctaagatagggttgttaattacaagaaataaaaattttagtgtgttgaaggttgaactatagggaaagggaagacccgaggatgcatatgggaggctaagaggtgaattcaagtgatttgagtgaaattttggaattatggtatatattttttctcaaaatagagaagaattttaatggttaaaaatttagataaaaggttatggaaaaacactagggataagagatacctcctagagacctttgcatcaactcaacatatacaactaaatttttaaaatgagagtaacctagggaaatatgtggtcttgaatgtcatggacattgcacttgagccctaactccaagacaaactttgcaaaatcatgagatgtttgctacaagtcaagtcattaaaatctctctctaggtgacttcttaagcattttataacctaaaatagaagttgtaaacagaggtttagaaaataaatggaatatctctcttgatttattggaatgaacaactagtatctttatagagaaaaaattaacaacaatatagaatctaggctaaactaaatccctagaatataggaaataactaggtagaatctagactaaattaaatctctagaaaatagaaaccaaaaattcaaagagataaagcttcctaatcacctactattttgaattttaaaaatagaatattaataaaactaaaacataaaacacttaatcctaaataatattctctacactccccttcaaattggggaaaaatgtccagtaatcctagcttgtgtgttagatcctcaaagtttgtcttggcaaaccttttgttaagatgtctacagtttgtttctttgtaggaatgtaggtaatgcatattaacccttcttccatcttctctttggtgaaatgatgatcaacttcaatgtgctttgttatgtcatgatgaactaagttgtgagttctacttatggtagtttttttttttttttttttgtcacaatagcaataactctaaccaaatcatgacacaaatcccctgaacaatagacctaaactcaaccttagtgtaacaactacactatattttttttttacttcatgcacacgtcaacaaattttcctaaataaatgtgctataacttgaggtagacctcctcctatcttctactaagatggcctaattagcatcattgaaagcttcaatcttcttctttattcaatcaaacttatcttgatgtaaatactgaaaagattattagcctttctatatcttgaaacttggaaaaactattcatgaattgcacttgggattatgagagttttgcattccctgaaggtgtccagaagtgcagtagggagcatgtgtcgtgctacatcacgaatgtgagattcgatataggttttggggtataagtcatagggatatcttcaaccaggtaattatgtgtacttttctttgagatgagctctactatctcttgactctatgattattacatccacaaagtctctagaagactttgtaggtggttttccatgtatagtgtctttttatgtaattgaatctctcttttaattgataaatttctttaagaggaataacaaaataaaaattgggttgtaattatatttgtgtattgacaattttgggtcaaaattccaattgtgcttctcttagttcataccttaaatcctcccttagactcttgccattttcaaagtgttcatggttgaagacgacttgaggagatggtaagtacttttgaggtgctggatgatgataaacattgatcaatcatgttttaaactcttatcattttattgaaaaagatagtggttacttaaggagtgtagaacatagcgtttaaataatttggactgatttctaattgattgatggaacttaagggtaatagtttctgttgtacctagttcttttttaattattgtctgatcgatcaaacttcaatcacatctgcattccttcaactttttccaaatgactttcaacagttgatgagttctaaaaccctaatatttaagccacctttctaggaaaggagagacaactatgagagttagagttgagcttaaagtttttctaactaaattggagagtgtttgccttgatagaaaatcacttgggtttgagttgaaaatcaattttcgaatgagaaattttcattccaaatgggttgattcattgtgttattcatccttactctcatgctcatcattttgggataaaaccaaaatttcttcttgtatagattcaagaggaggctgagattaagcttggtatggattccaagatgctccaaaataagaaaattaataactaaagtttgaaggttctagacaagaggtttgggaggaatgaaagcttagactagtgtacttaattgattttcttcatagtggatgatttgatcacataaggctagtggttttttttatcttttcagagaatttccatgttaaaatattggtgccattgtctctctattctatatcatactttgattcatttttcattagcttatgatatttccattatgatgttttggatgattaattgcaatataagctgaaattagatctttgaaattttaaaagaatatggtatattttagtttttggtgttgatgtcaagaacatgcgaaaatgtatttttgtgttgatgcaatatcttacataacatgaatggggaatgttgattcatatgtatgtgacttgcattgactaacttatcgggagagtattgatgtatccattgttgcttgtgatttgctttatggttgataggattgaaaaagaaacttaaaacatttgagaaaaataggggaattgtaagcatttttaagataccatctcaaattgttttaaaaacacctattcagcccccctttaattacgtgttatccctaggtgaaattcattttcatgggacctaaacactcttgtagagaaattgtaggtggcatggtatggctaagagtagaatgaagaacctttaatgaagtcgattagttaaccttggatttgcatgatccttcctcttgatggcatgtcatggccaaggtggtccatgcttctcgagatgttttgttaatagtaatgaatgaaataatggtaggagaaggataaccaacaacaacattgagaatgaattggtcttggtaaacccataaggagtattccaagttcacaatttcatgattttcttctttcaaaattggaggtgagcaaggttgagatttgtctaagaatctcatgaaatcgtaacctacaagaaatgtatgaaattgaaatcttcaagaggtgtaattatttatggtgagtttgagaggggtttaggcgactacattgatggagattatagtttgattgttttcaaaaggatttatgatagcaagatgagagaacaaggaggcaaaagatttagggtttttttggagtgttaggattgacattggagcaccttgggctttaataccatatgaaggttgtagccaaagtactattgagggatataatgaacatgtaaggtttggagaatgaatgaattaattctcattgatgaacttatacacatatttattcaatgtacaaattataaaagaataaatttcctaaaatcaagcacctaaaatcaggagactaattaacgagagatatttacaattttttctaagaatatggaaagtgaatattaaacaaccagtatttttataatgattcgtacctaatatgcgtctgtgtattgttgcatttatcatgggtgttcaccatgctctaagatagggttgttaattacaagaaataaaaattttggtgtgttgaagattgaactatagggaaagggaagagctgaggatgcctatgggaggctaggaggtgaattgaagtgatttgagtgaaattttggaattatggtatatattttttctcaaaatagagaagaattttaatggttaaaaatttaggaaataaccagatagaatctaggctaaaataaatccctagaatataggaaataaccagatagaatctaggctaaattaaatctctagaaaatagaaactgaaaattcaaagagataaaacttcctaatcgcctactattttgaattttaaaaatagaatattaataaaactaaaagataaaacacttaattctaaataatattctctacactccccctcaaattggagaaaaatgtccagtaatcctagcttgtatgttagatcctcaaagtttgtcttggaaaaccttttgttaagatgtctacagtttgtttctttgtaggaatgtaggtaatgcatattaacccttcttccattttttctttggtgaaatgatgatcaatttcaatgtgctttgttatgtcatgatgaactaagttgtgagttctacttatggtagctttttttgtcacaatagcaatagctctaaccaaatcatgacacaaatcccttgaacaatagacctaaactcaacttagtgtagcaattacacgatatttttttactttatgcacacgtcaacaaattttcctaaataaatgtgctataactcgaggtagaccccctcctatcttctactaacatggcctaataagcgtcaatgaaaacttcaatcttcttctttattcaatcaaacttatcttgatgtaaatactgaaaagattattagcctttctatatcttgaaacttggaaaaactgtttatgaattgcatttgggattatgagggttttgcattccctcaaggtgtccagaagtgcaataaggagcatgtgtcgtgttacatcaaagatgtgagatccaatataggttttggggtataagtcttagggatagcttcaaccaagtaattatatgtacttttctttgagatgagctctactatctcttgactctatgattgtcacattcacagagtctctagaagactttgtaggtggttttccatgtatagtgtgtctttatatgcaattgaatttctcttttaattgataaatttctttaagaggaataacaaaataaaaattgggttgtaagtatatttgtgtattgacaattttgggtcaaaattccaattgtgcttctcttagttcataccttaaaatcctcccttagactcttgcctttttcaaagtgttcatgtttgaagatgacttgaggagatggtaagtacttttgaggtgttggatgatgataaacattgatcaaccatgttttaaactcttatcattttattgaaaaagagagtgattacttaaggagtgtaaaacatagcgtttaaataagttggaccgatttctaattgattgatggaacttaaggctaatagtttctattgtacctagttctttttaattattgtctgatcgatcaaaattcaatcacatctatattccttcaactttttccaaatgactctcaatagttggatgagttctaaaaccttaatatttaagccacctttctaggagaggagagacaactatgagagtgagagttgagcttcaagtttttctaactaaattgggagagtgtttgccttgagagaaaatcacttgggtttgagttgaaaatcaattttcaaatgagaaattttctttccaaatgggttgattcattgtgttattcatccttactctcatactcataattttgggataaaaccaaaatttcttcttatatagattcaagaagaggctaagattaagtttggtatggattccaagtatgctccaaaataagaaaattaatagctaaagtttgaaggttctagacaagtggtttgggaggaatgaaagcttagactaggtaaatccttgtacttaattgattttcttcatagtggatgatttgatcactaaaggctagtggattttttatctcttcaaagattttccacgttaaaatatcggtgccattatctctctattctatatcatactttgattcatttttcattagcttatgatatttccattatgatactttggatgattaattgcaatataagctgaaattagatcattgaaattttgaaagaatatggtatattttagtttttggtgttgatgtcaaggacatgtgaaattgtatttttgtgttgatgcaatatcttacataacatgattgaggaatgttgattcatatgtatgtgacttgcattgactaacttattgggagagtattgatgtatctattgttgcttgtgatttgcttgatggttgataggattgaaaaagaaacttaaaaaatttgagaaaaataggggaattgtaagcatttgtaagataccatctcaaattattttaaaaacacatattcagcccccctttaggtgttatccataggcgaaattcattttcatgggacctaaacactcctgtggaggtttgttctattggatcccttggtcgttccattgaagcatgccaaaaccgtcacaaccaaatcaatcaatttgatttcaaaaagatgaccttttgttacaatgttatgattggggcttcagcttcatccaacgccattaccccttggtgttggaggtcaagcaaccaatagtccccgacaattcacttctttggttgaggatgatggtagttgtcctcaagtggctcttgagcctataagactctaagtgcacttgagtgccttcacctgtgcaatattaaaaaggactgcctattcacccctaatcagtttcataacaagattctaaaatttcatgcaccaaaagctaacatatgatcttacatatttttacatgttattttaatttttcattggcacatacttgatataatcatataataatatttaatgtaccaaaaaaatttctttagttggctttgtccctttattaatgtatgattctatttctgcacaaggcagttgctgtgaataaaacatgttacgaatgaattttcatgctttttcttatcattcatagtacataaattcagatccatcataagttttattgtgcattttaattcaggcatgagtccgtggttataaaggaagtcattaaagaaatttgggatgaaatggcgtctaagccctttattatggatagcccgagtacaaatgaattcatattgaaggacttagttaagtttatgaacattcaatcagaagatgttcacatgattgggatttatggagaggatggacttggcaaaacagcgattgcccaagccatttgtaatgaaatctcttctcaatttgagggatgtagtttccttgcaaatattagaaaggtttccaaagaatattttggtctacaacgtttacaagaacaattttttcgtgatattctagtgctaagaggaaatcgagaaataatcttataggttctcttagtcataaatgaagtggaactctcaatttataggtttctaagctcgggagtcaaaaacagccaaaagcaacctcgtccggtcgagctaggggtcgactggttcactagccgttggagcatttaatgcatgacaggttaccgttgcctcaaccggacctcgaccggacctcgacctgtaaaggaattacctcaaccagaaagagaaggctactgggagagagagaaggtttttaaccttcctcgatcggtcctcgaccggacgacctcagccggtcgaccggttccacaaccggttgatcggttggctttagcctcgaccggttgagccttttggccccgaaaacctatcctttttgatttctttcttttccaatacttagacaaggtctttaggtgagttaatatgccacttttgaatcaatttgcctaaggtatgtttgataaaactcgggtcttaaagaaaataaagttttaaagaataaaccgagttttctaagatgcatgaaaaggtatgaacatcctaagtgtactcatgctatcatcttacattcatttcctatgatctcaagtcttccaagcgtcttgatcttgtatccatttggtcatttgatgaattttcgagtttatacctgagattcttaaacattaaactaattagttacttaaccatggtttgttatcatcaaaacccgattaggagaacccttgggctaacaggtatatttaccaattttaaatgaaaacagtagttaaaaattgtatatatagattatgtttgagtttgattttaagatatttttgggataattgtgttttggacccagttgggcccaaaaattaagatttggcccatgaaagtttcataattgatgaaaatgatataaaatataaagaaaccaatatacccttcaaaattattttgagtattttttatcacaatgtttgataaacttttttattttaattttttttaataattattctgaaaatttattatttttagaaaactaattttttttaaaaaatatattctaaaaatatatcatttaaaaaaataattttgacatatttatagttattttttacatacataatttaaaaatatatattttccaagatgtttgatttttaattaataataataataataataataatttatttttattttttttggaaaatggtgtatttttttccaaatctctaaattaaattaaaatttattgaggtttacatataaaattaaattaatgtttttctaatttattttcgtagtcaataaaggtcatttttggaaagataaaaaattcacataattcttttcaattttcactctttttctaagtcttgggcttaaatagtgaacttatagggatcaaaacttaatttttggacctaactaggtccaaaacacaattgtccctctctatatatatattctctcttcccttcttgttagcataaaaatattagctatgtaccaatttttatgttttttctattaaaataaattcctttaatttagtctaaaaaattttataataaaaaaataaatttcatttatattcccataagtttagtgaaatttcatcaaacaacacctctataaatatattccatttataaaatttatttttttagagaggttttaggtagaaaattcacatagatgtattatataattctttaaaaaagaaactttattctctataaaaataaattttatagatgaaatacacttagttataggggtgttaattgacaaaatttgaaattaatggtaatttagtatatttacaccaaatatcaaggagagtgaatgaaattaactgtactcaaaatggttgtaccttggatatgcatatataggacttgttgagcatttgaaatttaatagtggttaaaaaggttcacaacgtgtgtgtaagtgataagtgtcaaagtaattcctcaccatttttttgggaacaaaattagtttgtttatgaaggttgcagtccaattagtattgagggagagaatggctgcgtaaagtttagagaatgaatggcttaattctcattgataactttatacacatatttatacaatctacaaattatgaaagaataaatctccaaaagttaaggaggtaaaatcaagaaactaattacctaaaatcataaaactaatcaacaagagatatttacaagattttttaagaatatgaaaagtgaatattacatgcttctatccttatcatgccttttgaggataattcttaaatttttgacaaattttcaatcccaatatttcatttacataaaccacataatatttaataaataattctgcttgaatgtcaataattgatcctagaggagacgtatgtaatgacaatagtaaaaaaataaaaagttacttgatttgataaataattctgatgtgtaggtcctacatcaatgaaatgatacttgatttgacaaatgtccttacaaacatgttcttcattttgaatatttataatgacaataataaaaaaataaaaagttactttatgtgagtcaaattaaactatccagaccctagaggaaacgtatgtaaccagctaagcaattcatcacatgaaaatcgttcctccaccttatcataataattgattcttcacccatcaataattgaactcccttaatattgcagtttacatctcctttttctattaatttctgtatgaaattttaacgtagtcatgtgacattatttaataaattccaataaaactataagagttttaaataatcaatgaatccaaaatgttttcaactagttcctaaacattataattagtcttcctatcactcaaatgaatgtaatataaatcaaataaaatatttttgtacataattattattttaatttaaattaaattatatgtaaatcattaacttaaaatttattatttaaatttactctaagttataatgttgttttactttaattaatatcaaaaaataaaatcctataagtactaaaccaaataatatttcagaattagaaaaattatttattttgattttctactttaaattaattgtattatttaaaatcaataattaagttatattaaatcattattttcatttagtaaacatctattcagtcaaacttattatataatgaggtgtacttattttataatttaactattttaatatttaaaaaaatgggaggatgctatgaatagggtagaattagtcctcgatagtagcatgtctaatttgatttgatatgagaaattggactgaggttaaattaaactcaaactctaaagttttttattggtattttctaatacaagtcgaattttaactcattcaaactttgatataataataacataagaactgtttgagtaaaaattaattatcttttttttagatatatatattttcacactcttacatgcattcaatggttttcgtacggtgaagtgacctcaatggccttaatttgtacacaataatacgtactaaatataagcatgctttttaaatttaaacatgtgaacttcatgtgtagaggaagtctaggccgcctcttcacacaagctctagaagaccaatacttttcttaccatcagtctcttctgtgcacagcccttccaaatcatgggccccaaaaccaaaccaaattccacatacttttcaactgcatacaaccgtgcactgaatgccagtgctgccctataaataatatggagcttgccaagctatttctctcatacttaccaattca

SEQ ID NO: 12997 - DNA, 4673 bp, Vitis vinifera
  Intron number 2 from transcript GSVIVT01020522001 (locus G SVIVG01020522001) derived from phytozome v7.0 (chr-ID chr1 2; pos 4858841 to 4863513)
gtgccattctgggaaagaataaaggtatgacccgcccctttctcaatctccatttaattctcctgctcttcttcttcttcttcttcaaacttaaaaaacaccatttccaatgatcttgagaaggaaatgattcaagctcaccacttcatggcactttaatcatctgttgtttaattactaacctcatcttttcaacaaaagtgttaagccatgtacagttgcaactaaacagaattagttagaaacctgtaactaacctataactagatgattagttctggtactgttagataactagttataaggtataactaacttcaaatacatataaatatgttgagtcacggctcacaaaaactgtgaatgaatcttagagaataaagctttcagaagattcaagaaacataaattctactctgtttttcaattttattccattaagctttcttccacctttcacatggtatcagagcattcaacaatggcagatcactcaaccaatgtgactccattgcaagattctggagaaattccaattgctggatctggtctgattacgagacaaactacctctcagatgacgaatcaatcatttccatcactcggtcaatctattgaatttcatccttctcattttgtggtgaaggatcagaaaacgagacttgctcttcttcaaggaaaaattaagaagggtttctataaacttcatgctacaacaagagctgttggtgatccactaacattttactctactagtagtacttcaaatgttggttctttaaggctctggcataatagacttggtcatccctctgttgatgtagtttccaaaatcttatctctttgtaaaatacctttgaaacatgacaataataactctgtatgtgagtcttgccagttggctaaaagccatcgtttgccatttgaaagatccacttctaaaccaataaaaccattttggtctcattcatgttgatctttggggtgcagcttttatagtttctgtcaatggtacttgatatttcctcttgctaatggttgtaccttttgtccttatactcttcaacaaaatggaatatttgaaaggaataatcatcatgttgtggaagttggtctttctttattaatataagctggtatgcctctcaaatattggtcatttgcatttcaaactgccatttttctcataaatcgacttccgtctgctgttctttaacaaaattctccttatggagttctttataatcatttgcctgattatacatctcttcgaagttttggatgcttgtgttttccttatctttgcccttacgcttctaacaagctagcaaatagatatgttgtttgctattttctgggttatagtgctaaacacaagggatttctctagttggatatggcttcctctcggatatatgcttcccgccatgttgtatttgatgaaactcaatttccatttttaacaaagtctttatcctctcaaccagtatcatcatccaactctttttcaacacttcttgattctggtattctctttattcctccaccatcttcaaggaatcctaatcatcctcaacttaatttttcttatcccgttattgtccttattgattctgttccatctcatccaccttcctctcctactttaccataatcatttgctccagcctccactactgatcttccttcacttccaaaccgaattgttattactcgtagccaaaatggtatttttaaacctaaaaaaatattcaaccttgttgtccaaactactgctgatgaaccctcctctttcaaagaagcgatgttgcgtcctgattggcaagctactatgaagactgagtatgttgctcttctcaccaattccacatggacattggttcctaaacctgttaataaatgcattattggttgtaaatggatatacaagttgaaactcaaagctaatggctcagttgatcgttttaaagcccaattagttgcaaagggttttaatcaaacatatggtattgattattttgaaaccttttgccctgttgttaaaccaactactatatgaattgttctttctcttgttatttctcatggttggttagtgaaacaattagatgttaataatgtctttctcaattgtgagttagaagaaaaggttcatatggttcaacctccaggctttattgatcattctaaacccgattttgtttgtaaacttcacaaagccttgtatggtctgaagcaagctcctcgggcatggttcaccaaattgaagaactcattacttgcttagggtttctcttattctttatctgattcctttatgtttctttttcgaaaaatgactgacatgatcattattctcatccatgttgatgacattattgttattggttctaataccgtgttggtccaccaagtggtttcttctttacactctcagtttgctctcaagaaccttggtattctgaattactttttgggtgttgaagtatgttggcaaggctcttctcttcatctttcccaaaccaaatatattcaagacttgtttactcgtgctggtcttgtagattttaaacctattgctacaccaatgactacctctcacactttatctgcctctaatggttctctcttggttgacccttctcaatatcgcagcattgttagagtcctgcaatattgtaccattacaaggcctaatatctctttttctgacaataaactttgccaattcatgcaatcaccaactaatcttcatcggtaagctgttaaactgttactgcgctatcttaaggacgctacttcctttggtgtttcctttcattcttctcttaatcttcaacttactgcttatgctgatgctaattgggctggttgccctgatgatcgtcgaagtacaagtgctcattacatcttttttggctctaatctagtctcttggagtttcagtaagcaaaaggttgtgtctcgttctagcattgaagttgagtataggcccttagcaaatgctgcttttgaacttcaatggattcaacattttcttcaagagttctctatctcttcttcttcttctcctattctattctataacaatctttcaaccacctttcttgctcccaatcctatttttcattcttgagttaagcatgtggaactagattgtcattttgttcgggaaaaggtgctcaataagactttggtggttcaacacattccttcttgtgaccaaattgttgatgctcttaccaaagccttacctgttcaacaatttctcaatctacgaagcaaactcacaattctaactagacctttgagtttgagggagaatgttaagccatgtacagttgtaactaaatagaattagttagaaacttgtaactaacctgtaactagatgattagttctagtactgttagataattagttataaggcataaccaacttcaaatacatataaatatgtagagtcacgactcacaaaaactgtgaatgaatctcagagaataaagctttcaaaagattcaagaaacctctgttctactttgtttttcagttttattccattcagctttcttccaccgttcataaaaagaagctacccactgactcaactctgtgttatcaatccgaggtggcacataattgtatattgtcatgtgctaaaaaaatttctcaaaattttatattgctttatattttaagatatatatatatatatatatataatcatatgagtgcaagtgatatattaataataataattacataaaaaaaaaattaaaggatgggcatcccatgtggtacaaccccaggttttcaaaagcctcctttaattataaattccctctttggtttttaaaaattctgtaaattaaaagcaattaaattgatgaatagtagaaaatcatgacataattaataattttttaaagaagaagacgaagaaagccctaattatatcctaaagctcaaaataaaaatcttaaatctatatttgattctcataaaaaaaaattattaaggaaaatgattttcgaatatgccgttttattatgaaaaatatgaaagaaagtgaaatataattaaaattaataaaaaatgtattaaatttaaaattatttaatttttatgtagaatagttaaataattgaaatgcatttgaagtaagatctaaaaataagagaaaagtggaatttgattcaaaatatatgaaaaaaaaccttagaatttttaaattaatattattttatctatttaaaaataatttggaatacatgtattttttaattagtcatccacttattaccaaaaatactcatttatttgtcttgccatccaaattaattgacaactagattttttcgtatagatgtttatcttccttttaaatattttattattattattattattattattattttactaaaatgagaaaatcattttccttaacatttttttctttactcagtgttttccatcctgatcaaacataatctttatatatgatgaaaaaatgccaagagacattggaaaaactactagccatggagctagtcgaccaaatagataaacatggaaggactccacttcattatgcagcatcgattggatatcttaaaggagttcaaacgctgttaggccaatctaactttggtctatatcaaagggacgac

SEQ ID NO: 12998 - DNA, 2418 bp, Vitis vinifera
  Intron number 10 from transcript GSVIVT01029946001 (locus GSVIVG01029946001) derived from phytozome v7.0 (chr-ID chr 8; pos 1983240 to 1985657 reverse strand)
gtttaaagtgctccaagacagacattgtaagtcaaactcatgctctgttgtttcactgtgactattttttggttagaagacaattctcttctattgcttgaaatgcttaatattctaatcttcatcatagctattgtgatgagaatcatctgacagatgggcatgtggctgtagtgtttgtttgggttgacttaggagctgttctcacttcttggctttagcagatgaataaagaggatggttagatgttagttaccagagtaattattagcattgttgtcaatgtggaaagtattttgtgccattttcttgtttttccaatgtgtgtatcatatcgtatcaaaacatgtcattcatcactatcaaataaatattttttttttgataggctctcactatcaaataaatatcaatatcctgatacaaatatcaatagcctcgtatcagcatcattcatcaatatactttatacaaaagtttcaagttctaacttctaattcacaaactactaaccaaaagacaatgtttcaaaattacctgactgatatctcaaaaaagaaactataagcacatataggtttctatatcattacaaagcaaacaattttgtttctagtgtaacatattacatttcaatcttcagaatagttttaactaataagtgcaatggtgtgaaatggcttgattgaggaattgaactccgacggattttctctttttttatctccacagctcttactttttaaactgctcttctctctcacttttcaaatcctgtattatgtgctgcttctaaactctgtggacatttatacacattgcctgtgatgctaccactagtaactccatatacctgtatggactctatgtataatggactacggacatgtagatgtaatgcaagtggaatgcatatcagagcactgtgggcacataataagcataactcctgcatcaatcatcttcaagttctatatcaaaatcatcctcatcatcttccaaaatcattgccatagtctttaacttgaattgttcatcctcttcaatttcaacaatcttttctttcttttgtctttaatattcaagttcctcatcctatgggatgagcctatggagagtcattagaagtggcatgtagcttcgtggaaaagaagcacaaaatgcatgtagagtggctcccttatgtctactttgttgcttgagagaatgactgcgaggacttttgaagtcagatagtggtcagagttggttcccaaccttctctctttgatctaggggagcgagagggcaatctagcatctccttactagatttcatgattgggtgtgggtaggcctttaccctcttgtacttcctttcttttgtgatgtgctttcttgggtccaagattaagatgtttgtaaaggatggtcctttgacgctaattggttgggcttttgttgagggtacggatgttttttataccttcattttggcagctattttttgtttgagctgtgtgggggtaggtgtatttatcttgtataccttggatcactattttggtgcctctttttattatatatactcttctttacttatcagaaaaaaaaaagaagggaaaatgtattgttaggtgcatcatatttccttttgttttcctttatagatatgtatatatgtagagtttataatatgtcatgtgtattgaaactactagtttgtggatgtaatatattattaaatttgaacatatcaagtgtaaacatggtttctgttttggggaggggcaccagtcccctcaagacatagagaccaacttggaagccttcatggatgtccatccatgaattgtctttggagaggcatgggtgattttgtttaataacccattcttgattgatttcataccaatgagaaaaaaaaaaaacagatgttatatatctccatttattgcctattacaagcatatatatgattataagttgtgtagatgtcaccatatatttcatggtgcctatcatgccaacagtgacaacttgtttttctattgattacagttttgaaagtcatggtttgcagttttttcctttgtatacatctttactaaaatcaatttactaggaatcaatttgtgatctttaagttataagaagactacactagcttctgtttgctagcctcaaatatatgcctttggaagaggttttgtgtgttgaagcttttatgcagatctcactacttccacttgttgttaataaggcatataatatagaacattaagcaaatgttcagtccatacctttgacactactcatgttgagaactcaaatgtttgacagtcacctttcccttctttctctttcttcatatttatgtgatgcttattttaaattgccatcaggtgaagatcgtacatatttgtgaagcaactttaac

SEQ ID NO: 12999 - DNA, 9895 bp, Vitis vinifera
  Intron number 2 from transcript GSVIVT01010521001 (locus G SVIVG01010521001) derived from phytozome v7.0 (chr-ID chr1 ; pos 21371893 to 21381787 reverse strand)
tatccacaagggaggccctggtaattgccctctcttttattgatttatctgtttctttctttctttgtttgttttgcttattgatttatccagttatctgtttgtttgtttcttttgcatatactctctcttttacaccattctttgttttagcgagccaaaattttttattgtgatgtttgatgtctacggtaaaatgaattgacttgaaatatgttaccaaataaaacacctgaaaaatatagaagaattctcaggtttttccggccaagaaacaagaaattcaaaagaggtaaacttttcccttgaaactcggagacagatggatggaagacgttttaagaagcaatacatcttaaacactgggcagaaaaataaggatttgcaatctaaagtatttaagatgaaattagggctttttttaaggagagcctaaaaaaatcagaggaagaaaagttttaaattgtgctgcatttatattttatatagagaatatcatataacaatcaaatcaacctatgaaatctagctatttttcttaattaggattaattttaagttgtattttaattttcaattaaaaacttaaaatatagcttaattaaattagaaaccttatcatagatcaacttgatcttaacttaaataacttaactttttttctaagaaaaaaacttgtcaaaatatcaaattaaatcttgccaaatccccaacttaccctttctatacctttgtaaaatatcaatatcattcataagtaaatgaaatccaatgtttggtgagctttcttgagtctctcatacctaaacctcttgcttggcggtcacgaatagttttaggaaaaggacaaggaccaaatgagccttgtatctaaatatagcagcactatggtttaggttaaaaaaaaaaggcccaaaatccacaactaaagaggggcagattttgcaaacggctattgccacaaacatagctgttgatttggaccccatgcacaactgtcgatttgaaaacttattatgtatcatttttttattttccgtatcatgtcgagttattttagataaaatatgcaagcatatttatataggttggaagcaagaaacataatttcaacccattacttataaatggtgtaaacaaagatgctaaaatgtcatacctagttagggtaaaacgaaaagaataatttcaacccattacttatagctcaaccaatttataaaatttaacatagataaaggacaatcttattttcacctattcccaataacataaatgattgtttgatctattttttttagtattattgaatactttcccatttctctctttttgtatggtacaatagttaaaagagagtagttctcaaaattttcttcttttttttccttatgaaggatttgtgtcaactcaataatgttttctttactcatggttgcataacctactttattttaaacaaagcataaaccagttgccacaagatgattgttttcaaataatgaaggagaatatggtcaattatctatccttctcctttacacatataatatttatttgatattttctatctctttccttcgagttgatttagtgtcaaaatccttcccccatgcaaattcttaataaaatagctaactattgatgagacccaaggattttatgtaagacaggaaggaaaaagctccattcttctattgagcaaaaaggagtaaaaagattttgctgaaaaaaatattaccctttatatttagccaaaccattttattctcaaaatctttgttaatatttgtgctagcaattttctagtaagagcttccatctgtctagctcctaatcaagtagttgtataaaaaacaagagggtttctatatacagctatctacttatattcccacaccccaactattggtagtggctatggaatacaagagaaaagcctcttcaacggttaaatcatcacaagacttccaaaattttactcttcttgcattccctacaacataaaaataataataataataataaatcctaaaaaaaaaagcctaatccattatgtgtcagtattaaagtttcaatatttcatgttcactatcattccttccccggtgattttaaaatccaaaaataaaaaaccatagtttatttgacaccatcattttcattgccaatattcaaataaaaattctccaatattcattataaaaaaattacttattaacctttaacattaaaaatgtaacttttcatatacaattattttacttcttttccttttataatcattttttaatctaactttctattttaaataattaatataataattattctaagattttttttaattttatttttcttgaaaattatgaaaaatagttaaaagacatatgtcgtcattttattatatcacgtattatatcgtgtcatgtatcatatcatatgtgtatagtaagatacacttaaaataagatacaaattatgatacatattgatttttatatataaaaaaaagtattgtatggttgtatcatatggtgtattataaatttttaataactcgattctaatgccccatctctacctcctccttccattagactccttacacttttacactttatggcctagctcaatcaacgcctatgcattctattgtcaaaagccttttccaaaactgatgatagagtgtataccaaatcaaaataaagctacaacaagggatgatggtcatccaaatcaaaataaagctacaacaagggatgatggtcatcctaagtcttagtttcccacgtacaccaaaattccaatcaaaatttatggtttagttaatgctaataaatcatgattgcaattcattataatggaaatattaagctaacctaacttttttagccatcgtttctccaaaacactcacctttgtagacgacttgttgcaccatggatgcccatgaatgcttttaacttttgatatttgcttttgatcatcaaagatggataaaagattgatttacacaaaggaaaaaaaacattatgctccaccaaaatggagcttacaatttgtctaagaacaaaaaggaatttttacattcaaacataaaaatcctatgttcctaaacatggagcttacaacccaattcatgcaaaaaaacaaatccaaacattcaatcataattatgaacatcatattcataaaaaataacattcatatgcatttattcatccctttgggtcatgtgataataaatataccttgcaaaaccaagttagcacatcatagaatgaatctaatatgcaaaaacctaacctaaggttctagttctagttgttagaaatccccgaattgcttcattcccaagccctaggtcattagggtacatgaaatcctatcctaggtttccctaaatctaagcacaacggaaagcttgacattttaaaaaccaaaaacataccatagatttagagaaaagtgtcatactaattatccaaatgttcttggatcaattcttattggtgaaaaagatctcataaacttgtaatcatctatgcgataacttctttgaaggttggaggttagagttttctctctagattataggaaagagagtgtgaaaacttgaaatcctaacttctaaaaagcacatttataggcttcttactaggctgaatcacttaatttaatccaaaatggttactaattgattaattaacccaataagacttccattaatcaattagcttagtctagagatgcctctcatttaaccctatgtgatcctgcttaattatcaaaacgttcatatgcatataagtgaactaaaaattcatctaactctcataaatcatattataaaggaatatgagttcaagtaaggatcattaggactcataggataacatcgtctccctcataatctaattttaaagttaactcaatatcccacttaagatagtcaattatattttagtgtttcatgtacattacattaacaagacaccaagagcttgagtttgtgacttgtttttcactgtatatagtctccccataaaatggttgaccattgtctaacaaggtgaaaactatcaaccttttaagattgtctttaccatccttctattatgtgatcaaataacatactttaactcaataaaaacatatgtcaaattccattaaaggaattactatagactcacaattcataatcacacatccttaagatcacccaaatgatatactagtttaaaagtccatgagatattatagtgtctctattaaaaatatttgttgctactaatttccatcaatagtaactcaattcatagtaaatatatgatcattttaggatttgacttgtaagtcaaaattactgttaatttctgcacaaactcaatattatctcaaggttgagagactacacagtgtagtaacttggtgaaattatgactactcgataaccttatgtcataactcacaataggttttatctaatgtgtaactatacatactagcgcacccaccatgagaacttcattctaatgattaaaaccagtcatccctccaattaggaggtggtgtactaccacctcaaatggattgcttaagcccacgacccaactatgaacaaatcatctactagtaagaaacccatgactttgatctttcgtgcaattcttaatgtaccaaagttatataaaatgcaaaaaattttaggctataatgtttataaagtgtaatacatggaataaaaatagacaaaagtaaacctagaatattataaaattaataatgaatttcaaatttattatatcatgtcatacttttaagggttttaccctaatataaaagaactaaaaacacgattctaaaataagaaggtagactcataagaagttgtagaaaatgaaactgattgtggctttcatgaaggcaaaagtgtgaagtcatcaaatacataggattcattcttaactctccttaccatgaaaaattccttgaaagcttgatctttgacatagtaaaaattaggaaaaaagttaaaatacacaacattatctttgagaaatttagaggctctgaacaaatttttggtggaagaaatgtgaagaagatgatttaaatagaaggaacacaaaatcatgcatgctcataaatcaaagcatataatgcaaggttgtttgattgatagtgcgaggttctttagtaaaaacatcgaacaaataatgttaacataatttatgtgttgtgatcaaccaaatgatttgcttatttttatttaggttggtaaattaataatttcaacctggaagtaatcgacaatcataaatttttatacacacttaacactatgttatacaccacaattggagacaccatgcgccatgatttaggaattgacaatcactagtatccaatatgttagtgacaccacgcaccacaatttatggaccatgattatttgttatccaacacaatagttaggttacactttgcaatacaattttagtatattgcttatgtaattgaaacacatgagtacaactctggatgccaatgaatgtcataatgtagccattacattatgaatataaagggtgtgtttggtatttacgaatattaatgggaaaaaatagaaacaaagataaatcttaataccacatgcaagagagggatcaaaatcttattaagaggatgaattggtttccatattaaagaatttattattcttatttctattctaaaaaacaatccaaattaacacattaataaatagaactagaattgatttcttattcctattttctatttcaacattatagacaagaacattctttgaataaaaagaagcaaatgttagagttttaccagtctaattttgttaaactaagtgaaaacaagtaaaacataatctaaattaagacaactttttttccatgcaaactttttcttttcttacatattaaaagtagaacaatcatagttttaagaagtgaacctgcatgaattgaatatataagacataacatcctgagttgcaactagctttttgggattgccaatggtggggtttgagaaggtaatcaattcccttctaaggaaaatggaggcaagaaaaggtcatcaagttgaggttgcaggggaaagaagaaatcgtttctggcggaaggagatttgaaaaggggagagagatttgaaaactagaatgcttggtcaactacaattgttcacctccctcaaggaggggcagtgaggtctaagctcttctttttgaggtcactttcttcgattccaacttgttaggttttaggggttttcttttggtgcaggttgtgcttttagcactgatccttcccaccaggagagtccaactgtttttgaatgttgtgttttggttggtttcaaggtggttggtatttccctcctctctagctatagccttttgggcgtttttttaaatatattctctcatttacctattaaaaaaaacatccagatttgcaacagaaaaatagatatattctataattttatgttacaaaaagaaaaaagaaaaaaaacagaaacgtctcattgtcaactgatatgtacaccaaaaagctttacacccttcttcagattattttgagatattggtacctcatcctcagatgaggtaccgttgtttagattttgtgccaaatctaatttcaatgcatgatcgaccccttcaaccatacttccattgccttcactattaccatccattctctttacatcaatgacacaaaatggctgcccatcgtgaggcattttaggtgattcacacatataaaaagttataatatcctttgccttcaactccttttctttcacaaatctattccagccccttgtgaagacgaaactctgactactactccagtaacaataccgaaacttccacaggcgcatccacctgtcgtaaaaatttaaccttgtgttgtccacagcacttccatctgcattcccttccccattgtccgatacctttggaaaatacttaactgcatacttttttggtataactagtctgttaagcttaccgacatcgcttggagttagttccttctggaatagttgtctccacatcatgcctccaccgccctgggaaaccttggcattgtgatccactcctttttcctctcgttttcgatccaaaaagctcgaaaaattggaggaatatgatccatccttgatcatatttaggactgcttctgttgtgtaatggttttggaagtctggttcttgaaccgtaagatttgtccacggaaagtttctctgagactctccatttcgaagcttaatggcggcactgtcatacgccattgctgcctcctcctccgatttaaatgtcccaagccaaatcctctgatgatttgcatatatctgtgcaccccagttaccgttttgctgctgcacaactcctttgaactttgaagaagaagaagaagaagaaacgttgttctcatatcttgtacgcttccttgcatgttgtgtgtaacaatagctatttgcatctgaaacttccccatggatcatgtgtctctttgaagttggcatcctatttaacttttaaatctgaagaaaaaaaaaagtaaaaaacgtaatgataacaaaagccaaatcacagataaacaaatagcacacccatgacgtagatttaatgtagtctcaccagaggatttgactcggtcttggggattggggctcgggtgcctttttaggagacgtatagaggggattataaaggaggccaagaacagatactgtattttaggagaaaactgtgaaatcagatctggcaatcagagattttccgttgctaaaaaggtaaaaattttctatttgtaacaaggagagtcctacaaactaaacaaaatttgtgtaaaaaccaaattgcagtgtccaaggttttaatttaagaaaaacgttagcacctaaaaacacactgcttttttgtttgctattattggattaacagcttatttactgttggatttttggtattatcttcctgttatttgcttttattatttacttccgtaattattgcaagattcccttgaatcctatcacaaaaacgttctttatccaaataaaatttaatattattttctatatttgatatttcttcccaagtgtacgatttcaattgtttccgtgtcacagtatttaatttgctaaattaccattgtgaaattaaatgaattgaaatattttcggcacaaaattgtttgtgatatgtctgtatggtaaattctatataggtttcatctcctacgatgtttgccattttccatcctatttaattattttcacatgccacgtcactgtcagataatattaccatcctagtaaattcaaaatcctcttgttcgatctattataccattattataaattacgtaaaataaaattttaaattagtgttttacttcaccaggagtctccatttagagacataaataagcatgggtttcttttgattctttagttttgttttgtgaaaattatctttaaaatataatttcaaaagcaaaatatcaattcgtagagcaaaaatagttacttatatttttttacttattccaaccaaacttttaccatatagatgaaaattttttatagttttatgatagtatataagatttaactaattaattctattatgaatttttgaagtttttaatagaaatttaatccttaacaacacttcttcaaaacatatttggttccgaaaaatataaggggaaaaaaaggatgagaaaaaatggaagaaaatataaattagatttaaaatcaataaattattttaaacttatttttttattttttatgtaaagattaaataattttaaaatatataaatttctatctaattttaataatatttgaatttttttattttttaaattgaaatcatgagaaaattatttttcttaacaatttttttcttttcttagtatttttcacaaaccaaacatgacctagatattttatcatggatgatgtgttaatataaaataaatttgagatataccaagtgaatgaatgaaatgttgatataaagaagtttgagaagattgaacattactaagaaaattttttgtttcatcatctattaaaaagattaaattagacgagagtggaagtataaagatttttagacttcttttatctcccaaatttgcaacatcataaaaaactagattttaaatcctatgttcataacatctagtcattacttataaaaaaatgacattaaaataatgtttaatagctttataataataataataataataactattttataactacctctaccatttcattaaaccgtcaaatataaatctcaactttttcctctatcatgccattttagaattctttgcttaaatttttgtttaatggaagttaagttattaaattttagaatactaattttcaatattttaacttggataatttatttatttaattttgtacatgaaattcttataattaatttccgttatttacagattctgtgactcttcacttcttaaaaaggattatatttaatccagatattttcatcctaattttaatactttacatataaatctgttattataagaatttcatgtacccatcgttttacatcaataaaaccgaagtttttgtatttttaatttgttttattatccttttttttttgtattttttaattgatatattttcacattatcatgttttgtgtaattataatttgattttttttttccagtacatagattttatagacactattgtattaagatgggattcgaaataaatatatatatttttttcttatgtaggagttaagtagtcagcaggaatatttgaaacttaa

SEQ ID NO: 13000 - DNA, 14554 bp, Vitis vinifera
  Intron number 1 from transcript GSVIVT01036211001 (locus G SVIVG01036211001) derived from phytozome v7.0 (chr-ID chr1 4; pos 8947404 to 8961957)
ttcacattcgtcattccactggcagattcttcaaggtctttataatcttcctcctctttcttttatccttcttatagttctctattttcttctctctgcttacagaaaaaacaaaagaaaattttgcgtctttctgctgtttcttcgctggctttggtttttggaaagccagaaagatgaaaacaatgacgggattggggaaatagaatccttttgataccaaattgggaatttcagttcttttcatctgttttcttaacacagagatgatgtagttattccaggacataggtttcgctaatgttgcaatatagcttttttttcccttctgcttctcatttcacgtcatgatgatttgacattgatctgtggcttatcttgcaattttttttagctcctttttttagcttctaactgggtacaacataactttctgtaaattctggggaattagcccgttcctaaattttaaggagtgaaaaaaaaaagaaaaagaaaacagagaagataatttctagagatctttatccattagtttatatatagttaataagcatttaactgctacctcatacactccatgtaagaaggtgaagagaaaggaaggaaaatttttaaacttttctctaccctgttattttggtttgcaattgacaaaaggaaaagaacatgggtggaaaatcatggggcaagcttagtatgacattctcagaaaatggcttttcaggggtttagagtgtgacatttttagaagtggcccagagaaatcttaggggcttagagcttactcccaacatgacgggatttgataattttattagatcatggagtaatgttaaccccacgctaaagaatgcattattaacttggtaaaattcaagaatcactagtttgtaaaaagacttgatcaaattttgttttcaaatgaatgagattccaaattttccaataattctagaatgttttccaagatctttttctgatcatttttgacttaggagctagtgttgtgatgttttgggaatatgtggcttcatcatcccaattttaagtgatcctgagaaggaatgctagatagtaaggaatgatagagagaaagtaatggtagatacactgaaattatgggctgcaaatttggagcaaagtcacttttagagacttaagtgagagaaaagcatcctttcttaaggagataggaattttagctccttagagggggggccttttaatgggtagtctcagagtccttagagttgcaaggacaatggagctagaggagacgtcattgataaaagatgtgagttggagatgaatatcaagtagaaaataggttaggacaggtaattgcaatttcaaactctcccacatattgactagtggtagaaaaaacaaaagatttgattaaatctattcagacagtggaccggttggtgtttgttgacaaggaccacttttttgaggaattcttaagttttcaccgtcacctatatgctagatcatatgctcaaatttggagaattgaggatttagcttctctttcatttctacaaatagtgcggatcggttagagcatcccactttggccaataaattaaagaggcagtctttcagttggatacagagaaagcctctcgtgatcttaggtggggagatcctttatctccatttttattcacaaaaagtagatgtttttagttaaataatgatgttggctgaagctagagatattgccagggtttttgagattagggggtttagttttaggatactgcactttcaatttgaggataatactactttttcttgaggacccaatacccatgaagtccataatgttagacttcccctctcagctttttctctcatatgttaggtcttaagatcaaccttgaaaatagaaagttataatgtggattggggtcatcttagtatactttgctaaccaaatgtgccactggcttttggcctctattttatctgtatctcacttcagggagaaatcatagagctccccactttaggaatgctttaattggaagaatcactaggaggttggatggcagcaaaggttgactctctctctctctctctctctctcgctctctctatcaatctatctctttcctttttccttttgagttttttgttgttagaaggtaaaataacccctgatcttatctaaactacatctttatgtactacttgtctatcttcaagatttcaatttggatagtcccaaggtttaagaaaacctagtgtgattcctatggttgattttgcgaagggaagagagatcatttagtaagttgatgtcaggtttttagaactaaaaaggagggtgacttggttctagggaggatttctgctaaaaatgaagctttcttgggtaattgattgtgaaggttgtacagaaaaaagtaactctttctagcatatagtgttattacaagtgtctatggttgacactctagtagatgggacattatttctagggtttcttggattttatatgctttattaatttttttgttgtgatggtttgattatgtcagtggggaagtttatcaatttgtaatgcaataatagtaaagataaacgatggtcagtgcagtgagatttgtggaactaatcacgcctccacgcgtgtgcatcaatccatacctaaagagactcaatgttttaacatagtgtgatcaattaggcctatatccattgatgagaaacaagcatccaagatatgtcatatagaatatcataaagaaacataaacatagataaaaaaacaattgcatattttcctgttcctagtatctactttcaaaattcgagctttaaagtaaaccatgtttccttgctccattgagtgtcaaccatctctctctttctctatgtacttagtagactccacagactcatatctatcttataagtttgtctttttgacctagcatatttgtagagatatctctaataccttttcccattcaacaagggaactttttattttattttatttttttattttttataagaaggtgacgaaacaagaattctccttctacaatatgtctactaaaatgaaattaatggttgaaccaaatacagaatatgagggttttccatcaattgtcatcttcactcaatttccatcaagttaatcttttatttttccatgatacatgcattcattatacatgtctcctccatacatgcctccattggtgcacattactccttcaattagccactaacaatatggtctatcagtgtattccacctggaaaccttttagagtgtgcatctctgctgcatactggcaaagctgtgtatagactttaaaaacattgttcccctttttctactttccatgatcttagaagtgtacaagacgtactatcatcaattgagtatatattccatgtgtcatatgccaagaaaagagtaagtcattccatctttagcttaattatcttttgcaatcttcttatgcattccaaatcccttcattgtttttatgttcaaccttaaataagatgaatttaccatgattttgaattatccactactgttctaaatggattcttcaaccttggcctttttagaatcccttatagaggcccttatgctagttagttggaatcttgtgacttagatgtggcttggtgctgcaccaaggttggccgactcagacatgactgggtgctgcatcaaggtgggctcacttagacatggctcagtgctgcaccaaggtaggctgactcagacatggctcaatgacgtaccaaggtaggctgattcagacatgacagtgcatggctgacatgagacaagagtgtgtgggacatgacacgtcgactcttgtcacatgcaagacgtggttaggccttgcaagggtagttccattggtgcctagacatggacaataacattgatgtgccaggggcacaaggatatggcctgaagcatgggtattacgttgtgtgttaaggcgcactaatgcatcaaatgggttgatatgcagagacaggctgagcatgcatatgtaggttgactcgtgtacaccagccaaggcaagatattgatgaggtttgacatgcaacgaggcaggctagatgtggcttttaggcttattccatcaaaaggggcatttggctggttgcatggcaaccaatgggtttgaggaaggcattagatcagagacttgtcaaatggggctgtgtggaggcatgaagaggcacctcaaggctcaaggggtaagatcaactggctgattatgggagttatataatcaccccaactgccattttgaattcaaataggttgatgcttgaatttgaattaaagcatagggatgttgccttagatataaataggatcttccattgcctttgaaggatcaaagagagaaggttggtgtgggaactcgattctttgacttaggcaagcaacataagtgcttgacacttataaaaatgttgtaatcttgtttatttgttgagaaataaaacaagttgggaagctgtcctcgtatgggttgtgttggcttttcctttgttgttccctgatcaggattaggaaaaaggttggctaagtagagacttacggcacaatcacaaaaaaatttgtagcaggatttgtgagtgtgacaattaccaaataagccttaacttgaattggttctagatttgccgacaatagaacatactcaaatgccactcactttttcgatttttctcataaaccaaacgagttccaaaaatagtgaaactcttcagatttgctctatggtgagtttagaaaattatgaaattaacttatagacccataataaattcaaataaaatcaaaattcctggaatccaaaactgtctcagcacacagtgctaaaagcctactaatatttgccaaattctttttctatgcaaacaaattcaaagtcaattaagattgaactcttgggttttgtttttgagtgtggtaacatgtacaaatttctaagggttaagatccttagtcaaaacgtcccaaaattttgagatacataagtggttcaaaattgtctcaatcaaatcaccctgttttcatcaatatgtttgaaatttttgtacttttctataggtgtccaaatgagatgccacttaaatggtttgattccttagagattgtaatatcttataaaataaataggagttctaatatccttccaaaaaatctcagaattttgagaaatgtgattagtccaaaattatctgagctgactttcattgatgtttctcaacttatccagaattttcttatggggctcatgttgtccaaacgtaacgaaatatatatggttagacttgttatctagtctactatttaacacacacaaaaaaaaaaaaaaaaaacaaaaacaaaaaaaaaaacaaaagacaaaaaacgaaaaacaaaaaaaaaacaaataacttgggatctaaattttttccaaaatatcccaaaaatttaaagaacccatgtttgtcagaataccaaaaataggatattcctccttcacgagaattttcttctttccatggaattatctccatcaacccaacttgaatctattgcattagagatgattgagctttgatttgggtctccctaatgttgcaataacttggaggtcacttattgtgagttgaaaaggcatagccaaaattcccttaagtagcaatgctataagagttcattcccatatacttcccaacaattatatatgaatttagaaccaaatattttccttcactttctgggttgccaaatagcctataatttgagtaaaataaggttttaacccttcccttgtgcttttgttccaagtaatgagaatacttttacaaccacacatgcttttggacaaaattttgtttctatgttgactttaaccctttctttcacttttgcaacaactaaatagtccaaaaaacataggaacaatgattagaagtactgaaagtttccgcatatgctacaattagtttctaataacactttcccaaataaagagatgatgaagaagagaaagtagaaaaatataaagcaagattgttacctctaatgttttctctttacaaccatcttccatgccattcttctcaacaaattcttaaggaaaagaggaagagaagaagaaaaaaaatggtgaatttctctcctatttagccttatatacttttgaagtgtttgtaagtttattcctaagctctccttatcatcatgaagagataaacacatccctagctgacacaagaataacaatcatggtcttaaaatctctacactcctttgagtgtaccaattatcccctacttactttaattaagttgattaactattacacttgatttcctatttatatcaaatttacttgcattaatgttagatctttaatattttaaagttgtcaaatttatgatttaaggtgaatttaattggctataaaaattagggaagtttaccctttttgtatttattaaaaaaaaaaatcttgggttgttacattattgttattgcataataaatttgtatagaaaccatggtggaagattatgaaaaagccaaggctgaaggattcattgagaactatggtggagagttcttgaaaaacttggagacttgagggccatgataagatttatatcgtgcaacagacataaaaatttaatgttgtgtatgataagccttttgaatagagtcgaatatttcaaaaaggtttctagtggagtacatatggttgtctacatgataatggctttttttagagtcatgtatagtaatatagactcgtagaggagacacacatgtggcagaggcaagtattatggagagatggaagattgacttgattgaatttaagtctaaaatttgttggaaaatgtctcaaatttctattttggtttagggcattctcttcgagttgattatgatggactagcgagatatatatagggaaagtaggagagattagcgtagagctttgtggaaacccctctccatttggctaacttatgcttttatcttgatggttgttctttaggactttgggaagaatggggactgatggagttttaaaggattgttgttgtagcatggttagaccttttgctagatcatttagttttggtttagccatagaagcaaaaccttaccattactagagggcttgattgatgtgaggactttaggcttcaacaattttctagcggaaggggacttgatgattgatctttcttgggtttctcgaggaaagagagggccttggagtttaaatagttagattcctagcgctgccaaataatgtaggataagttagttaagtgaaggagttcagagctgaagatttttgttggattaccacctttgcatggtgtaggatgttcaaacttatggggaataattaggtttctaccctagtggtggaggctatgttgattatatcttttagaggttttttgggacttacttgaggaaggacttctttaagcctcatttttctagattggaatctagtttgtagaatcataaggttgactgaggagatactttttgaatggttaccacctccaatggtttttgttaagctaaattttgatgggtattctttggctgacctaggatggctaaggattggtgggacgcttagggactactttggcacaatggtaagaaaattccctttacaggtcaagatttagctgttgaggcaaagattcttgttcttttgggagggttattgcaagggaaagctttgagcttctctaaactcttattaggagattttgcttttgtcatatcatggatgaataagaaagaaagaggactgtggaagtgtgatgggtggttgcatcaaattattaatatttctttagagttgggatgtttcttcttttaggttccttatgtaatcatgtggtagatgtgttagcaaaatatacaaatggatgtttggtttcttttgtaggagattttatacccttgtgaattgtagctagtgtcaaaatattgtatgaatggccgaataccttggccttgagttttgtatattatatatagactttacaaggatgctatacatggaaagcaaataaaagcaaataaattcccgcatgattctagccctatacatgtaaactataatctgtcaaataatatatgctaactgtacagaataataaatggagaaataaggaaacaattgtgggctaaaataaggaaacaattgtgggctaaaataaggaaagaagaagtgtggacagcaagttgtcatggagaaataaggaaacaattgtgggctaaaataaggaaagaagaagtgtgaacagcaagttgtcctttgacagcccccctcaaattgatgcaggttaatcaacaagcatgaatttgctacttagcaagcaatgtcgatgacgagggagagccttggtgaagatatcagcaacttgtaagtcagtggaaatatgtggaagagtgataacacgagcttcaaaggcttcacggatagagtgatagtccacttcaatatgctttgtgtgctcatgatagacaggattggctgtgatctgaatagcacttgtattatcggtatgtagaggtgtaggatcggtctcagaaaaatctaactccgcaagcaaacctcgaagctaaatgatttcagaacaagcaagagacatctcccgatacttagattccgtagatgacttagagactctgtcttgcttcttacttttccaagatatcaatgcatcacctaaaaacacacaccaaccagtgatggagtgacgagtatccgcacaaccagcccaatcagcatcactataagcagcaaggcgagtagaattgcctgcagggaagaacaagccacgagtagaagtgccttgaacatagcgtatgatcctacggacaacatccaaatgaagatgacgaggagtctgaaggaactggctgacttgctgtacagcaaaagaaatgtccggtctagtaatggtgagataaacaagactacccaccaacttcctgtataaactgggatcagcaagtaagtcgccttcctctttacgaagcttgacatttaattccatgggagtatcaacagaagtagccccttgtagaccagctgtagccaccaagtcactcgcatacctatgttgattgaaggaaataccagagggactatgatgcacctcaagaccaagaaaatatgtgagagactcaagatctttcatatgaaagggctcggagagatgagttttgagctgaccaagtaaagcagaatcggaaccagtgatcacaatatcatcaacataaaccaaaagaacaacaatacccatgtttgatttccgaagaaacaaggaagtgtcatacttgctctgcttgaatgaaaattgtaataaagtggtgcggaatttatcaaaccaagccctcggagcctgtttgagaccataaagagagcgacgaagcttacacacatgtgaagtcggagagggaaacaatcccgggggtggcttcatataaatacactctttaagatcctcatgaagaaaaacattttttacatccatctgatgtagtggccaatcactagaagcagcaagagctagaatcgtacgaacagtagtcattttagccacaggagcaaaggtctcttcataattgacaccatattcctgattattcccaagtgcaacaagccgagctttgtaacgatccaaacttccatcagatcggaccttgactgagtaaacccatttgcaacccaaaggaacaatagtgggaggacagggctcaatgtcccaagtgtgattggcctctagagccgcaatttcttcctgcatagcttgtcgccaacaatcatgcttggcagcatgtgagtagcatgtgggaatatcaaaattggacaatgtagcagtaagggctgaaatagaatttccagaactggaagagggaaatccatacctattcggaggtacagacactcgagaagaacgacgtactgaaggtgctggaggtactgcaactgactgaatctggagcgtggtaggatcagatatcgggtgagccatcgaaagagactatgggcgagagcgtctcgtatacacaatacctggttgaaagcgagaactgagtggatgaagatttgagaactgctgctcaaaggaggggaggaccacagtagaagaggatgacacagtagaagaggatacaggaaagaaatgttgattttcaaagaaaataacattcctagaaatacgtgtacgatgtaatgtaggatcatagcaaacaaatcccttttgacacatattatatcccaagaaagcacatcgaacagattgagctgataatttatgtcgctcatgaggaggtaaatgaacgaaacatacacaaccaaaaatacgaaggtgatcataactaggttgcttagcaaataagcggaaatagggagactccatttgtaggacttgagaaggtaaacgattaatcaagtgagtggcagtttttagagcctctacccaaaacatggatggaacagaagattctaacaagagagtatgtaccacatctagaagatgatgatttttgcgttcggcaactccattttgttgaggagtagagggacatgaacgttgatgaataatatccttagaagccaagaatgcttgaaactcagtagacaaatactcaccaccggaatctgtgtgtaatgtcttaatagaagtagaaaattgattgtcaacatacgctaaaaactcagtgaaagtacgaaagacctcagatttagagcgaagaaagtagacccaagtaaatctgctatgatcatcaatgaaagtcacataatatttaaatttctcatgtgaactaaccgaggaaggtccccaaacatcaatatggataagatcaaagcagtgagatgctctacttgcatgcaaagggaaggtaagagttttacttttaccaagtttgcaagaatcacactcaagagataaagaagaacgatccttattatcaggtaaatcagagttcaatacatgagataagatctgagtattgggatggcctaaacgacgatgccacaccatactaagatctgaaacattattacaagcaaaagactcaatagaagaaagtggagaaaaatctggaacaggtaaaaatagtggaaacaagcgccccactttaggtcccttcgcgatcggcttcctcgttacctggtcctgcacaacacagccattactaaaaaaattaacagcacaattgttatcaactaattggccaacagaaataagattcgtggaaagctgaggagcaagaaacacatcagtgaacttagaagaggcatcgccgatagcagctatgggcaaagagctgccattggcagtctgaatggaagattgaccagcgtagggccgaacatgacacaaagcggtgggattattagtcatgtgattagaggcccccgagtccacataccagagtttagtggaattgttaccttgaaaccccattgctaataatgcagaaattaacatctgttgcaccatttctggagtgcagtaatttggtgcaggaggtgcaggaacagagcacgcagctgaaggagagtcgtgtgctgcagaagttgctacaggagggacaataaccgaagtttgaaatgcttgggtctgacgattctgggggcgaatatgatattctttgataatgtgacccttcttcttgcaataagaacaaaaattcttagggcaagtggcagcaatatgctcatattccttgcagcagaaacattgcaagtttttagaatgcacaggtggtccgcgtccttgggcagcataagctacagttgccgtctcggaattgccatgagattgctccagaatagcttgagtactaaggcgttattcttcgcgaagtaactcaccaaaacaaatatcaagagagggaacaagagatctatttagtaaagaggagcggacagattcatattccggacgtagtttcataaaaaactgatcacgcctggtagtcgcgtgaatagtctgaatagttgagagagcggcaataggaacattcgctataaccaaatcaacatattcatgccaaagagtcagaaatgccgagtagtagtcctggatggaaagactaccatgttgaaacatgacaatcacatgttctaactgaaagcgacgagcatcgttatcttgatgataaactttcttcaaataagcccacatagattgagcggagcaatggggctgcaagtgggtgacaatatgaggctccactgaaccaagaagccaagacatgatgcgtgcatcaagcacaacccatgaaggagaagacccaacatcctgagatttgtcaaaagtggatggtttttcaacatccgtgccatcaatatgaccctaaaggtcttttcctttgagaaaaagttcaaactgaaatgcccaggtagaataatttgtgcctgtaaacttaacacacagaggtgcggaatccatagaaaataaatagaacctgagacaaaatgatggaccaaaaaaaaaaaaaattcccagaagaaaactgacccacgacagccacagaaataccgagaaaaatggttgtggttgggtgtagaacggatcaacacagacttgaccgaaagacacgagaggcaccttcgaaaccgagaagacagaaaagaatttgagggaagaaaaatttagcaaccttgctctgataccatgtcaaaatattgtataaatggccgaataccttggccttgagttttgtatattatatatagactttacaaggatgctatacatggaaagcaaataaaagcaaataaattcccgcatgattctagccctatatatgtaaactataatctgtcaaataatatatgctaactgtacagaataataaatggagaaataaggaaacaattgtgggctaaaataaggaaagaagaagtgtggacagcaagttgtcctttgatagctagcattgctcttaaccattttggtgtgaacagataaatttgcctttttgatttgaactagtatacacttattcatcttttttatcagactatatataggcgaatttgtacatcttagaaggatttctcatccttctttgtatttaccatttcaatgcaatgaaatggttgtttctgatcaaaaaggtttttgttggaggaaattaaggcaatttgagtggaggctacctaccataccaaaatcttcagcttccagttttgtaggtctagacacccatctgacctccatccgaaacctactcaaaagattttattatgctataggccaaattaaaaatctgaactgttaaccataactacaacttagtgttatgaaggcagggtgtacctagaccctccctctcttctttttttcatttctctgtttttggcaaatagaatattatagataaacacctaacagaaaaaaagagagagggggggacctagggagtacaaaaagcacaccagaagacaactcaaaagagagcaattgcaacaggccagaatgcagcctgctcatctgaaaaattaacgaaatccagaaaagaggaatatgatctctcccaaccatcttcccttgatctaaagaaaaaagttctgaggaagtggtcattgaatactaattccaacatctcaacaccttcagaagtcctattccccctcttttccaagcacaccaaaataaggataaaggagctgttctccacaactttttgcatttcagtcccacaaaaatgtgatgccacccaagcaagtgctctttgactgctttaaggataactcacctcagactaagaagggagaataataaagactccagaggagagaaacattataattaattcagaattaatgttttgtctcctttattggaattctgaaacctcacattattctataattaactaacttcttcaagttttttctgagcaatttattgaatagttaaaaagtaccaaatcatgaacaagttttagtggcttgtaaattcttttaaatgtcaaaaaagaagattctgaactcagatattattgtgtgcactgaggcacatcctgctcactaccgacaaaagctgaagaaatgagtcacctgttaattcaacacaaatctaactttcctcactctgggcatgtatcttggataaggatgaaagattaagagggcaatctgcaagggaaggctcttttagaaagttctgtccacttcactttcaaattgtttagaaatcatagaaagagatgttgtacacctcagtgtttgaaaatttcagctttcatttattttaccgcatatatttaatcttgaaatttgatttatgtttaaagaaatgaactttttttctctttctgatttgcctgagttgtggctgcttggttgtcagaattatgcagtgaagtccacatttaggcccttcatgagctttttatgatgtatatttgtttcatatccttgtggctaagttttaaatttttggttgcaggagagacgatacttattgaaggaatttccagaact

SEQ ID NO: 13001 - DNA, 2893 bp, Vitis vinifera
  Intron number 1 from transcript GSVIVT01029512001 (locus G SVIVG01029512001) derived from phytozome v7.0 (chr-ID chr9 ; pos 22094769 to 22097661 reverse strand)
ggatttcctatttcgtaacctcagtcagcattgggttgatcttctcactatgagcattggaaggaataagcaagccattgttggttgcttccatccatcccaagtaagaagtcttacttacatgcatatttctaagaaatttaaataatatagatttagaaactaaagtgaatgatgcaatgagattaacaacattaagttttattttacccaatggttgttttaatctggttttcctttcctatactttttctctgctatggtctttggcggctattttaatctggttttcctttcctttgcaattgattttcaaggtctcaaacttgttgagaaaaattgcaaccaatcatctatttcattggatgagaactaatcaaaagctgacaaaagttggttacactaatttgtgttcatgtaaaacttgaaaagaataatttgatacatctattttattaagatattaaattttaataaatatgctctcttttaaatatgctttgtttatgtgctcacaaggccatcaatataggaattcaaatgaagttcaacttttctaagttttgaaagaagcgaggacatgtacaaacaccagagctacttatgctgagttttattaataaatataatcaccaataaataaggtatttgacatttgaatcttgaaataaaattttgtttctaattttttttagaagctactattaaaaactatttttaaaaatattatagagtcaaatgtgtctcatcacctaaggttgtagacaaatagcaggttcagggtgcaaggtacagcatgggaaaaggaattggagaaaaaaaaaaattaaaaccaagatggctaaaaacagggggatgagtgacaaatgcaaactaccaacaaagaggacatccacttgtaatcattcttcatccactttgatgccccattcacttcttaacaaatctcttctctcttatttgttttttagtgtcttaataatcctctgaccctttattacgtctcatctccattcaacctttctagaaaatgaaatacagtttctctcaatagtgatgatgattttgcatatgcaaacaacaactgggcatattctgactctagtccatttggatgaaatattttttgcttgtctctcaaggaatccaccagctccaatctacaacaaataaaggagagctcacacacaacccacactatgggaagacatcatctttatataaagctttgatgaggtgaatgatgaaacctgggaaaacaactgtcagtgactttccttgttgattcttggagtttcaatagagcccgagcatgtaagccttgtatatctcaaccaagcaaatgcatgagatccaacttcatattcccacttaaaggctaccactatgactccctctatccaaaatagaagcacatcacataattaaattttagcaatgacaaccaaagctatattcgtgaaagagggagcaatgaactcgattctgttagagaatatcatctcctttaaaatattccctcaatgtcgtgtacaacatgaaaaatcataaaacatatttatgatgagttgataatgactgttttaagaggtctaaaataccttaaaacatatcctaaaatagataattaaaaacatacaactccagcaaaatctattcaaaacctaaaatatattacactgagattgaagacgttgacatttcatgaaaggttaaatttaataaaccaattgcaaaatattagataataaagtgcaatttaaaaatcaaaagacttaccaatcagatgcagtaactagaactccaacccaaagctgcaaaaacccagaaccaagaatcacctcctagatattagccccaatcagggccaactctgccatgaatcacaacaatagtccaacccatgtgatactctttcctatggatttgggcaagatgatgcccaatggccaccccaacccttgcgcacaataactagatcaagaagggaagtgagtctcgtttgatggtaggtcaagttttcatcaatacatatctatttccccaatttaaaaaataaagaggtttgtgtctttatctttgcccattaaaatcttatctgataactcacatgttttaacagtgaccttatatcttatattaatgatcagtcatgacaagaaactagtaaaccttccatattccattaatatcgagcatagagaatgtcctagtgtcctaaaaatctcttttaatgataaccaaagtaaaagagtcattcagatgatttaagtttttatccatgaaccaaagggagatactgtactggtggccacaggattcatacttaatttgggtgggttaccactgaagtcctgtctgcctagaacaagttcaacacccaatgggcctatgatctattcaattcagttgggttgtgctggatttgggcccagggtccagcctgaagttaaccctaacaatctgtacaaagcatctatactaatattaagtccaaaattgctgttctatatatctctttctatctataaaaagattcttaacattacatggactaatatggcagttatttctgttaaattcatctattttttcagtttctttcttcaactttttcatttcacatgttatatatatatatatatatatatagaatgtataagaagttgaagacataagcgagaacaagattaattaattaatctaagcccaaggtgttcaccctgcccaaatttgaattgccactttctcattatattattcttcaatacattaaattaactaattaaagaagtagaataaggtctaacctttttagtgttgaattctactcaagagaaaaagatactgcagaccagaccatttacatcgtcttgtaaaatctcttactctc

SEQ ID NO: 13002 - DNA, 12428 bp, Vitis vinifera
  Intron number 1 from transcript GSVIVT01011809001 (locus G SVIVG01011809001) derived from phytozome v7.0 (chr-ID chr1 ; pos 3945840 to 3958267)
tgagtttgattcatttgcttgtttgtgaatttggggttggattgatatcaaattgcttatttctttcttctttttttttttttcactctctcttcttcttttaaaagaatattgatgcggttccttcttcggaagtctgaaatgtgacttgtgtaattgatgttgactgagtgttagtgagatacgaatttcaagtttgaattgccagtcatttcatgacagtggacaatgtgatattaactcggtgtggagacatttaacttatattttccttgatacatattattgaggggttgcaagactggtgctgtctagacattctgagactggatgggaacagtgaccttaagttgccattctaatctactaatggaaggccttttgtacaagcctccatgaaagtccttattagaacaaatctaatgacgcatcttccaaccccatttatttttttttttatagtcataattgcttcgagattgtgatgcattgctgctttttcttgagcacaaggcttggatgatgtagctaaggtatgcaatacggggaatgcttgaatgcatgattggttggctatgcttgagttggttgagctattggagcatcagtaaatctgtgattacccatcattggtgcctggattgaaccttctggcattatttcagtgtcatgtggaatgcttattgtttttgagaacgttttggccctttgttagaatgaagatgcacttggttgtcgtcttgttatgccttttgctatgagtatgtgttgctttcactagtctatcactcgttcttaaggagtatgctgtgggcatgacatggtctttaactagggtgggcattgatgatgccttgatggattctataggatgtgcatttgtgttattttttatggctatgggaaccatatcttcttgtgagtgtaaggttcgatatggaggagatattggtgttttgactaacaaggtgatgggtgtttggaacttgttaaaaagttgtatttgtttgttaatctcaataaacatggctaggtttttttagcactgacgtgaggatggtgttagctatgggctagttatggcttcacacaatttgatttttatgaacaatattggatttagacataaagatacctgtatttcaattgcatgcataggttatgctgctgtgtacttatcttttatatggggcaaaatttttactcccatcatgcatggaatttctttttggttgctttctagaattttgttttctagcttagtacaactgggttgcctttttattatgaatagattaaaaagccacatttctttggtagttgctgtttattggtatcagataagacttcgttctattttctatgttggccatggttcaaagtcctggtattggtcattgacttggagggccccaaggcacatttgtcttagcatttgggctcggtattagatgatatgcaaaataagatagttaaaaagttcaaaaatttatattaacattatgaaatttttagaaaaataaatataattaaataaacttaaaaaaataataaaataaaaattttctcacatttaacattatttaaatagttataaaatatttgtaggatgtaatttatgataatattaagaatttaaaattattttatttcaaatacaataatattaaactattatcatgcaaataattgattataaaatctggtaatatattaccttagattaatgcaattcatactaattcataccacattaacatataaaatgataaaatgtaaaataaacatgactatcatttctttaaatccccaattcaccataatgcacacctacgaggaaagagaaaagggttgacaaaagcagagatagagataagggcagttgttgttagcttgtatacccacacccatgacactagagacccaaaatagagagacaagagactagatgcaatgattggcaatgtaagaaatccagatgatgtttctcaacctcctcttcttatacagctccagattcactcaagggtaatctttcttcctcttcaccatgggtcatgggttttgattcttgaagagcttttccttttgaagaacatctttgatttttcatagattttttaggtttgaatcctgtttgttgttaatttgttgtgatttgaagtgaaaaaaatgatttatttcgataacttgacggttcaattgagtcaagttggaatcttgatcgagtcaactaagtttaaatgagtctttatcgagtctgagtttgagatggtatcaagtatcggactcgacacagaaaggaccgagacagatatgactcggtcgagtcgtaccggactcagtcgatgctttcaaccatgatgttggttaatgggatgtgtattgatttcttaaaagttcgagaatccgaagcagtgggacctttttctccttatccttttgtcttgttgatggagtccttaggttgttccattgttaaggcaatggagggagactttatcaatgagtccaaggcataggtggaagagggaaaaggatggagatttcatgtttgcattttgccgattataatcttttgtttcctaaggcaaattatgaacattattatattcgaggtggatttcttttttctttgtgattgtatttggttttaaagttaatctttaggaaaactgagctcatcttggtggatgatgtggtaaatggagatcaattggtcccttttcttggttgtaggatggtgcagttttcatctgcctagttggatttttcattggagcccttgtttaaggttgtttatccttagaactctgttgaggtgcatttcaaaaagaggtttgtctcttgaaaggggaatatctgttaaggtgggagactatatgtattaatagagccttttccaccttactgatatactttatgttctctttttgacttctaggttcgtgattaggcttgaaaatacttacggagatttcctaagagcactcatggaaaaaaaaatgcacttagttaagtggttgatggtttgtttgttctgaaaaggctatggtttgatggggtattagaagccccattggtgaggtttactcaaatagaatagcctgtggaggaaagttcttttgggcaagtttggggaaggaggaagagggctggtgctcttgggagaggaaggatgcttatggtacaggtctttgaaaagctatcaagagatgttgcaattgtttcataactcaaaacttgtatttcaattagcaatgacttaggacaaagttttagcgtggttcttggtgaaggggttgcttcttgaacttgttcaatcaatgttgctactatagaaatgcttacatggttgatttgttgcatgaggatggtagttggggtcattgaaatctaaaattttctgggtggtctctcatttagggggtttggagttagtgttgtttttgtggttgattcatttttatgataggaacgaggataggttggtgtgaaggatcccttagtaaggtagtcctttttgaagtctttctaccaatttttttttttttttttgttcatgggtgcttttggtccatttctagtcaaggaaacgtgggattcttatgctccttctaggattgttccccccaccccccttcttttttgtgaagatttctaacaatcgatcaactcatgagaaggattggtttcttgctaataaatgctttctatgtaagtaaagggaagaatcaaattcatggaatgatgcctttttggtcaaatttctttattctatgttggtgtcagggtgctcaattcatttcctagtaggcaatatttgaaattcttgggttccatctaaagtaaggttttttggttgggaagtttgttgggggaagacattgactttagattagcttcaaaggagaggatggtctttggaaaatagatgttacctttataaaagagaggtggaatccattgatcatgccctatttcattactttaaagctagggagttatgacacttgctgttttatttatttatttatttttaagagtcttttgggttcttcttctttggttaaggagacccttttaagttggcttgactactttgtgggcaaaaacataagaaggtttttttttttttttttttttgataagtaaacaagatatgcattagaaaaaggctaaaagccacatagcatacagggagtatacaaggcggctaaagcctcaaaaaactatctccccttaagtggatgctacccactccaaaaagcctataagggagagagacttctcacctaaatacactttgacccagctccataagttacaaacaaaagaattctttaatttctggatattcaacacaccccccctaaaagttaacttattcctctcctttcaaaccgtccaaaaaatacacaacggtatggatttccaaacctttttccttttttccctacaaatgggcccctccaggtagttaagacctcctttacagtttctgggaagacccatttaacatctactaacccaagaataatatcccatagaactctagccactatacagtgtataagaatatgatttacattctcttcttcacaaccacacaaaaagcaacaattagggagttgcacccctcttatctggagcctgtccagagtgagcactttcccccacgtcgcctcccaagcaaaaaaagcaactttagttgacaccctatccactcagatgctccttgaaggaaaaactgagtcattagggttgtccagcagcctataagcttccttaaccctgaatagaccatttcttcctcgtctccacataactgaattttcctccaaagaaggcctatgacccctcaaggtgtggagcaactccccaaccatatccagctcccaatcattaaagtctcttaaaaagactaggttccagcctccttgaccagaattttggtcccacatctcctcaatcgttgcgtccctatgcgcggccaggacaaagaggtgagtgaaacaatgggacatcggtgtatcagtgcaccaagtatctttccaaaatttgattttggagcccttcccaactagaaacaccaaattatcccaacaccaatcggattctttcagaatctccttccaagcccctactccaaccgccccattagccttctttgacctccatccatgatcctcttgcccatacttcattgtgatcacttgcttccaaagattatctttttcacaagcaaacctccaaatccacttgccaagcaaggctctgttcagcatggctattttccttaagcctagcccacccttgttcttttctgtgcaaaccacatcccatttcactagatgaactttcccctccaagtttcctccctcccataggaagtctctttgaactttctcaactcttttagcaacagacttggacattcgaaaaatagacatttggtatattgacatgctagccaaggtgctttttataagagtgatcttcccccttttggaaatgtactgccttttccaaagcgcaagtctcctcctaactctctcttccactccatcccgcatagaagtagccctattaggaacccctagagggagtcccaagtattgagagggcaaggatcccaccctgcaccctaactcaactgccagctcaagaatctcctccacttctccaagtgggatgatttcgcttttggctagattaatacgaagacctgaagccgcttcaaaccaaagaagaatccagcttagatgagaaacttgctccttacttgccccacagaacactattgtgtcatcaacaaaaaataggtgggagatattcaaagaggttttactaccaccctgaatgatgcatcctaataaatatcccccttccacagctctcctaatgaggacgtccaacacttccattcccataacaaagagataaggggatagaggatccccttgtctaagccctttagtgctagggaaaaaactagttggcactccattaacaagaactgagaatttggcagaggacacgcaactccacatccatcccacctacttagtcccaaagcccattttttataggactttcattaagaatttccaattgatgctgtcataagctttttctatatccaatttgcatataaggcccttctcttttctcttctgccacgaatctatcacctcattagcaattaaggacgcattcagaatttgtcttcccgttacaaaggcattctgagcaatggagaccaccttaccaatcacttttttgagcctattagctagaactttagccaaaagtttatagagcccctccaagagactgataggtttacagtcttcaagatcctcaaccccacttttcttaggaatcaatactagaaatgtattgttgaggcttctaacaaaagagttatgctcatgaaattctttaaacatatccataatctcctctttggtaaaatcccaagcgttttgccagaaagctacagtaaagccatccggaccaggggctttatccccattcatctccatcaacgtcgtataaatctcattctttgtaaatgggacctccaagctctctgcttcttgccggctgatgtgatcaatttgaattcttccaatatccgccttccattccatatcttcagaaagcatctgttgaaacgagttaacaatttctttcctcacctcctgctcctctgacaaccactccccattaaccttaattctatccaaagcgttgtttcttcgatgagcacttgccattcgatggaagaaacctgtgtttttgtccccctcccttagccaaatctcccttgaaagctgtctccaatgggcttcctccaatagaacccactttttaaaggtttcttttgcttatttttttaaatcagtttcctccatagtcaagtttctctcgctttccacccgatcccagaaatctacttgttgtagggttgaagatttgttacattccagcctcccaaaaacctttttgttctaaactttcagcttcttgtttatttccttcattttaacagccaatctatagctagcgctgcccctgacttcaattccctgccactaggttctaacaaggtctttgaatctctcaaccttaagccacatgttttcgaacctaaacggagtaggacctcttcttattccacccccctctaaaacaattgggaaatggtcagaaattggccgagacaatctgctctgagtgaccccgctaaattgatctaaccagctaggggacactagaaatctgtccaatctcgcccatgcctggttatttaggcccccattccaggtgaattctcccccctgaagaggaaggtccaccagccctaggtcatcaacaatctctacgaatctcctcattgttgagctaattctcctctggttgctcatttcccgttgaaacagagtgatgttgaaatccccaccaaggcaccaggggtcatcccaaaggcctctaatcgccccaaattcttcccacatgccctccttggccactttggtaaatggaccatacactcctgtgaacacccaacaagccccattttctacaatcttgaatctacaagacaacgtgaattgaccctcctcctagtccataatatccagggccctcttgtcccagcaaatcagaataccacccgtagccccctccgcatttaaggctctccaatctataaatcttccagtgcctagacttctcacaataccctccgacatagcctgaattttggtctcctgaatacaaattaaatccaccctctgatcccttacatagttcttaataattttcctcttagagctttcatttgctcccctcacattccagcttagaatcttcagcttcattggacaactacaatctgattccctttgccctgtgaaggacctttctgcttattccccccctcataattgacaaagcattccagcctctttaattccctttcaaactttgacttctccaggagctctttgctgtgaatcttttcccgtctctttctgattttaatcagaaagctcaggatctccttttccaacccttccgttgaaaatcctagaaattggctgaattttgccaaactgcattcctctcatatttcctctttctcctttctggcatcttgattttcagatgcaccaggattcccctccttatccctgaccttatctctgtttctattggcctctcccaatttccagcacccattatcattctcagaagtcccctcatacactgttaatcatgttgatttatcaccccatgattcctcctctatacctcctgagcgatcgaaagacttcccctccggagcctgatcagaatgagaagaaagaagaagaggtatccccaaaaccctttttcctttagagtggaaaatcaattcatacctctgagcttcctcttcaagcgctcggtccgtcactgagaagcaagctctcatttgctcccttctaagctcctctgattcccagctcaccaaggacttctttgaactgagtccatttctggaaatgaaacagtccaaaaggccagccttctcttggggggcgattgggccagccttttccaaaccttccaactcagttatcttgtggcagcccaattctatagcccgtctccttgacgatgctgatccaccagcctcctttgccgtttcttttgaatttgggcccaatagtccattagtcttagccagcccattagccttctccatctctttaaggcccacgattgggccatatgaggacgaccaaaccacttgtccatctgtgaaggcccattcccggaacaccggaccatggatcaggtttcccggttctagacctgactcattctcctgcagatacctcacatcgtctggcagattcaacatctcgagcctcgtgcctaccagctccttccccacgcgcttctccgtgcatgaattcatatcacccctaaccttgtttttccttctatcatctgcttcagtgtatttccgtttcaccaccggtttgatctcccaccacagcgacagggcatatacctcctcctctacttcaatttccaacacactcggcctaaaatcacctctcgttttgaccagaagcctagctcattgaatctgccccatcgtctttgtccgctcatcaattgctacaaaacccccgcattcctcccctattctctttaaaatcattgggctccacagcgagattggaagccctaaaattttgacccaaacttcattttctatctcctcctctgcccaacagcccgtcctagggttccaatgttccagccctaattgaatccctcctagcactttgctccctgaggaaacaatgcgctttgcttctttcaggtcttcaaactccagcaatgccttgcctttctccaatttagccagccctaacttgccttttagaccctaagaatttgcccaaaaccttcccagcctttccaagtcctcttcttcctttgtgctggatttccagctcgcaacgatgcagtgctccaacttctgtaagtttccaaaagtttcctcccttttgaccttcacattgattgcgtttgagccattccaatttgttctcttgactgtttcctcatacgatttctccggtgcagattttccggcgacccttacttcctgcaagtttgttctactgccaatcgaacctttcatttgatggattatctccgccatagtcgtccatccccttttgtcccttctacctctcggtaagaatatacaaaacctctttctttccaaatccacaacccccaaccttagaaatcttcccgctctgttgaaaccacgggtcagtgagtacaacttccccttgtctttccactccttttcccatttcccttctttttcgtcttttatgcagtggattaggccctccttgaaaagccctaagctttccgatcctaatcggacccatgccgagacccctcgctttttctccacgatgagaaactgacgctttccttttctttcatccaggacgatctcgaaggtcttggattccatcgtgaagcttcgctttcgaatcgcctcgctattctcaccgtcttctccatcgcacgcgctctcactctctctctcgccctctctctctctctcaccctctctcttgctctctcccatcgccctttctcacataacccaaccaccaacttcataagaaggtcttgagactctcataacgaagaaggtcttgagagtcgccttgttatgtatttttttgacctgtggtatgaaagaaactaagaaacttttgacaatgtggagtcattgactcaatgattgaagagttcttttattagaagtttgtcgacttgggttagggttgtacatagcaaaagaatttgtgtttctaattgattttgtatattgggtgggatctagattagggaggagcacttttttgggttttctcttttttgggttgtgccttttgtttccctttgcatacatcctgtcccttcctgtatagctctttttattaatattatcctctcattgtttgcttatcaaacaaaaaaaaaaaaaaggaagaaaagaagaattgactcaccatattgtaaagttatgcatgttgtttgtgatctttgatatttagagtgtttttggtgttaactttatagttgttagaaacttatgatacatcatgcgatatatttttttatggaaattgatatcaatatgtattgcaatctgtatcttatcttaagctatcttacaatacatatacgatacactatatgatatgtactacatcaatgcatacattttcaagcatttttcataatttttaagaaaaatcaaattctattttttttttgttaaaagaattattgtattaattctttgaaacatacataaatgttagaaattgaccataaaaaggaaaaagaggtaaaaaaatcttatatgaaaagttacattttttaaaagaattattatattaatagtttaaaatgtacaaaaatgttagaaattgatcataaaaagaataacgaggtaaaataatcctgtatgaaaagttactttcttgtcgaaggtcacaatgaaagttatataaatttatttttgcaattatatatacatatatatatttgataggtaaatttttgtcctcattgggacttgaacttggggacaaaaatttaagaatttctatttgaatggtttaaatgttgatattgaaaatgatggtgattggtgaataaaaacttttatataatatattactcttttttttttatttcttttttctagtggttaggaaggaatgatggcgaatataaaagttggaacttaggagatgacacataaagacatatatttcaacaacaaatatgagtacatataactagttagaattttggactaaaaataaaatttaaaaatttatttttgtggattttgtgatgaactacgttaattcatattttggttaagctaaatttttcaaaacccttgtattcaatgttttcgtatagcatgataaggtttaactttttaagttgtactatctctcatgaaattagttatatattactctatacttcatgcttccaatatatatggacatgtatgcatattttttctatttgttcttcactatattaaaaagcttatgatacacaatacaaaaaaatagaaaaatgatacacgatacattttatgagttaacaactatggttaacttattctattatggtactttgtccagttgaaatggtagttttattgggtaagagcagaatgagggagggtgtggaggatggtctccttgtgtttgtttgtcatgtttagaaagcatgaaattaaaggattatttatttatttatttatctattctttggagtgttctgaagtggcagtgacagaatttctttctcaaatccctatttgcttggtcaagaggtcatttggcgattgagatcttgtcttttctttaagtcctattgataatcttgagctttttgtattttcttttgtttgtctctatgtctcttggtgctctttgtaagggtttgctaagtgccctgttaattgttgctgcttacacatgcataatagtgcttcaccatatattttacatataaaaaatttaatcatagtttgcatttcaagggctattttattgctgcttatttcaggctatttaatctttacttgccatccatttggaggatatcttagtctattaaatattttaatcattgtgttttttgtctccttaattttgtattgagcaagacacaaattcgtgcatgcatttaccaatgatgcatagttatagatattacaaattctacaattcctacagtggttgtttactgtttaaaccctgcttttcagggtgcttcagcccctgataccattg

SEQ ID NO: 13003 - DNA, 4195 bp, Vitis vinifera
  Intron number 2 from transcript GSVIVT01010869001 (locus G SVIVG01010869001) derived from phytozome v7.0 (chr-ID chr1 1; pos 16641794 to 16645988)
aaggactgaatttgacagcaaactctcaaaggtaagttcttgcatttccacaataactattcttttttcattccttgtagaattttgaatcataaagtgacacgaataatttgataaacaaagaagtgctaggtagttttcaacagctccacacaaaaattgtggtctttagttgtccgggaatgtgcatcgggaatctgccttagaatacaaattgagtaactctatcatatccatgctttttctttaatctgctggaaaaatgttgttgctattgccttccaccaattaattagataggtttcttagtagctagaatcttcaagaggttaacttgacaataacatcttgaccattgatcaatgaccactaataagatatatatagaatcattccaagatgttactcacctgatgataggtgtagcatatttaacagaaagaaatacttcttaactagtacgggacttggtttgcaaaatatagtttttgtatttggttgaatatgtccctcaaatcttaaagctccattaattgaaacttaaaatttccctctctttttccaaaatttgggatgtctcaaaagagagtactagttctatgagcaatgaagaatttatgaaggaatggtgcttgtatgcctgtcctgcatgatacttcttggtttaggtgttgaaccaggtctttgctcaatctttagatgttaatggaaatagtttcatctgcatcaagctgatgtgaacattggcatcctgaaatttagcacagatatcctccaggaaaacagatctcctcaacttccttaaggtgtgtataaggattttcaccttctcctcctttaaaattgctagaagaggcaccaactaaggtctaatcatgataggtggtacaatgcatgaaggagtgaccatccttggtggattgagttgatctcattgttctattttgaatggttcctgcacgggcacataatgggcataactttgacttgcttgatataggcttgcttgatgtagcttagacttgcttgatgttgccaagtcagttttcatcaatgcgtatgtgcaattaggcaacaaggaagttaaacactagagtgtgaaagagagaatccttgaaagtctttgatttgaaaggctcattacttataaatcttagtgctttggccaaagtctcccttatgggcacccaaaatatcttttagaatgaaagggtttctggagttcagaaccctctacactatctacaatgtgcacaatatcataattcacttgttttcttccttgtgggcctcttataccatctcttttagacatgtttcaaaattgcggtatcagtcattgacttggagggttccgaggcacaccggtgaacaaatgttttctatgcaaaggtgaagaggaatcttgcgatcacatccttcttcattgttctaaggcaagtttgttatggcagttggtcttgtccttgtttggtgtggtttgggtgttgcataccttagtccaaaccaaggtttaaaatatcggtaaatatggatatatcggtacttggattttacagatatattgaaaatattagagaaatatcgatggatattttgacaaaaatatcgatgaggtgaaaattattcaaaattcacaagaatgcttgaaaaaactaaaaaaaaaaaaaaatgataaaatgagtaagaatatatatatatatatatatatatatatattaaagttattttgttagtgtaattaatataagtacgattaaagataatatttatcaatttttttataaaaaaattagcataaattcctttaatatatttatattaatttattttaaaaattagaatacttttattaaaacatattttattacattttaaataaaaaattaaattgatttatataaaatattttatttgagatttgatttctaaaaatttattacaagtgacaatttttctattaacattaatttatttaaataattaaaattattaataatttatcttatcaaattaattttaatttatagaatattaggacttcattaattttttttatattgtagcaatttttgagtaaaattatactttaaatatttaaaaaaaaaacatttaaaattaaataaaattaaatggataaagaaaaaagaatgaagataaatataaaaagtagttaaaaataaaatgataatatagatttaaaatataaaaaattaaaaatgaataataaaaaaaaaaaaaaggataaatattttttaaaaaaaagctttcaaaaaaatctccaatattttcctgatatattggcgatatatctctgatattttgacaaacttcctccactgttttgcgcattgttccacgcttgattttttcgtccattttttgcccccaaaccgatatatcgccaatatttcccgatattactgatattttgctgaaatttccaccgatctataatcggtgcccaatatcgtgtcggacaccaccgatatacaatatatcggcgacatttcgccgaaaaaatccgaaattttaatccttggcccaagcaacaattcttagttggcataaccactgtgttggaaagaggagaaagaaagcatggaatgttgctcctctttctttgttttggattatttgggaagagagcaagagaggggcttttgaaaatgttgagctttcagatggagagctaaagttctctttttttgtgtaactttttagattggtccaaagggggcctagggtaagagtccttctctatgattgattttattgattggttaggatgcctttaaggggagggatttcttgttttttctttggagtgcacatgtataccttaggtgtactggatgtaccctttttttggctctttaatctatatttctcttttgcctatcaaaaacaaacttagttggctttcggtttgtaattcgaagggggatggataatgttgagaggtgtttgtctatgtgtatagttctccttgtataggggaggtgtttagtcttacgttgatcaagttttatattttgaggggaagacctctcatccttctcttgtacgttttatcataatcaatatatcttttgttttttattttaaaaaaaaaaacaatatgcacaatatctacaatatttgaagtattctgaagtattctagatagttcccacactatttcaaattgttctacaatgttctctggataaatccacaatcctggaggactctggataatcatggttcccacactatcctagaaaattcagccatgttcaagagattttcacccaactcaggataaattcatagacctgtggactcatcactcttctggaagcttctagatatgtcaacctctttatctagctccaaaaagggttctatgcagtcttgcgtttacttcccttagcagcttcttattatctctaaaacattttggccttctctaaatacatgtggggtgtcatttgtgcacggtgtgacacttagcttagttataatttgattttggcaaagataaaaaggttggcatgcttgatactttattaacaacatataagatttagttacatgtatatgggtagattgtgtgtgttataacttaaaaacattcaacaaacacctaacttttatccaagtttactcagtcatcctgtttgtgtttaaaacagggcacaaagctactgcaggatctggaaaaccttaaagaaaattttatgctatggatgtgacattgtcaacgtaattttatacatgattcagttccaaatgtctttactgcaatgtttaaagtattatggtgtttttaatgacacagcctgtctctagtctgtttggtattctcagcttattgtcttgtattaatttgaacgactagtgagatagatttattggtggctgagggatagtgtaggaaatatgcttacatttttgctattcttaattcttgtaacattaatgacttgaatatgcaatttacatgcaattgcatatactatccaattgtggattgtctatactatccaattgtggattgtcatttccaattgttttagttttactcattttttcaagataatcctttaatcatgttacagattcaaattctatataattctgttatcttcttgctcttcccttgttaatgagatatttgtctcttaaattctatgctattgatgtagggtta

SEQ ID NO: 13004 - DNA, 926 bp, Vitis vinifera
  Intron number 1 from transcript GSVIVT01025365001 (locus G SVIVG01025365001) derived from phytozome v7.0 (chr-ID chr6 ; pos 1429590 to 1430515)
attgctttgtgaatgtgagtacaaacgacactctgtttgtttgagaaatcaaatatgaaaaaacagtgttctcgaccatacaaaagtttttaaagttttttttatatttttaataatattttctaaaaaaaataactaagaacatttaaaatttagtctataaaacaatatgtttttaaaacaaattctcaaaaaatttgttttctatattttccaaaccatttttaagttaaagattacaaacttgttttcaaaaacaattttaagacaacacatgtagttgttccaaatactttctctttgaaaatggtaaatatttaaataattcttagcatatgtgattttttagtcttattctccctgttttatgccagtgaaaccctttgaccatgtttggttagtggaaaatttaaagaaaaatgcaagaaaaaagaaaataaataggaaaaataaaataaaaaataggtttaaagttaataaattatttttatttatttttttgaactcattttacttattttattgtgagattaaataatttgaaaatgtataagtttctaactaattttaattatattttatattcttcgatttttttcttaagacaatcaaatatgagaaaatttatttcttttgggttttttttctttcattagcatttttctggaacaaaacataacctgcacaaaaaatacttgagattatcttaaatttgtgctcaaaaatcactcccaaaaaattcttttgaattcaaaatttgggtttgagattcatttgttgaactaccaacttgatttgggttcagcagagataaatagaacctcttgtaaaactactaagatttgatattatgttaaattaccaactttcctaaggatttggattcattatacatcctcgtcataattttcctttctagggttgcg

SEQ ID NO: 13005 - DNA, 12585 bp, Vitis vinifera
  Intron number 2 from transcript GSVIVT01032936001 (locus G SVIVG01032936001) derived from phytozome v7.0 (chr-ID chr1 4; pos 24346454 to 24359038 reverse strand)
gtccgggcggattggatccttccgttgtttctcaggtgcagtgctgcccttgtacaattcctttcatcttgcttcatctgttgcttaatcactgcactgctagatgctcgttacttctgcagtgttcttgatcttgattgatatgttctgattaaatctaaaggtaaaaaatacttgaatgcatttggtttcaagaggaatctgtaatctaacactgtcagcaaatccgagaaagggcatttgatgggagatgaggctcgtttttgtgtagaaatgtggaaatacctctgaaagctaagggcaaaaacgaaataaaatttcatctctggtgtgaccaaggaaacattttttttcctcggaagcaaacgataaaggaaaaaaaaattaaatattgcttcacacggagcaggaaaattggattaaaaggtggcccgcactttcaatctgactagaaaaaggaaggggtgataatgaaacaattatggtggctggggttgttttgggttgagttttaggattagcgaggttgaagtttttgatttgtacagtcatattctaaatcacatagatgtttgcattcgatgattattatgttactgaaaaggtggagtggtcttgtcacctaatattatcctaatttgacactgtgcttgactggaatattgaaaacaagagaatgtttagtcaatttacttctaagttgagtttgaaaggaaaacttggaataaattgaacattaggcaagtgaaagaaagatgcacgtcatgccccaccaacaatattatagcatactcccctcaatgttattcaactcaattgggaagtggtatgttgatcaaagggttaagatagcagagggaggaacattgcattgggtccattttggtggagattggatcaactcctaattgatatttaaatgatgtacacttcctcgtattttggagaaggtttcttctccaatgatgtacattgcattggagtctttgtttccaaaactacaacccttggttgtgagaagagaagtggaggacgttatgagctggagagaaggtaagaatggcaaatttttagttagatcctattattgctcctatacttggacttctagagctccttttcggaggagtattatatggaggtcttgggctccagtgagggtgagttttttgccaaggaagcatcttggagcagaattttgattctcgaccagctgaaaaggaggggatgggttatctcaaataggtgttacttgtgcaaataagaggaggaaaccattgatcacctaatcctgttttgtggcaaggctagactgttgtggaacttgatctactcccttttcggtgtgcaataggctatgctttccttagttatgaggaatttgttaggtcggtatgactcttttgtgggtaaaaaaagggtaaaagcgtggagggctgcccccttatgtttaatgacgtcgaacggtttgaccaaacagttaaatctttgttcatgtatacttttgtgaattgggttagggtgtatatagaggatcacattttgtttatgattgattttataaattggttgtttgtcaagtaaggggaagacctttttttgtttccttactgcctagcttttttgggtgttatttgtgtacttatgtgtactgtttttgccatttttaggtgtttctaatgcaagcctttcttttttacctataaaaaaaaaatgtttctacattttgtagtgtcaccattcctgaagactagattagaaggaaagataaacttgtcaaatgttgtaaacatagtatttacccatatcaggggctatgagtcaactattctaggagaaggcttctaagaaaccaagcaagctgtcatactgggctgttcaaaaactctgtcaagtttggttcagcaggcttgaccaacaattagctttatgatttgtgtgacctcattgatgtaataatgtggttcttattactattaaaacttattatatgaatggtagtaggagcttcaccactagtaaacagttatatacttagattgagtggaagatcgctaagttctagatgaaccatggtgtctgttaagctatttgtattcgtaatgagcattacttgtttttagatgaaaaattcttttctcttctagctctttcttaagtttctttccatgagaaataacccaaacattgccatattgctaaacttattttgaaagacaaagtattctccgagggtctatgccttgccatgaccattggccccaagatgacaaacatgaatgccttactcaaatttttaaatcttattaaagctattggttaggacaaaatgcatcatgtgcatgcctcgcgctgaatcagtttaccattttatttctcccatgcctcttgcttatgagatttgactgttactcttctcattgatgactattatttggtggtctcttaggatttttgtagcatgttgataatttctcatgggaaaggactagtgtcatatagaggtgtgctatttcaagtttttgccaccctaaattggctgtttgaaaaacagatagattgatactaaattctgatttcccttaagtttctatttgaatcataaaaaccttcctatctcatcaattcctgggcctttttatcctttctcttggaattttaaattctattgtaacctctctgattttgaaaagaagatctagaaagacgaatgttctctcttacttgcttgcatttatcttcattcgctccaaatgtaagagtttggtctttatctttttcaagtttgttgaatataatgtatttatagtatattatctttccttgttaatataggtcacatgtatggtagttaggactcctagccttgtatatatatatctctcaattgtaagtagaaaacatatgaatgagaattaagatttttctcctttttctctcttttaacatggtatcagagccaaaggagaaaacctaattttttttcggtttagccgtgtaatcaataccggcgaaccgtccagtgaccgtgtttcactccggtcccctcattttcttcccgaaccactccggacaacctcatcgccgtcggatctccaccacgccggcaaccttttccggcgaacttttctggcgacgtctttttctgacaccgaccacaccaagaggagcgcctggaggagatctccaacttcttcaaaagcatcggagccagaaaaccctccatgcgccggccacgcgcacttctccggccgcgcgactgaatctcacgcgccggcgcgtgagaccttttccggcgacgcgcctcctcctccagcctcgcctgacaccgaccagcatccctacctacctggttgtcccatccgagccctgcacgtatctcttttggggatttttgtctccgtcagccctccaaacagcctttccggcgaagttccgactactttttctccaccccaatccctgcacgtgccttgggaagtgttcttctacccttctggtggtaccacgtcgcgatctgaggccgtctccctttttcggtggtgccacgccgcaatctgaagccgtattagggctctcttcgatccaaatacgtgaatatgaccaccaaaaatcagatctttacctctgttatctctagatctcctatgattacctcagagaaattggttggcagtgagaattatcgctcctggtctgcctctgttgaactttggtttatgggtcaaggatatgaggatcacttggttacccaggaggcagatatccctgaggttgaccgcgtacagtggaggaagatagatgcacagttatgtagtgtattatggcaatcggttgatcccaggattcttcttcatcttcaggcctataaaacttgttttaaattttggactcaggccaaaggattatacacgaatgatatccagcgtctttataaggtggcttctgctattgtccatctcagccaacaggacttggatctatctacttatattggtcagattgcctctcttaaggaggagttcttgactgtgatgcctcttactcctgatgttggggctcaacaaacacagcttgacaagttcttcatggtccttactcttattggcctccgtccggatcttgagtctattcgtgatcagattcttggaagttcatcagttccgtccttggatgatgtgtttgctcgcctcctctgtatctcgtccactcagactttgccatctgatagcgcttcagattcttctgtgttagtttctcaaactacctctcgaggaggacgcagtggtacccgaggtagaggccaacgtcctcattgcacctattgcaataaacttggccacactcgcgatcgttgctatcagttacatggaagacctcctcgcactgcccatatggcccagtcctctgattctccgctgcctcagcctccgagctcctccgcatctcagacatctcaggcttctattgcctctgatgcccagcctggtaatgcctctgcctgccttacccacacatcttctcttggaccctggattctagattctggagcatctgatcacctatctggtaataaggatcttttctcctctattactactacctctgatttacctactgttaccttagctaatggttctcaaactgtggctaaaggtattggtttgtcccttcctctgccttctctacctctcacttctgtcctttatactcttgaatgtccttttaatcttatttccatcagcaaaatcactcgtactcttaattgctctattaccttttctgataaatttgtgaccttgcaggaccggagtacggggaagacgattggcataggacgtgagtctcaaggcctctatcacctcacctcatattcatctcctgcagtttgcatttccactaatgctcctctcctcattcacaatcgtctaggccatcctagtctctccaagttccagaagatggttcctcgtttttccactttgtcgtcgcttccgtgtgagtcatgtcagcttgggaaacatactcgtgtctcgttcccaaagcgtttgaataatcgggcaaagtctccttttgagcttgtccacactgatgtttggggtccttgtcggactgcgtctactttaggatttcagtattttgtcactttcattgatgactatttttgatgtacttggttatttttaatgaaaaatcgagctgagttattctctattttccagaaattttatactgaaatccaaacccagttcaatatttctattcgtgtgttacgcagtgacaatgacagggaatatttttcagcccaatttacttcgtttatgtctcatcatggaattcttcatcagtcttcttgtgctcatactcctcaacaaaatggggtagctgaacgcaagaatcgacatcttgttgagatagctcgtactctcctcctccatagtcacgttccttttcgtttttggggagacgctgttcttaccgcttgttatttgattaatcgtatgccctcctctgtcttacacgatcagattcctcactcccttctcttccctgaccaaccactttatttctttcctcctcgtgtctttggttgtacttgctttgttcatattctcactcctggacaggacaagctttccgccaaagccatgaagtgcctcttcttgggatattccagacttcagaagggttatcgttgttattcccttgagactcatagatactttatctccgctgatgtcaccttctttgaggactcaccattcttttccaccacttctgagtctcttcctgtttctgaagttttgcccattcccattgtctccccacctgatgctatgccccctcgaccacttcaggtttatcattgtcgccctcgtgtcgttgctcctttcccttttcctgaggcacctcctgactcacttcctatcccttcggcttcacatgcctcggctctgccttctcctaatgacttacccattgctgttcggaaaggtactcgctctactcgtaatcctcatcctatttacaattttttgagttatcatcgcttatcttcaccctattctgcttttatttctgctatatcctctgtttctcttccaaagagcacccatgaagctctttcccatccaggctggcgacagccaatggtggatgaaatggctgctctgcactctaatggcacttgggatcttgttgttttaccctctggtaaatctacagttggttgtcgttgggtctatgccgttaaggttggtcctgatggtcaggttgatcgccttaaggcccgcttagttgctaaaggctatactcaagtttatggttctgattatggtgacacattctcccctgttgccaagattgcttctgtccgcttgcttctctccatggctgctatgtgttcttgacctctttatcagttggatattaaaaatgccttccttcatggtgatcttgccgaggaagtttatatggagcaacctcctggttttgttgctcagggggagtctggtttagtgtgcaggttacgccgttctctatatggcttgaaacaatctcctcgagcatggtttagccgttttagttctgttgttcaagagtttggcatgcttcacagtacagcagaccatttagttttttatcatcataactccttggggcggtgtatttatctggttgtttatgtggacgacatcgtcattacaggcagtgatcaggatggtattcagaaactaaagcaacatctttttacccactttcagaccaaagacttggggaaactcaagtatttcttgggaattgagataactcaatccagttctggtgtggtcctttcccaaagaaagtatgctttagacaacctggaagaaaccggtatgttagactgtaaaccggtagacacacctatggatccgaatgtcaaacttgtaccaggacagggggatcctttaggagaccctgggagatatcgacggctcgtaggtaaattgaactatctcaccattactcgtctaaacatttcttttcctgtgagtgttgttagtcaattcctacagtcaccatgtgatagccattgggatgccgtaatccgtattcttcgatatatcaaaagtacaccaggccaaggtgtattgtacgagaacaaaggtcatactcaggttgttggttacacagatgcagattgggctgactcacccacagatagaagttccacttcagggtactgtgtttttattggaggtaatttaatatcttggaagagtaagaaacaagatgtagtggccagatctagcgctgaagccgagtatcgagctatggctttggcaacatgtgaactcatatggttgagacatcttcttcaggagttgagatttggaaaggatgaacagatgaaactcatttgtgataaccaggccgcattacatattgcatccaatccagtcttttatgaaaggaccaagcatattgaagttgactgtcatttcattagagagaagatcgcatcaggatgtgttgctacaagttttgttaattcaaatgatcaactagcagacatcttcactaaatctctcagaggtcctaggattaaatatatttataacaagcttggtgcatatgacgtatatgctccagcttgagggggagtgttgaatataatgtatttatagtatattatctttccttgttaatataggtcacatgtatggtagttaggacttctagccttgtatatatatatctctcaattgtaagtagaaaacatatgaatgagaattaagatttttctcctttttctctcttttaacaaagtttatatatagtaaagtctttctttgtagccttgtccaatcattctgacctagttcctttcctctctactaattttgtttagaaatctcaagtccctcttcaagttaagtcatttgcttggttagtggtacacaagaaggtgaacatcaataacatgctacaactgaggagatcctacaaagccctcagtcctgatgtttgtatgttgtgtatggtgcatggataatcaagatatcatctttttttctattgctctttcactaaggggttgtgacacagattatttggattgactaagttggattgggtttctcctaggaatatttgtgacatgatgaccattgcatataagggattgggaaactttagtagaggattagtattatggcaaaatgcttgtttagctttgatttgggttgtgtggtgggaaagaaatgccaaattttttgaagatatgatgaggaccttagaggttctttgggataccattcatttccttgcggccttttaaggctcttgcaccacaacttttaagggcattccccttaatgtgattcaacttgattggttgtcggtgtgtaggtccaaaggcgtaagctagtaaggagaggttgttttgttttctttacttatggtgtattggtttatttagtattttggaggtcctaattgtttatttccttgttttgggaggattactcatccttcctttgtacctttttatccttatttaatatattacattgttgtttctcatcaaaaataaaatggaaggaatctcaaaatttcttgtttagttggccttggaaaattttgtactattgaagttttaattccacattaacaatgttctaataaaaaaataaagctaactcacacataaagatacacgggatttaaatgtagtttggtcaattatgcctatatccatggatgagagagaataagttttttatactatagaaaaattatataagaaaaagagaacatatgcaactcccaaaacttaaaacaatccctagtatctacatcttgaatcatgagctcctctcaattggggagctcctctcaattgggtgtctcctactcttcttcacatctctgcctaccatgtgtgatcttcacaaacccatcttaatttcataactttttacccttcttgatcaagaatacacagatattcctaacatatttctttactaaaaaaatatctatttttccaaggaagtataaaaaaaggaaatattctatacaatatttttttactgaaaggaatatgaaccaaacaagttctcctctagttgagtggtctaacgacttgatgaagtgaatgattaactctaagcaagacctttctctttcttttttggtccacccactgactacaagagtctacccccctattcttgaactactgcttatgcattgaggcgaatgtagaaatacttttagcccaaccaatatgaaagaattggagactcagccccctgtactcaagcaacatgattttcttccatgtgaaaaacatgattagagattaggcttagggatatgcctctagaagggcttacaactctaaaaaaacgtcaaatatgctatgagggaggtttgtgctgccatcaagttgatgcctttacatatagggggtgtaactttacaactctctctcgttactattttcttgggtagatctcctgaaacaagtgattaatacataaagaagagacttggctgaacagaagcaagattaagaggaaaatcaaggtaggcttgtcttcatgtacctgcctctatagagaaggagaaagatagatttctaagtgaataggcccccactttcttaagtcaaatataactgaactagctagcatgcttgaaaatattgtttttccttgtgccttccccttcttaccttgcttacttgttagctattttgtgacttttttttttttttttttttgcttgaccttgatcctgcttttagggtaagataagaggccttagaccataagctggctagaaagagaatcagtcttttataccatagaaaaattacagaagaaagagaaaatatatgcaactcccaaaccttaaaacaatcctatcttttctggttctagtatccatatcttgaattaggagcctctctccattgggtgtctcccactcttcttcacacctctaactgtcatgtatggtctccacaagcccatcttaatttcataaccttttacccttctttattgagactataaagatattcctaacacatttccttgctaaaaaaaaaatctgtttattcaaggaagtatcgaccaaagaaatattctatgcaatattcatttactaaaaagaatatgaactaaacttggaatttgtgaccctttccaacaaagaataagaagggcaattaaattattttacatttttaaattctttattctttatttaaaagaggaataacattggtgaagcatataaagaaaaaagataatgagtttaaactttattgatttaattattttttatgggcaaacaaaaaatatattaacaatgccttgtaaaagagtgcaacaaagtgcgcaatacctatacaaagggtgctcaaaggcaaagaacaagaagagaaacaaggaaaaaaaaactctctccccttactcagagcccaaccaattaacaaaatctattttaagtgttgattcgaactatgcacattctaacccaatccaaaaagtgcacataaaaaaagaaagatgatgaagcagctcttcatgcttttctttggtccttttcaaggatgtgattaattgattcttttttatttttacatatataacatttattcaccaatatccatcatctctttttaaactaatccaaagtcaaaatcctcccctaagtagctacctagacaaagaaccccactttcgttagaacccatggattacaaacgagttccataggaaaagtactttattcatctaagcacaaaaaggagtaaaatactttcattgagaattttccacactttgagttcattgacaccaatccatcctctccatccctacctagtgctctttcttgcagtctcaatggaaatggctccaccatttctagcttatcctctcctattatctttcatagccctacttgaaacccttaactcataccacaagaatattgaccctcatcacatttcccaacaataatccacttccattgaagctccctttctaaggcaaatctccaacttcagttgctaaggagagccttgataaggatagaaaagttgttaatgccaagcctacctttttacatttttccatgcaagcaattgccaatttcactaggtgaggtttttccttgagagttccctaccctaaaggaagttttttggatcttattaagttttaagcttacttttcttgaaatggaaaacaaggacatgaaataaattgatagactagaaaaggcactttaaatgccttcaaattagagcaagtctatccccttttgaaaggtatcattgtattcacataacaagccttttttgaaatctcttttccattagataccaaaccattgacgatttataatagacacacaaaggaagacccaaataagtggtgggaagctccccacttaacatctcaacatagaaaccaactttttcatattattcatgtccccaattaggattaacttactcttctccaaattaattttcaggattgaaattgtttcaaacctcatgaaagttcaactcaaacataccatttgattttggtaagcatcacaaaagagaacaatattgtcaacaaacaagagatgaaagacctccacccttacttcctctcccttcaaccttaaaagactagatgaagcccctttccttaaccctcttcaaaagataattgagagcctctatctccaaaacaagagaatagggagagagcatctccctgccacaaactccttaaaccctaaaaaaaggtagtaggaatactattaactaacacagggaaacttttctagaattgcaagtaagaaacctaattgatatcgttatgagtctttccatgtcaaggattcaagtttatggataataccagttgagctcttcagccttaaatttatggtgtcatttgcaatatgaactgtgtatacaatttctctcctgtctacaaaggcatgctgataattggaggctactttcttaaacttattatattagccaatacctttgctagaagtttgtacaatcctcccaccaagataatggttctgaattcttctaaatcttcaatatctttcttagatattaatactaagaatgtaatgtctaaccttctttcaaaagagagcaactcataaaattcttaaatattaaagaattcgacagatttgcttgcatctgcaacttgtagatgctactgtggatagattggaaagataaaagatctggatatgttagtttttactttaatacaagatctggatatgttattttttactttatataagatctggatatgttattttttactttatataagatctggatatgttttctactatgtttacaatttgtgcatgttgtttaaatgatgcttcccatttctttgtacttacgttattgattgattctgttcacttgtttttcttattttccttgctggtttgaagcattgacaatttttttgtggctgtgtgtttgtttatatattcatgcttgcagcactaactcctgagctgaaaactacattggataaa

SEQ ID NO: 13006 - DNA, 4010 bp, Vitis vinifera
  Intron number 1 from transcript GSVIVT01018284001 (locus G SVIVG01018284001) derived from phytozome v7.0 (chr-ID chr1 5; pos 11889424 to 11893433)
tcaagcctcggaccgctgacgtttcatcgcaacaggtccccgctttcgatctttcgtaattttaatactgtttggttgctgaaaaaacggaggaagagaaaagaaaaagaaaatcttcattcttatgttatttttggctgggaaaattggggaaagaaattaaagtttagaccttaattaagtcaaataatgaaatttttttaggattttaggttggtttcaagcaaaagttcacctgaaataagccgagtggttctattagagttaggtggagactttagtttcatttatcagatttgatattttagtttaatttatgttttggttgctctttcttggtatccgaacaagggattagatcatgacaaaatctacctttctaagttttcatgggtggtctgatccgaagcaactgctacggattttatctcgcttttgcttgattttgtttcctagttcagtgactgacttggaattccaattgtttaattgcaataggatattgcttggtatggtggctggaattgtctgaaaagagattaaaatcaaatttcaagtcttaaaattttgatctgggagccagacacgagacaacctttccatcagtgtgcctcatttggtgtagctgaggaggatactcccatgcatgaaattcaaactttcatttttgtttcttttctgccgatttcctggcaaccaaacggatggtagagtgcaattaagagaaacacggtttagaatatagtcttgtgccgaattatgtgatattatgtattgtggttggtggccttgtttggaagtactagccaataggagtggtttgggattggttttggtattgaggtaatgactgaagtctcaagaatattgaatgctccattggacttcacatagtgtttgaaagtttgaatccgccattagaaataggccattaaaggaaattgaatcaatttccaaaaaccaattagttgatatgggttttaggattttataagatgccattacaaagttccattatcagttgtttcaatgctcccattcatatattggcttaagattatgcacttgtacatagaattacttaaataaaaaaatggtggaattcaattcccatgtggtgtccaaacatgtctatgtgagttgcttatacaactttaaactatccaccttttccatggatttattttcttttattttattttttgtggtgtcctggaaatcacatctggcggaaattacatttgatgatagttagtgcataggaaattgggttctcaatgacaatagaggattaacattgaagctggcttaatttgataaagacagttgtgtaaggcatgaatatctaaaatgcttattaactccccaaacagtactaaagttatgttggtttgtggaatgggttaggtgttgcattccattccagtcattccaatgttcaattgtgcaccagtttttttttcgaattctaatagggttgcaacactcatgaaacccagaagttgaaacagtcactgagagatgtcagtttgcaaaaacatttcttagagaagtgttttataataatttaagtgacaagtgtatccttttatttgtcacttaaattacaaaatgctattattatcattaaaggattttcagcttgtcaatttcaaatacaaattgtcacttaagtacaaatgcaacttcatctcttcaaaaggcaaattaatttcaatttttgttgaagataaatcatgaattacaaaatctttttgaagaactactattgttacttttgctattagtagaacatgaacagactcgaatatctagtaaactaagtataagttgttgatttaagtaagatattcacttttcctttttttcttcttttcaaaaaacataaatactctcaagttaaaatcaccaaaagtttttttcttcctttctttccctctttattattattattttttcaacctttatgtgtatgaaatacaatcatatttaagttaaaataagaaataattatatgaaggatgtttgacagtcaatttgttgagtttgtccttaatttttaaagttgatttcttttttattttacaatacaaattttctaatttttgtacttattttgtttgttcttgcttaatttttttttccagaagtattatatattcaattatttgttttattttataagtttttaaggatttaattaattcaattatagaagttttgaaacaagactaattaacttgaacaaaacacccacgagggtgggggtggggattgggttaataaaacttttttgaaaactaattgaattaagcaataaataactcaataaatgcaaatagaaaggaatggagacatgcaaatacaattttatcatggtttggcaattctcgcctatgccctttttgattgccgttgtgggctcaacctgatgcatgcaacctgatctcataacctaccactccatacaacctgaatggatgttcacttgtccaaatttaacctgatttcagcctcagcttattgagctcaatttggagaacttattttagaaaataatttggatccatttaggcaaatgatcttttattaggattgggtttagtttgattgtcaatgtgacccaagcagcccgagttgcacccatagaatccacaccctgaccaagtcctcattcccttttaaagcttggaacaaataactcactactcctttttgctggttctagaagtttcactaaaacatggatcaaacaagcctgccataatcagcaaaccttgcttccttatttatgtacaaatcagctaagacctctatcagtggtaccttcctgtaccaagtttctgttcagaattttattttaggcccttccctgactctgaaaaatcttggtacacctttctaatcactaagtgctacttgccaacttcctcacttgtgtctttataagtatacctccacaaccagttgaacacacaaaggtgccttagtcctccattctagttagttttactaccttctgtcactcgtcaatatgaacttcccttggtaaccttcctacaaagttgctatagcttctttaattttgttgccaccaagcaaaggattgtgaaaagattcataagataggttggcaaactagcccaggcaatcttgatcaaagttaacctgcctcattttcaaaggtgctctacttctgctaacctccttccaaagtgctcaccactaacttccatgtcattctggccttaaagactccttgacgtaagatcacatacaaaatgcaaaagcaagcagacctacgttgtaaactagagaatgagtattggttaatccttaacctcccaaataggtaaatgacccttttttcctaattaatccagaaaccagcacaatttcaaagcattgaaggacacccctaatgttttccaactgtacttggttggctgcggagaatgtcatcttatcattttatgtctaaggggtgtgacaccaaattccttgctctttcgccttttccatgccttaatatctttcaacatgcaaatttcattccataacatatcaacctgctgaagagccttctaaaccaagatgaaaaagagaatgtggctgaaaagcttccataacctagatgaacggctaggagggcatggatctttctctcttgactcaagagctactaaagaaacccgaatggctccgcttaactgctacagaatattagagtgttgaaatgcatttttcattttgccagcaagaaaaatttcccaaatttacatttgattatatttatggctgtgatgggggggggggggggggggcgcaaaatgttggtttatgcttgactttctttcatatatttctggtcacctgtaaaaagaaatggtgtttcacttactgaattaggggtgtgatttgttaactagtttgctgactgagacttgtttacaaatctcttgttctccttcgcagtttgttgaagcagttcttgggatacaagcaggttc

SEQ ID NO: 13007 - DNA, 1613 bp, Vitis vinifera
  Intron number 1 from transcript GSVIVT01023638001 (locus G SVIVG01023638001) derived from phytozome v7.0 (chr-ID chr1 1; pos 8311149 to 8312761 reverse strand)
gcggtgctccttcctctttctctataaaggtatataaacttccggccatttattggatctagggttttgattgtttgttttagtggcttttgaacctgtttttggtagtgtgctagtttggggaatttagggcttggttaatttttttgggggatttaaatgaatatgtacttttatccttgggcttggatatggatatccttttatttgattcgcgatgcttttgtctatttgttaattggattgaattctatggaagcatggattgagttgtattagattatggctcttttgttgatcatacgtgtgttgctatctgttgatcggaatcttaattgcgtttgacatttgtgtgaacttaagtgttcttgttttgcttatccccttatgctaggaggacttgttgatatttttacttcaaagatttctttagcaattgtccctttcttcttcacatgtttattattattttccttaattatcattattgtttactttattatttcttattagatttgcgcataaaacaatatattaaagaaaatcagaaggatgtgtaacctaactacataaggggagtccagagaaagagtcttacctgttatatcaatgaaagctaaaaattgaaacccttttgtccattgtggtttccaccttctttccccagtatttcagaatattgctttgagctttggagctgatattttggttccacaatgaatgtttttttgttattgtcattcttatggttattattattattaaatctactactattgctactattgttattaatgcacagaatattggtaaagtatgtacaaacagttacgcaggctttatgtgggcaagtgattagcatcaggttgcccataaaggacctacatacatacatggaggctttaagtaatggattttgattgaacaagggaagtttgatttaataagtgagtgtcagagaagtgaggtcaatgttcaatgtgccatactaaactattggctggatgggccctaaattcatgctaaataatttcaggaatggttaattattatagcttatgactggctgttgtttgaattttttctataacaggggtgagttgtttttcaaaagaataaagggtttgtaggcaaatatttttcagagacaacttcaattcctttgttcatatattttctttgttcatcgcatgtgagttctccaaatttctaatgaagagtcctccacacagagtgtgaactcatcatctcatgttgtaatgaccttttcttgttgagattttgctggacgagtacttggatgctcttttaattggttgggaacctagaaattattgttctgttgaatcttcatgatccaacttgagtgtgattcaacattaatatttttgtgcactgtagattgtgtttttaaaatcaattttcagatttattttttaaatcagcagatgccttcatccctggtcctcttccccatccctttatttatcctgatagcttacctatttgttcttttgttgaataatgggctgcattgttatggaaggttttgacacatttattgttttgttgttgtaggctggggatagtcggtttgagggtcgtgagcgtgt

SEQ ID NO: 13008 - DNA, 9086 bp, Vitis vinifera
  Intron number 1 from transcript GSVIVT01037806001 (locus G SVIVG01037806001) derived from phytozome v7.0 (chr-ID chr3 ; pos 7717689 to 7726774 reverse strand)
atctgtcctgcaaatagtaattaaggaaattataagtaaattgtgcatcaaattagtaaatttataacctgatttgctttccatagttaaataggaatacaaatcttgcaacttatggattcaattgttggacaatttctggaacaacgaattcaaattttgtcatgtccactgatggtcttctttcttgaatcccaacaacaattgacaaaacgttcaccttaacacaatataaaattataaatatggacatctttaaaaaataatgacaacaattcacataagtaattggactataactatatttaccagtttctctgtgaagacatccatccgttttttccttccgtcaattaatgaatccaacaactcgattattttcgcatgaatattcaaaatgtttaaataccagtgatttttcttgcatattggtatgaacaactaaaagtaacaaaaaaaaaaaaaaaacaatgattttatcaaattagttgtgttcatgtattttctgcacaatacttaaaaatatccaactacaaagtattttcattaaactaaataaaacttgttcatatgtgcacagctgagtattttttaaatattttcttaaattgtcacatctgtattttggagattactttgtttgggactctagcaatgtttaggtgcagtcatggctctgtcctagataaactccatccaagatcatagctatctgttgtttggctttcagggaataaacataccctccaaaaggtgtgctttttcacctattttcctcctttatgagtagataagcttatccatcacacatgaaactataaccaaacacaccctctcttattttccacatcatactgtaataaaaaaaatacaaaacatatattatattaaaacaagaaaaccaatctataattcttacaacatatcttaccgcaaagtttggagataagaaatgcttcctattttctttatccataccattcaaaattcgataatgcatgattacaaccttcatgtaaattaatgaaaattagatatatagttttagagtaattttatcctaacttgacataactaaatatgaataccttattgtcaaccaatttgctgggtcccaagcatttgaagtcgaaccttgtcaagaagaaatcatacatggaacataatatttggctacatagaaataattatgatgttataaattaaaactaattatttcaaatggctatcttaattgtatttgtttatattaaaattaagttcaaccttacctttcatcacatgtatcctccaatgcatatgccaaaacttactttgctacagttgaagatgctgaaaatttgattgaaggttgtaccacttatggtgatttgattactaccacaaagtgctattttgtagacctaataataatggttttaagcacctttgagtagtaatcatattcatttaacccaattaattcattaaggtccttagtaattggtattaaccattttgtggcaagtttacatgtttttattagcttatgaaccaattcaagcatgccaattgatggaggagctacttgggcgagttaagcaaggattttgtacgtttataggcttgaatttcaagtggaaacacgagcacaagcaatggagaagaggaaaacagagtgaagaaaacagagtgaagaaaacagctgcagtcttcctttgaacttttggagcacttcccgaagtccatttttttcatgctatataccatttgaaagcttaggaagtcaataatccaacgcttcaaaccgtgtatgatttggagctgaaatgaggaagatatggcctttggaaggaaactgcatcatgtcaaatgaccaatttcgcaatgtgaatttcacattgcgaaaatttcgcaaggagattttcttcatggtgcgaaattttgccatttcgcaatgtgaatttcacattgcgaaaatttcgcaaggggattttcttcatggtgcgaaatttttccatttcgcaatgtgaatttcacattgcgaaaatttcgcaaggaggatttaggcacattgcgaaattcctttgaatcccctgttttgagacgttgttgatgttattccactaccggttctccaagatattttgcttgatttttagctttgtaaatacctattttacccttgtaatcaaccaatgaataggttgcttttgtaatagctcttgtaatttagctttttattgtctttaaatagaggtgaagagcctcagatcataaaatcttgtaacctgtaactttataagttataagagcttttgttcatacgtttcttttctcttttctttctcattttcttagtagccaaacacccttggaggatgaaatccccaaggatgagaggctaaaaccttttagtttcttgaagtaatggatgccatgtgaagctcccgtgtcaggatggagatttccaagccatgaatgtaagtagctgagcgtcataaatgttttcattcaaagtaaagcttttaatccctctgacttgctttgaatggccaatacttgataagcttttggtctcagtggattcttattgttagatccactgatgttcattagttatcccctacgagccattgtattgcaagtcgaggagatgatctatatcattaaaagagcatttatgaggttcaactaccctttttgtaagttttcaaggactaaaactcagttgttaaactcataccggttcgggaagtaagcatcaccttagttgcttccccaactcgaggtgaaaagttccaaaatctccatttttacatagtgagttaagcatggctatccaaagctttgagaaacttctttttccatcttttaacctattttcatgttagtttagtttacacaccttcatctctatatgttttcatcttaacttaatttttattaagaaaagttcactccatcctccgaacttcaccagttaaagtaaaaacccttcccagtgttcgatcctagagccactatgctatagtagctttgctactttagtgtaaggacgttaggtataaattttgttgatacccttacatgccaagctaccaagagtcgggttatcatgattgtagggcagtagcatgtcgacgtagccgatatgaacgtactggaggatgtctagtctggtaaggaataatagcattcgtttgaacttcatcctcaactatatgtatagaaaataagagaaaataaaattcattaaagaaaataacacgcacaagaaagactagccattattatgtactcattattatttgtatattaaaacatatagatgcagaaagtatactacactgttgcactgctggctgtgaggttgatgggcctgcattatcttcaccatgcgcagaacaatcatttagtggtgatccataagctaatttcaaaatgcataacaaccaaaattaatttttccaaaaaaaaaaattatagaacatttgcaattaaattaaaagtaatacaaaattataatgactagtgctataaaaaccgtactaccatgtggtggtaatgggaaagaatcattgatatcaggttgaaaaaataaatattcctaaattccaatcatttctctttggctttttttttcttttggtttcttatttttataattttcttataagctaaatccttttaaaaatatccttgttgacaaacactaattagacaagtttgtagtgtttttgaagttgatttcttatagcagaagtttttatcaaattcatcttcattttgccttctatatattcatatttcttgttataaaattttgattattgatcactttcacctattggattgtattttattttattttttttttaacttggagacattacctttattagaaaagaattgttggaaacttagtttagctatttttaaattatttttgtattattataattaaaaactttaaagtggtagtgtacagtaggtattagcggccaataatgaagaatgatagttttgtgggttaaacaggttacctaccccactatggccctattaggatgggtataaaagtgtattaatcgaggatggaatggatatgggtcttattcaaaatttgaattaggttcggaatgggtatggttttgtaccaacctaccctgctccatcccggatatgaatttaccaattgacacttggcataagtatctgtttcaacccacattttagggcttctcttagatattttccccattctttgctctaaaactgcatcctctccccaaaaccaactcaccattttcccttatacatttcttagtatttctcttatttcattttctaatttgcaaatctcataacttttttctttgcaaatgcctttttttcttttcaaatcccaactataacacatctgcatcaatgatgatgatctaatgggattgtatggaatggactcaaagggttttttgagattggtttgctaagacaaccgggcgttggggttctaaccatggtgatgacttcatccaagattgagatcttgtggcactaggcccagattatgtcttctaacaacaccaaaagcttggtcttggccctctctttcaatttcattcgttgatgctagcttcattatcaagaaaaggggcttgaagaaagcggatgctttttggcattaggattggtatttctatttttgtgtttttgtttttttcaaatctgtgtggtggattctaagccattttaatactgatgagcaattattttatagaactaagaatggaattttggaatttgtttaggttgttattgtgttttttatatgttagttatgagatttacaaaattgtttttcttagtatatgattttgtgttcgaaacctaaccatacaaaaatactcctatgggatgagatagagcgggactagattaatattattttttataaacaaggatgggagcacattaacccaccctaccctaggtttggagcagagataaaaaataataatataattaagatgagaataggataggggtcttgttaggatagagcccttaatagcaagacatgatataacaaagttagacatgagcttccacttttctatccattgtatgcattaatattgatttgagcatccatcccatatcacttgtattatacatgactttgttgcattaagagttgtataaaagatacaagtcatgggttccttgtaagatataagttgttcacaatcaatttatggatttgggtaatctaatagagattatagtgcactaccttccaattaaagggatgacttatcttggccgtagagataagtttcacatagtgagtacactagtatgcaggattataggttgaagatctactataaatcatgatataaggctatcatgatatcataattcattaatttagaatatttcatggactctcaattttaaaagtattttgagtctatgttaaaatcaataggaggctttgacatataagtgaggccctaatgtggtcacatatccctacggattgggtcactcttcataaaggttggtagtaacaagtattcttaatgaaggcatcatgatatctcatggaattgagataatgtgtccccttgggtgattcaaatgacatatgattatgaaatttgaagtcataataatttctttaataaaatttggcatttgctccttggaattataataggtcaattaattacttaatattaggatctataactcaagaattacagaggtaatcttgataggttgatagcactaccctattagataacagataccagtatatagggagtctgcatgtaatggatcataggtcatggacctaagctttgcatcattgtaattccataggatactaaattgcaattaattctatttagtagagtgttaagtcaattttagaattagattttgaaggaataaatattttcctatggatcccaatggtccctacttgagctcctagttcatgatgacacacgctttgagggtattttgagtatataatttataagtgtgcataagggtgttttagtaaaacacaatattgcactagatcatatgaatggtctttttagatttggttaattaattaattggagttcaatatgactaatgaattaattaggaccaaagtgggccagattaaatgacccaaacccaatttgagctcaagttaagcccataaggaaacctatataaacctccttaggagttacggtttaaatcttcctgcttagatttttgagattccaaagagagtaaccctaaccaccttcatgggaaaaagagaagttcacccttctttcgtgccaaaaaccataaagggaaggatagggtggaagcctcttgggtagatgagagatctacaatgactaacaaaattttggtattttcattggatgagatttgatctgcaaacatccatatcacatgtttgaattttttatctctaatctaatatgtatttttgttttgaaaacaattttttttttgctaaggaagatctagagagccccaaagataaatagcatataccgtatgagatttaaggttagggaattgagtaatacatgaggtgctccatcccaaacccactctaccattcctagcggctagttttcccacattgccccaactttccatgctcccttttaggtttaaaaaggtatgggtatatatttttattataaggctacacttgagataaatatgacatatcttaaactcaccattgacgtttctattcttgatgaaatctaggtaaaaaaaaaatcttaaaatgcaaaaaaaataaataaaataaaagtgagaaaactcgattttaggaatagttaagggaattttaaattattaaatttttattccaaaatcgattttcaatatatataaaattttgacaaattatttcatatgcatatggcttatgcttggaaatttgtatctcataaacatgttgacatggtaatcaaggtattgccttaaatttttttaatagaaaaaacctttaatttgtcttgctattaatgaataatgaaattattgggatttaaaaattattaatgaaagtcgtgtagtaaaaaaataaaaaagaatttaaaaaccttccttttataatcaacaaatttataacaaaaaatgtctagcacttaggttgtaccatgtcggaatgctaatataatacaatgctttatttaaattatgtcatatagattttattagttgaatgccaaaagttccaaaattgaaggaaaaactttaattattatttctcaaatcaaacatttaattttttatttccttttacatttatttaaaattttatatatatttttcccttatgacaaattctctgtgttaaagtaatttcagaagtttacacaccttcatccactgtgaatgcatttttccttaatgaaatttaatcatgatttgaatactcaacaaaaaattaaataataaattagtctaaaatatatgattttttaaatatattttacatagattgcaaataaattaaatgacatgtcagcttgtttaatcacatcaaaataaacttaagttagaaggtttctataaatataaattataaatttagttatagaaaattgaagaggaacataagaaagattgagcaaaagaaacgacaaaattatttataagaaattatatttataatatgagtctctccatgcatcttttctaagcattttcctcatcttaagtgctttcttggtactacaatgagagaaccatgactttagtatctcccatatcattctcggcctaagaatgaaaatatcataaatatgtggtatatagatacttagggtttgtttggaaatagttttttaaaacggttttttgttcttcaaaataaaaaaacatagaaaacatatttgacaataaaaaaatgtttctattttctgttcttaaaaataaaataaaaaaatatgacattttcaaataacatactttagttgttttctattatttttacttgttttatgatagttgttttaagaaataattatgcaaacatgtgaaattattaaaaataaaatactaaatataaaaattatttttaaaacatatttaaaaatattataaacggattaaagatattttagattttcaaataaacttttattctataaaaatcaaagaacaatttttttaagacagttttcaaaaactatttttcaaaattgttttcgaaaaccattaccaaacagaattttatgaaaatattgagcaaagcttccataaattataaaaatgataggacccaaaaaaaaaaaaaaattggaacaaatttatatttaagtgatttgaaacttaaaaagttccgaaggacacttgagcaaacctagaacaattaaatattctttgaaaaagttccttttatcttttgagtagaatgaggcatcctacaggacgtagactgacatgataaaatagatatagctatttatcattgaatcaataagccacaaccaaacacaacttaaccgaacaccaaaacacccacatctgcagccaaacaatcacaacctttcatccccttcactctaatcttttttttctctcttccataacaaatccttattatcctacaggacgtagactgacatgataaaatagatatagctatttatcattgaatcaataagccacaaccaaacacaacttaaccgaacaccaaaacacccacatctgcagccaaacaatcacaacctttcatccccttcactctaatcttttttttctctcttccataacaaatccttattttttttaaaagtttaggggattagaggtttccaaccatggaagacgggaaattaccaggtcagtgttgttctcttcatcctctctacatcttttacatgtatatagacaaattctcagacttaacattcacttttcaaccaggtatggctgaaaggacattgcatgcgtgaaatcaagcttatcatacagaagttcaaactaatactgtctttggatgctttgaatattttgcagcgatttccagaacattaagatacatccaaccgtcc

SEQ ID NO: 13009 - DNA, 2339 bp, Vitis vinifera
  Intron number 14 from transcript GSVIVT01020735001 (locus GSVIVG01020735001) derived from phytozome v7.0 (chr-ID chr 12; pos 2510022 to 2512360)
ctccaatatctcttaatttcactttcaaggacaaagttataaatcttctattctattaatttatatcatgatctaattgcttcgtgtccttagtcacattgctttgtacccttgatcacattgctttgtagtgaggtttcatttcttcatgtttttgtcccagatggttgatcataccgtagttccttttgctttgcatccccattgttggtacaaatcaaataaataagctatactcaactgtcaatggtgtgcacccaattcatttgtattacaaccatatgctatatatcacattcaaatggaagtattcttatagaattgatattggtgttaaacacttgaccaaatgtttcattatttagaccaaagctcaatagcaaaaacaatgaaggataaattattagataaggtagactttaggattttaattgagctaaaatatttttattagattattaaaaaccggatacatgctcaaacctagatgttaaaataatttattaaattattaaacagattaaatagattgaattatccaaaaaagaaagagtagcatcggaaagtgtgactaccaagtcaataaccaatggttatcattctggatgggactgcattgaagccctttttcacctcctaggacatctttttccagaaaaagttgttgctcacgaattacttgatagacgttaagatcagtcacagcttctcactggtctcactggtgtaacggctgctgcttgctgctgtacttcagaagttgttgcacttctttgttagactttgttagattagttaggctgttacacaatggaaaattctgcggtacggaagtgggtacggtacctgcaaaattccctttgcaccacttgattagctgaactgccccatcgtattgcctcttcttgaatacgctttgcttgatcaacttttcaggtttctttctccgttttggtaggactgcactgtcgttgcccctgcttgccctccgtgacccacttttttccaaggaggtggttttcgaccattttctttcttcttgaatacaccattagatcttttgtcttgacccgaggttagctcttttgtctttttggaaaaaactgcaccgcagctgtcccttcttgaccggctcaacccacttgtccaaaagatgttgagggtgtcttgtcccttcagggatcaccacacaggttttacccggcaattactctgttctttcttcattcttcctatatttctcaaatagcattatgacatgcaaatgcttgttgaattgttttgagtatgtccaactagagacagctgcagcagctctggttataatccatgcttgccttggaaggtgattgagttgcaatttcaaggtagtaggtattgaccaccaaaaacggtttgaaattttgttatcaaaggcttgccttggaaggtgattgagttgcaatttcaaagccaacctgaaaaccccataatttcaaggtagtaggtattgatcacttcttgtcactcacttggcaaatattaatttccatgtaaactctccagttcctaccatgcttggtagaacaaatcaaaatatttctgtccataatttcaaggtagcaggtattgaccacaaaaaacggtttgaaattttgttatcacaaggttttccttggaaggtgattgagttgcaatttcaaagctaacctgaaaaccccataatttcaagatagtaggtattgaccacttcttgtcattcacttagaaaatattaatttccatgtaaactctccagttcctaccaggcctggtagaacaaatcaaaatatttctgtcataagtatttcattttacgaataaaaatgattaacatgttttgaaaaatcttcaagtctttcgccaacgctctcttttagaattaatgttatgctttaaatttggttacatttctttaaacagtacggattttctctcttacattaattagaaaaagtatgatttttctttgtaaattagcattacagtgtagtgccactttaacgtgatatagatacgaaaaatgataaatcatttatttgaattttctttaacgtgatatagatacacaatagactgtcgttgcccctgcttgccctccgtgacccacttttttccaaggaggtggttttcgaccattttctttcttcttgaatacaccattagatcgtgatatgtggacagctctatatgcaaattgagttttgtctcctgtggaatgtggaatgtggactacagcaccgtgataacccactcttcactgcaccaggcttgacccgaggttagctcttttgtctttttggaaaaaactgcaccgcagc

SEQ ID NO: 13010 - DNA, 3237 bp, Vitis vinifera
  Intron number 9 from transcript GSVIVT01021728001 (locus G SVIVG01021728001) derived from phytozome v7.0 (chr-ID chr1 0; pos 10177364 to 10180600 reverse strand)
cagtttctacaaaagtgtttgaatctgcggaaaaggtttgtgtgtttgtctttgggttgatttttttaatatgttgatgtatcccttcacccaatgttgataattgatttttttggcgaaatgtctctgacataatctgattttttaatccctgcctatatacaacaaactttttcatgaaatatcccttcttgttgagttagaaagcaaactcactcctatccaaagaattcttacaaatctttaatccttgtggcctgaagagaagagaagaataggaacagactttgtccactagttcttcagtggagctctgtattgtaaaatttttttgacattgctctcaatcaaaattgtccatcagatggtttgtaatgttcaatgccagaggactcttctaatggatccttactagaaagaaggtgacactccgaatcaaggagtatcggcttattggtttcccaatgggtcttttattctttactttttattttatttttttatgtaagattattgacaaatatataacatgatatgaaatgtgataaaaataagatatatgatacatgatctaatatggtatgtgataccaaaaactaggaagacagtttgcacacattttactagttgacagatgacagaaatggtggcagctacaatttagaaacttcaaggcaattttctttgataggatcatgggtaagacatcagagatgatttagataggcatgagacttgtgcaaacctaagttagcatgaaaggagagtaggtctacgcatggttctttgaaaatatggccctagtctgtaagtgactttagagatgactaaaaaagtgaagttcttctatggtttgttatggaagtaaatataggtagcagaacaatggttaacacccccttggctgccatacctttttatccaaatccttggcaaacccctcaggatatctctagtatgctggtcataacctttcagggctttaaaaacaaggggtatacttcgagtgctttggtggtgtgctcttatagctgatgggtgatttggctggaaagaatgccaagatctttgaggatcaaagggacctatggtagatgcccttgaggcctagctcaagtggtaaagggatggggaggggttgtgggaggttccaggttcaagtcacaatggggacaaaaatttacccattaaaaaaagggacctatggtagataatgcgatatattgttttctttttgattagttgattatcacttctatgatttgaaaactgcttccatgagtaggaagatcaaggaggaaattatttgtcacaagagtctgtgaaaagaaagaaaagggagaatccctaatttttgttattaaaaactattaataatacacattggacttgggtatatatatacatgctagtgggacccacaatacaataaggaaaaaaaaggaaaagtaaataactgaaataactgtacactatctaacactccccctcaagctggagcatatatgttatatgcactaagcttgttacaaatgtatttaattctagaacctctgagagatttagtaaaaatatctactagttgataatttgaattgacaaaactagtcgccacacatcctgatgcgatcttctctctaatgaagtgacaatcaacttcaatgtgtttggtcctttcatggaagactggattgggtgcaatatgtaaagcggcttggttgtcacagatgagcttcatttgttcatcctttccaaatctcaactcccgaagaagatgtttcagccatataagttcatatgttgccagagccatagcttgatactcggcttcagcactagatctggccactacatcttgtttctcactcttccaggatattaggttacctccaataaaaacacaatactcggaagtggaacgtctattcgtgggtgagccagcccaatctgcatttgtgtaaccaacaacctgggtatgacctctgttctcgtacaacacaccttggcctggtgtgcttttgatatatcgaagaatgcggattacagcatcccaatggctatcacatggtgactgtaggaattgactaacaacacttacaagaaaagaaatgtttggacgagtaatggtgaggtagtttagtttacctacaagtcaatctaacagagtccttttggtggcattaagctaaattttgatggttgtgcttttgggagcttcaacttggttgggcattagggcattagggcagttgttaaggctgagctgttttcactcttggaagattgattatgacatctaattgggcatcttgagtttccctatggaaagagattcctaagtgtttctttccttggaatcatggggagcagaagcccttggaagttttggtgactgttttgaggagaattcaggcccttttgaggattatcatctcccctcatagtctaagtagggaggctgatctttagtagtttttattttattttattttgttcagcggggtggggtgtttggtttggatctctagttgttacatttagtgttaaatgttaatttcctggttctttcttctttttctttctctaacgtcaacttatgtgggaaaggtaccccatccttctttgatatccctagcctttttacggtatttttcccttatacaaaatattgaaaaagagaaaaaagaatatccatgttctcttagctacttggttgtcgtcaattgatttcaacttgagtcccctactcttttttgaggtgctttttaggtgccctttgtatacttcctgtttactttgggacgcttctttggagtgccttgcttttattatattgctttttacccataaaaaaaaaatgatttcaactcgcgtcttggggttgttatcaagcactgcaatataaactgtacagtataactacacattttgggattcacttctctttgcatgaatatatctacagattgcattatgatactaattctaggcatcctctatcatgctttcattattttttttggctaatattttctgtttgtccaggctcttagtcttataattataatgcacagggctcttagtaggggtttctctattcagatgtcagtttttgccccttgtgttgcctcataaatgcaaagcattaatgctttttatatacttttgtatagagaatttggatctgatgccccttccatattttttgtaaagctaggacataaaatatcagtatct

SEQ ID NO: 13011 - DNA, 5605 bp, Vitis vinifera
  Intron number 5 from transcript GSVIVT01011540001 (locus G SVIVG01011540001) derived from phytozome v7.0 (chr-ID chr2 ; pos 12757463 to 12763067 reverse strand)
tcgttaaggtgcgtgttcttttctatgtatgcaattagaataagatgacatttggtaaagctaaaaacttaccctatgtatggttcttaaaaaatttgagggacaatgtgaggggaaaaaatgacgaaaataaaaaataaatttaaaatgaacaaattatttttacatatttctttaaaacttatttaacttatttttccccttttatataaaggttaaataatttgaacatacataagtttttaattgattttattatatttgattttctttcctttttttttttataagtaatgattagatattataaacatgcaccaaagaaagagcacatcaaggtacacatgaaacatacaaagagcgctaaagaaaacaacaaaaaagccaaggaacaactaagttgggattattagaagataacgagctcccttatcaagaacccaacaaattaacaaaatcagttagacattctgccatcacctatgtgcaacttacccatagaaggaaatcattgagaaaagtgctcttccttggatacattgcttctcattctcaaatgactttcaatttctctttctagatagtccaaaagatgcataaaggggcaactttttaagccttcttgcacttctttccgttaaaggacccatgctattctaatagagtctctctcactatggttgacaaaacccaaggaatagcgaccaaagaacacaacaattgcaagagaacccttggtcttgggacaatgagggagaataagatctgttgacttctctttcgctttgcataaaaagcatctattaaccaacttccatccacttttttgaagttgatcaagagtcgaagccttttccctacaagcttcccacgcaaagaagcttacttcagatgaaactcaagggttccaaataaccaacaatagaaaggaaggtggactctatgactctaagggcagcataaagagacttcaccaataaggtttcattccttgaatacatccacatttccctatcctcctcttcgttcactatctttacttgtagttagccaaataattgctccacattatcaagttcccaatcattaaaatttctagaaaaatagagattccacttacccctctacctttgctgaccaatcccataaatctgctaccaaagcctcttttgcaaaggctaaagcatatagagacggaaaattgacatacaaaggctccttgcgacactaccttactttccaaaacttcacttctcttttatttcctacaataaaaagcaatcttctattaaaggtatcttaatacttccttatagctttccatagcccaatactattcccacttcttacatcacaagacctctaacctcttcttcctctcagtactttctacttgtagcctatttctagaaagctcccccttgagaaagggaacaccaattccacatacataacaacactttatgaagcaaagagggactccttacatccaaacccctttttcttttcttcatgtagaccaatgattagttcactagatgtagttttttcctccaaagcgccccctccccataggaaatttctttgaatcttcccaagccttattctaacattttgaaggataaaaacaaagacataagtggatgggtaaattggctaatgtactccggatcaaaataatccttcccccttcttaaatatattgtcttttcataacacaacttcttacaaacctgttcttttattccattcaaaattgtcactaacttaaaagatgcacctaaagacaaccttagataagaagtcagaatttcacctactctcctactctacatcccattttgattgacaactctagattgtccaccctcccaacactaatcaacttgctcttctcaaagttagttttagacccaagatgacttcaaaccatatgagcaacaaacttaaatgaaccatttggtcttgagaagccccacaaaagataagggtatcatttgtaaacaacaaatgagatccctcaccctaaaacccaacggataaccaccatccttgttcctctttaacaaacaactaaaggcttccattgctataacaagcaactagggtgaaaggggatcctcttgcttcaatctctggaactttgaaataaaacaaaatgggtgccattgacaagaatcaagaactttgtggaataaatataccatttactccaacctatacattttggcccaaaactcatctttctaataactactaacaagaagtttcaattgacatgatcatataccttctcgatgtctaacttgtacaaagcaccatgtgcatcattctttatcatagaatctatagccccatttgctaccaaaattgtattaagaatttgtcttccctctacaaaggcgttcttatacttagaaattgctttttccactaccaccttcaatttgtttgccaaaactttggaaaggattttatagagacctcccaccaagttaataggtctaaagtcttttagatcctttgtaccccctttcttaggaatcaacaacaaaaaggtagggttgaggcttttctcgaacctccctaggtcataaaaatccttgaaaaacccataatctcattctttcccaaaaagccatagcgaactcatttgaacttggggctgtccccatttaattctaaccaagcactaaacaccttctcttctgaaaatggatcctccaaaatttcagcttcctacccatccaaagaattaaaggccaacctattaatgctagtctctaatcatctaactcaaataagaggttgtggaaagccattgacacccgttcctttatctcactctcctcgataagccacaccccattaatcttaatcttcctaccattgaattatctatggcaaaccaaacatgagaatcattttcctaagcatttttttccattctttagtatttccttggaatcaaacatgaccttcatgtttgagaatttataattatttaatttgaatttttatgaatttgttgagttaaaaattattggctagttattttttaattgaagcattaattaaggttgtttggtaaaaccaacttaaagtttttctaaaactactaaatttaagatattcttgcctcattaacattaagcaaagaattgatgtgagagatacaaaggagggaaaagtcaatggttgtgatagagaccggatgaaaagttgagagttttcggctatctaggcatgaaattgatttggatttagaaaaattatttatttattcaacatcttactttaatttattttccacttaaagtaccattattaatttattttaccaaacatgaatgcttagtaccttaaattaagtcattaaattattaaaatctaagtcaattcaccaaatgcactcttaagtaacatcattaaggcttttaggaatttgaaccatccacatttggaattgatatattggatatggtagagggtgtggtaattcataatccatatagctataacatggaattgactggactgttactctttgtagctttgtaaaatcagcggtttctcttcataatagccttggttagtcaaaacctgataaaaagctactatgaccaatagtaagccaagttatcatcctcaagaaacgagataaatgtgctaaaatctaaacaaaattgattttatcattaaccgactgaaatttgaaaatgaaatagtgatcaaatttagaattaagctaaaactaatcaaatataaagaaaaactgtgcagaagattgcaagttaggttgaaaaaccttggaaaaggggctagatcattgatctgaactttggatcacatctaatccaagactaatctaatcaagcaacatattatgatccacaaacaagatttttacattcaaatttagatatcaaagtcttattagattattccgattctttgtttcttgattcaatcattcatgcactgattcatcttttgagattcgtcttaatcttgtgcacaaccaatcaaataaagttatccactgatcaattgatgagtaagcatgaatggaaccaacattgattgtcccttgagaactactaaagagaatcttaatatgaaaaaaacaaaaaaacttgaaacaagagataagaatccaatgatatcatcgatctgtgccacctctagtgagtagttgacaagaaaatgaaagaaaataaaaatagagggaaaattaaagaggaaaaattgaaattgaaattcaaaatgatcgaagtgtttagaacagtctctccttcccaaaagagaaagaagctctctaatagttatctacaaaaatttaaatctacctatttatgccactaaaaatgccaagtgacactttcctaaccaggccatgtcacttaaagccagagcatcaaatatttaatagtcttctacctctgaaattaatctctggttccaaaaattacaaaattaaaggagaaatcgtctccggcagttgtgaaattgcaaatccgagttcacatctagtttttgatattagcatttgaaaatcaatgccaaaattgatatcaacacatgccttaggtcctcaaatctgaatttcaataccaaattgaatatgagcactgaaatcatttttggtatccaatttgacatcctattccgatatcagcttcatgtaaactatagtcactctggaacttgtaccaatttgtgaagttttttgttattgaggtttaaaaattaaaactgtataaacattcatttactcaaaaattcaaattttgaaaactgttttgcttttgcattgcctgcaaaattgaccacaaagaaatcatgcttttctctttgcttagggagggaaaaaaacagttgaattgttatgttttgacttaaggctgaattgcatttgggtcttagccttggtagtgcaactatgtcgcagagaaatgcatgcaagataaagaataaaataaataaataaaaagaaaaataaattctggagcaggatgatatgaaaacagcttggaagcagtcaatgaattatattgggctttcattggtttgagtttatatctctttattgtataaaaaggaaagctagaaccacagtctactccatgtgaataaatggtaacaaacaaaagggatataaggaaggataaggccattaagggtatttcaaaaagagaaaatacaatacaaataacaacaaagaaaagttaggatctgtttggctagattttcgaaatattccaactattttatgtaactactactaggctcggcatcagcagtagcttagtatagataactcctttcaattaaaacataaaactagaactttgaaccttagtacaattgatgagtgtaaccactgtgagaggaaaagacaacagatgaacacatgaccttttttactagggagacttttctaatgctcaacagaagcagttagattataagaaaatttcattttgagccattttttcatttccaaagatgtatcaccttcaaataactagttctgctgtgtaccgatatagaatgttcccattatataggtgttctctaccggcagcggctctctgttacaaaa

SEQ ID NO: 13012 - DNA, 5983 bp, Vitis vinifera
  Intron number 1 from transcript GSVIVT01034572001 (locus G SVIVG01034572001) derived from phytozome v7.0 (chr-ID chr1 8; pos 19268826 to 19274808 reverse strand)
catctgttgcatgattgagcactagagctttgatgaaattattaaaatatggcattttagtgaattgtttcatcattttaatgcattgtaaagttataagggtaaatatagacaatcatcaatatcatgtgcaggaaatgatatgatgtttcaatgcattatttcatcataagatcctcaaataatcaaaattttaattacaagtttaagttctaagtttcagccagccccataacaaatatattatgccaaaagttcaaagttcctaccagtcattaacattatacctaaaagaaactatgttcacgtacaagtataactatatttgatgtgtcataataatgcttattaaaagaatttgatgtttatgtgattatttgccatttttaaaactctcactcaagttcaactaccccaaaaaggaaaaaaaaataaaactagctgttgtattaagtctaagctttcatcctttactcatcatcattcacaaggtcaactctataaaagcatttgaatagcatatgcagtttgctcaaatggccatagctaatgcatggaataataattgtgcttagacaacaccatctttttttcaagagcttctctggaagatttggaaactcttaagataatttgggtagtgtttgggcatatttctagacttaaagtcaatctagaaaagagtaccctctttggcatcaacgttgatctagatcaactagataggttagtagtggcccttgattgcggggtgtcggattggcctattccatattttgggcttccattggagtggaacccaaaggtaggtgcattcccagatttggtgattgagagagttttgcgaaggttggatgggtggaaaaaaacctatttgtctttaggtgggaggattactcttctccatttgtgcttatctcatattcccaattactttcttcccttgttcaaaattatttctttagtggtgctaaaaattgagaaattacaaaagggcttttctatggccaggatttgaggagcataagagagaccatattgttagttgggacttagtgtgtaaagctaaaggggaagggggattagggtttgggaagactttagtaaggaatcgcgctttattaggaaaatggctatggaggtttcctgaggaaaggtacactctttggcatcaggttaccctaaccatttatcggacacgtactaatgggtgggatgccaacatgatagttaggtgattacatcgttgtcctgaaaaggccattgcataggtcttcccagatttttccaaatgcactcaactggtggtgggagatgggtcaaaaattcaattatgggaagacttgtgatgggcggatcaacctttgtgctctcaattcccagtttattcagaattgtcacagttaaaaacctcactatgtcatcaattcttgggttcactaattctttctttctcttgaaatctaaacttccatcgcaatcttttggatcttgagatagaagttcttgaaaggctcatgtcctctctttcacacttgcacttatctccattgggtcatgactcgagagcttggtccccgtcttctccaagtttattcatagtaaagttgttcttttcggtcctatccaactccatcatttcctattaattttgtttggaaatcactagccctatttaagatcaaatcctttgcttggttagtgacactcaagaaggtaaacaccaatgacatgctacaactgagaagattcttcaaagccattagtccttatgtttgtttgttgtgtgtggagagtggtgaaatggtagatcatatcttcttacattgcccattgagtttggggctttggcacataccatttagcttggttcatatggattgggtttctcctaggagtatatgtgacatgatgcttatttcatataaaagattgggaaattccagtggagacaaggtgctgtggtagtttgcttgtcttgctttaatgtgggttgtgtggtgggagagaaatgctaggattttgtaagataaggtgagaacttcagaaggcctctaggacacaattcatttcttagcctccttttgggcttcatgcaccacaatgtttaagagtgttccccttaatttgatccaacttgattagttgttggtgtctagttccaagggtgtgggctagcaaggatagattactctggtatattcccacttgggacatagtttgcggaatctcatagttgtatacattcttgaacttgattttttgctttcttttgtgtactttttggaggatttctcatccttctttgtacttaatttttatttacttcaatatactatactgttgtttcttaaaaaatgcatggaataataattacacttaagcttcgatctccaataagtgtctccaaatactagtgtccaatgttttcatgtacagattattctctctttctctctcttgatattttaacctttgaaatactttttaaacattaccataatggcaattgctgccaaggtcttaattttctctttctttgcttgggcgacttctaggggtaaggtcttaattttggatcaatttcaaaggagggggcactctttggaaaataggtgttttctatgcctctctgaagtagagacggtggatcaccttttacttcattgtgtaaagactcgggttctgtggaatcttcttttctccctctttggtgtggcctggattctctcttattcagtgaaggaaactcttcttgggtggcatggggcgtttctggggaaagctcgtaaaaaggcttggcaaatggtccccttatgtatattttggtcagtctggaaggaaaggaatttgttagcatttggtaatgatgagctttcacttcaaagattgaaaaattcttttgtatgtaatctttgggttagggtgtctatagttttgagcctttcttctcttgtaagtttctttgattggttaggctctaagtaagggtaggtgatgttttttgtttttatcccttccccttcgatttgagcctttgggcttcttttgtatactccctgtatactctgagggcactgcttttggtgcttcctcttatcattatatatacatctttttatctatcaaaatataaaaaataaaaaaaaattccttagttctcattgacgtatcttatgcatgggaagtggagaattgatcaaccatctctttctatattgtcgttaacattggggctttggcacaagctatttagcctagccaagatggattgggttttgccaacatgatgaccatctcatttacgggtttggggagtttcatcaaaagaaagaccctttggaaaattgcttaactcactctttttagattgtgtggcaagagtgaaatgataggatctttgaggaaaagtggagaatggaagagatgttgtgggatttactttactttcattcctccctgtaggtctcttggactattgcctttaaaggcatttgacttaatgttattcaacttggttggctttcaatttgtaaatcaaatggggtggataacaatgagaggagttgagtccaattttgaggagattttacctttgtttatccttaggtggcctttaacaatggtggagatgtttagttttattttgatcaatattctaaagaaattataatcattattaataaaaaaatctaaagtatatagattgacaatctgaactctagtagtgtttataataaaaaaatctaaagtatataccctaactctaataggaaaataattttaataatccgaactacaataaaactttatcactataaaataataaccctaaaataaataatgaataataaaatctatcagttgctatatttaagcctaacataattacataatttagcatctttatctccatcaatggttttggatagcgtttgacttctgcctttagcaatagaaggagaggaaattgaagtagttactattggttcctgattgaattttatgttcaataactgtgtattaaagataaggataattttgacatttttaaaaattttagttggataaaaatatattcttacatagtgtttgagaaaaagcgtgaattttcttgcttctgcaaaacatggaatcgtagatcagtcatgttgggaagtgtgaggctcatgggtgatagttttatagaaacactctcaaaatgttacacttaaccttcaaatgttgctttgtttaaaaagctctttcaaataaggcgttgtcatgtatgctttttgagcaacccccaagcagaagactggagaggtgagaataatattcccttgttgatgcttgatagtttttttttgctggattggcttggatggaatatattgtccataacagttacaaaatttgagcgtttctttgatttgaagcagaattcatatttaattatccactacttcaaaagcaatgtacttgttgattgataaccattttagactgctcggtattgtattggagctatgacataaattatccagaaatgctggagttgtttgggatcatctgaaaggtggggttctttgacatggagctaaccacactttgacatgaattaaccaatgacagaggactgttgggatttttgagtgcagatggaggatattggaggatttttcttatccggtatgctttccttgcttgcctatgagtttctctcaccaaagcttttaagggcacaccttgagttctttgttcctaacttggtgcatagcttgctattccaagaagattgttggggagatacatcctcactgaagactgcctcctatgggttcttttaagttaaaacttttgtgctcgttgagtaatctaagacagctagggctaggaggagtgcttagagatcataaggatatggtgtcgagagctttttctagatctctactgaagaagggatagggatgctagtgtttttggaggatttgttgcaagccaagacattgagtatctgatcattggcttgagggtaattctgttgttgtaatcttgtaggtagctaataaggaaagaggtccatggaagtatgattggtggctttgcgaaattgtcgatattgctcaaaactcgatatgctctttttttttgggtccacacttagtcaaatatgatgttgatgttttagaaaataaatgatggaaacttccttttgcaggggacttttaacccacccaactcatgtagatttcatttgcaggcattttcctcttctctctcggctctggaacttatctaaaattatctttaggagggtttcagacttgttcttatattttttatcagtttttcttttttgtattttttggatggactgtcttgtccttcttgtatttagagataaatttgaatgaaattctgttaacatgtacaaaaaaatagtagtgagcttatctaggtaactaataagattttgttcccagggggtttactgtgttgtttgcttgttaaggactttgctgttttataacagttcggtgtcaaacttcaggggtgtttcttggccagcaactatagtttcacatgaagactgaaaatattaatttgggaacatttatttgtacataaatggtattataatttttcatcttctggtttagtgcatatgaactttgactggtttttcaattgatgtttgatgattatttatatgtacccccataactgtaggtttcttatgcttggccactgattttttgcccctttttcatcagaagtggcagtccatttatttcaaagtccgtattgtatttttctgaatccaattttttgggagttgggaggctgggtaggggcatggcggcatccatatcagtgctgataatttttatattaattgccatattaacaataatggcttatgaacttttttgtaagtaaaaaatcttatgcaatgtggaattcttttgttgtgttcctagacacataaagcaggaggagg

SEQ ID NO: 13013 - DNA, 10179 bp, Vitis vinifera
  Intron number 1 from transcript GSVIVT01030564001 (locus G SVIVG01030564001) derived from phytozome v7.0 (chr-ID chr1 2; pos 6768419 to 6778597)
tcaccggtgcagggcccagagaaagggagaagaaactagtgaaaaaaccccacgaataggaacgtgtcactaacatgaaaaagtaagttattcggttcatgagaaaaggtcattgaattggacaaaacttatgggtaatgatcagattgctcacttggcaaacatggaatgacgctgtgaggggcacagtcatggacaagcagaattggcctccgacacggacttggttcccctcggaagaaacgtctagagatggagaaagctcctcgcgtgcagtagaagagttctcttgcaattgaatctgtagactgaacccataagcaagggagattttttcttccagggtagaggatctgaggcatcacatttctgggcttagtgttggatacttcacaaaattcttccaagtaacattttcggatgcggcattagtgacctattgtactagtcagatgtcttatctcccctatcaatccgacaacttggaaggtgcttcgcggcagctcaggttgtgtgtaagtgaacttggaggagctagtaatttaaatggaataaaaacaaacgcataccttatacaaagttacgtttctaggaaaaaggctgagaataataatgcgtcgttacaacgctccaaatgatcgtatcgtaatagtgaaagattagagagtcaatcacatgtacccataacccaaaattgctcacaagatgtgagaaagagaaggagacaacacttaaaaaatgggattatcgtgctctacaaaggggatgggagtagtctatttataaacttaatcaaataaaattcttcaatggataactctttgatcatgatgagattatcatctgatagccctctcatcaaggaactccatttgatagctctcttatctttcaccaatccgatgattttgcttgctttggatgactctcattaaataatgaagtctatcatctcccattcacctatagtgggcaagatagtaatagtataattttatctcatcatcttggtccatattgactaatgaattgtacaattgacaagtatatataaaagaaaattgagaatactgtaccaaatcttacatgaaccaacatagtttatcccaaaaagtctcaatttgctcctaaagagatttttctgcatctattcaagtgaagagcggatccaataagaacctactaacctaattatataatgaataccatgtcatgtagacgtcatagcgtatatcaagttatactagcatagggaatatgagtcatctttttctttttttctaaaatcttaagacgcgtgtttaaagttaaaggtctttcctttcttgttaggaatgtaataggcttacaattttgtatataaaactattcaagaatcttcttaacatacgtctttcaagacaaactaagaaatctccttgaatagtcccttataatgttaatttgagcctataatttgctttacctgtctttcatcttaaaagtggagacaaccactttgttaacatggaaagataggataaggaatctattctcggactatttaacatacatgcaatgaccttttttttactattataaactcattggtgataatgactcaatgagataattttttcaagccatggaaagactttcaaagcttgcaaactttgtgcttctgtccactcaacatgaaaccaatcgattgatccatgtaatcccctttgactcaatatagtcacaattgaggtgtcattctttaccatagttgaacgtgttttgtcaactttgcccttctttctatcatacttactttgcttactctttgtgattttaatactatcaaattcaattttctcattctttccttttaaatagatctcttgaagttattatacttagggttgagtctttcgtgcaaactaccttctactatttaagtgaagtagttatgagttttagcaaccttcaagtgcttaacttcaagttccaaatgatgcaatacatacattttaatgttcttgttgtgtgtcatattgtttttcatatgctctcatgaatcaagttggaaacgaatgcttgtttggacctatcgctcatcgatgaggtcgatccttgttactttcaatttgtggataataattggataatagttgacatcattctaaaatattgtttcatattttgatataagtgcatcttataggtgtcaaacttgagggtcaatgcacacaatctagtagtagaggtcccatcaaatttatcctctgggtaatccacatctcttgagtaatttgatgtctctcaaaaagttggataagatcattgtgcatattgtttaacatgacaaaatgcacatagggatctttcttttaacaatattgtttaaaattgttatttatttattataaataatttttcatgttaaattgtcattattacaataatatttgaataatttcatgaaaataattaaaaaaaaataatcacatccaaatcttttgtatgatacatacttttcaaaattgcaaaataactcattttcataattaaaaattaccaaaatttaaataaatcacaatgacttccttttgtcatccaaattttgatcatgccctccattcctcattttttatacttggaggtgtgtgtttgtattacatttctaaatttttaattgactcgaaattttaagactatgtttggatcctagaaagttaaaaagaaaatagaggaaaataaaataaagagaaaaagtaaaggaaaataaaaaatggatttaatgttaataaattatttttatatactattttaatttttttcacttatttaactcttatatataaattttaaataatttaaaattatataatttttttaataattcgaattatatttgaattttttcacattttcaatagtaaaaccaaatatgaaaagaacattattcttaggattgtttttcattctctagtgttttccgaaaattaaatatagcctaaaaaaatctctatttttatcattttcatccaaaacaatttacaaataatatataattcaaaaggggttttatttttatttttttatattattttcgtataattcttggaaagtatgaattttttatttgtagttcattggtttaagaaaaaccaatttgcatagactaatagtcttcttattagaaggctacataatattgcccaactcaatgggcctgctaactttggacaagtcaactggccttgcaataatattgcttgcccaaatactaactctagaaaataactgtttaaggtagaaatgatgttgaatatcataaataatttccctcactagcctatgccaataaacagtcaaagccccatccaccttggctcactcacttgggctacataatccataacttctaaacccaaaattcagcatgtcaactcataaagatggagttggttgattagctccatccatggactgtgatgaaccaatggaaaaaactgaggtatgaatctatacatattgcactttaagtttaagctgttgaaaatatataataaaatttggataattgaagaataggtgaaaaaatggaaaccccgactacaaacaaatataaataaggtacaaagaatgtgatcaaagcacaaaaagaaatgaccaaactacaaaaagaattagacacattatattataagccaatgaaacttcagcaacaactatgagtgtcatgccctaaaacccactccaaagacatgacggtcatttcacacctcaaacccaaagactcaaactggaaataacacaaacattcatattgtaactaaaaatttatcaattaccaaattcatgttcgaagtagtaggacaaaattctaaaatcttcaagtatcaacttttaaaaaaaaactaatacatcaaccaatgtgttattgtccaaataactcaaaacttaaaataattcaaacgagatttgagttttaacatctaaacaatgtccaatataaagagaatttaaacaaatgtcctaataaagcaaaaatttccttttaacagtcactcatcgcccaaactgaggttacctgaaagattatcaacaaaggggatgagctcaaagcccaataaggaacattaatacagtttcatggatcaaacatttttaatcatgtttgcaaatagaaggtataacatatacttattttcataaaaacttttaagttcaaaatactaatacattcaaaacttttcaacaaaactttctcttatccatttcaaaacaatttctcatcaaaacaaaatcgaatacattcaaaatatctttactctggttatcatatcacaaatggtgcccaattaggtgggacttcacaatttagtaactagtttcaaatttgttccatttaaggtgaacaaaactaaatgtcaacaattataacttattgactaaggtcaaaaggtcaactattgtaacccgttgactagggtcgtataatatcaactattataacttgttgactacagtcatataatccatagtcaaaacactttatttcatgaattcaaactgacaaaacaaaacatcatatctcctcaatttttcatttttcttaaacaaagaaaatgctaaaatatatttttcatacaaaacatatatttgatcaatgcgtaaagataaaaataatatgtttacacattttaaaatataatataaaaataaaattattttcttttataaaatatgcattaatttccctcaccttgaagaaacactcaaaaacttgaagtatttagtttgacgaatttactcttcacctaacataataccatgcaccatacttattattgattatttatttagatatataaatttgacattcctaacaatattttatgtagttctcagtgattctaattaatttcctatgttaacattattagagaaaatattattttcaatttcctaaacaataatgaattaatttaatgaatttccaatttttttataaacttgtatttcttccaaatcttattctaaccatttatttcttttatatacttaaactaaatcaaaacttttattaaaaacaattactattattattactatatttttcaataccccgcaacacccaaacagtcttattatacgccactcacaagcatccaaatcatatagttcttattattattattattaatatcattattcttattaatcccaactattattattattattcttacatcacttacaaatatccaaataacacaattcttactaagattattattattattattattattattattatcactattctcatttgacttattaattacaatgtctcttcttatttaataaaataccccatgtgcttttaacaattccaacaactccaccaactctacttattattattattttaatttattccactccaccctttgtctctcactgttacatattgatttttttattattttgttgccccaacatagtgcctcaaatccaaaatctagaaacatgcaattgttcttcttattattttccaatcccttaagtcacatataatcatacatttatttactcattttaatttttaaaatttcattgtttagatctattcatataaaaaaaatcgaacttccctattttcatcaatgaaacaacctatattcataatttcaatattttgatcttaaaataaattaaataaattaactctaatctaaattaaaattttctaaagaatatctaatgtgttcaaaactaactaatgaatataatatattaatatatgttagaatcttaaccgaaaaaaatttgaacttcaaactttagacattcaaacctttagcctacgttctccaattctctaattttttgttaatagagttttttgaacaaagaatataaaatgaaaatctaatctatacctaggatttttaattgtaaaatgactattttacctttaatgagtttagttaattaattaattaatttttaatttactattttgcccctaaagttttttttgggtattacaatgaaattcgggttgcacacatgaccttgattgattgacgatgtttcttattatgatttggtactataattagatttggaagtagaattgattcttcaacattttaacaatagtaatacatgtggtaaaatttaatataattcatcaacgtgatacaaactcaatacactttttatcgatttggattaagtataagtgagtttggatcaaaattatgtcaaagtgcataactcatttaatagataagtaattttttggtcaacctgtataatacgaattaaactcaaattaacccatccgataatctcattattaatgtaattaaaattttaaactttttaatttatttttgatttattttaagtttgcttttaaataaatatgtcaattaagttataaacatatttgattaagatattaatcatataaagatatacaaaatttaattcaacttgattattaaataaaagaacttaataatctaatgagttaaatgtgttatatgatatattacttatttaataattaggttgtatttagattttatatttttaatatgattattattcttgttgggtttaagttgagttatgtaataaaatacttaggtttttacacgatatcaaagtcattggatttggtagttctccattgactgctctctttacccctttgcaacgtgacgtaccaacacaaaattgtcacccctaaatagtagtgattgcgattagtgtggaagtagatgatggggtgctattaattcagacaatgcccaacatgtactagatgcataaatgcagaacaacaaccaacaatgaccgtacagctcctttcattgtggcatgttgcctatctttggcgtctcaggagcacagttcacaagtatatatgccaaagtctgtttctcatccacatgggaaagcctgtgcaattttttttttttttacttttcctggccagatccaatgccctaatgaatcatcctctgcacaaacctttttgggccatgcatccacgtattcttgttttattcccacattaattattttttcttaaatttcaaccactcaaggtgtctctcatttttctttaattttatttgggttgtgaaaaatgcttgcaaaaataaataaataaatataaaaaaaagaataaaaaaaatcaaatgaaaagtatcgactcttatttggtattatggacaaatatccaaaaataaaaagatataataaaattcttcattaaataatatcactttaaatttaaggatgagtcatcggaaaaatatatatatatataaatgatctatcttcaacgtcagttaatcttcacataagatgatcacatttttatttaataatgatatttaaatttaaagtcatatcagactcttaagtcaatgacaaataatcaaatgatgacttttaaaataattttctcacagtataatattcaatatcataaaatttgaacatccctgattgaaaataaattgatttttgactgaagacaactcgtcataattttttttccctaaattttccaagcaattgatgtgtttggcatggggaaatccaattggggttcaagtatataggagtaatgaaacatgtgccattttgaattggatctccatctatgacattatttaatagtttgggtgtgtcacacccaaagggtcaccaccatacccacaacgaccccataattaatagtttagacagcaaaaatatccattatctgtcttgataggtcacacacacatagaatttaaactataacggcttagcaaaactgtgtagctggctttatttatacctaaacctagtaatgaagttgctgtcgcgtatctatctcctctcaattccattatctgtcttgataggtcacacacacatagaatttcattttcatttcgtttgtcaaattgggtgggcccaaaacattatgttaattagaattggatcatatttttgtcaccttttttttgggcacatgacactgttacatcaatcatcccttcaattctttatataatgtcctactaattccttttgactactacctatcccgtttgaaaatttggtctcgtatatgcattggttgttttcggatatccaaaaagtgtttttggatcataaaaattttcaaattgatggaaaaaaaatgttttaaaaggttttttttttattttgattttttataaaaaaatacaaaaaacttttttatttataaaaacaacgtttttattgtattttatgaaataattgggatacactaaataaatagacacccctcgtgtaattaaacaaagtcatataagagttgagaatcggttttgactcccacctactcggataaaattatgtaagataacgactttccaatggataatttttgggtgggattcaaagtttggcaccggcattattcaaaaaaatttatatttatttatttatttgtatttaagggaagtgaaaaggcgatagagtaataaaattgtggactttgttgagtaggaaagagggtatattgtaatttgattgggtgtccaccaaatagattccgtgcaggacatgtggtggtcggataaagagataaagactccttaccttttagggcacattttctttctttttttttaattttttctttttttgtcaaaaataaaatatagaattattacttatgcttctaaaagcgacttttgtgatgtggaaaaactattaggtataatctcccatgtagtgacaaactcctccttaacggtactatgcataatgggcctacccaaaattaactaccattaaacattaaaaatggttaccaattgtattggaagctatatgaattgaattgaattggtaagtagtgttttaatgtgatttttgaaataatagtatatcaagtaattatttataaatcacttcggttatatttagttctcaaaaaataatcaagtaaatattgacatcgttcttcaagcagaaaatgatgttacttgtatttatggtcttaatgaagtaatgatgggtctagacttacaattttatcataatagattcgaacatttgtcttagatcgaatttcaaatcaagagtaaaataaatttgaaataataataaaaataatttattgattttcacatttttttttgccttattttcttcacatttttcacaagaaaaaaaaacattcaaattctttgattttttaaaagttcatcaaaaatcttatttttgtaggaaaacactttgctcgtattcatggtcttgataagtaatgtcgggtctagtaagcaccttacagctctgtcataatagatttaaacatttaccttagatggaatttcaaatcataagtaaaataaatttgaaataataacaaaaataatttattgattttcacatttttctaccttatttttatcacatttttcatgagaagaaaaaaaaactctcagattctctaaattttaaaaaatttatcaaaaatcttatttttataagtttcgaacattgttaaaaatatttgtaattcatttcaaaattacttacaactagtaagttaaaagttatttttaaaatttccccccctaaatattttgcttttatttttaattgaaattcaagttattaagaataaattttttttttatcaaacaattttttaaattacaagctcttttataagatcaataatattttatattattttatttttttttaaaattaattatttacccgatatggtaaattttcatgggcctagtaaagaagcccaatacaatgattaccgcaatagccattcgttttgaagtggcggctatactttaaccgttcacaccctgtaatggaagaaactaaatttgctaaaaacgaacaccaccaccacacgcactcaatagcgagtgcactcaacacccaccgaatctgagcatcgttacatccggaatcacgtgataaacacactgcaatagtatcaccgaaaacgcgcctcaatctcgcgtggagaaggaatggtttcctttctttaaagacaacaccttaatataaagatgacataattgatatatctgaagcttaacgtagtactgctgtttttagagagagaaactagagagagaggtgttcagaccttgagagagagagccc

SEQ ID NO: 13014 - DNA, 6205 bp, Vitis vinifera
  Intron number 5 from transcript GSVIVT01033907001 (locus G SVIVG01033907001) derived from phytozome v7.0 (chr-ID chr8 ; pos 16823791 to 16829995)
ctgttgagtccgaaacccactcgattctgtgaattcctgtcacttcaaaaagaaaaaaactggcattacagcccaaaatgagaattcggggaaacatgaaatggtgtaattttcatttcatctgtggaatagtaggcccttgaagaagtaattttcccaacatatgctacaaaatattgaatttacaacaattcccgatatctttcttcctctgattaccagcaggcgtaaggaagcaccagtggtatgcttgtgtgttatggctgttcaaagttcaaacctaacctcactccaaaattttgaattttctacaaaacatctaggaaagggtgtgttactgtttacccgacaaagcccctcaatagttttgaattttctacaaaacatctaggaaagggtgtgttactgtttacccgacaaagctcctcaatagcgcagaatatcgcgtgtgtgtgtgtgtgtgtgtgtgtgtgtattttgaattttctacaaaacatctaggaaagggtgtgttactgtttacccgacaaagcccctcaatagcgcagaatatcgtgtgtgtgtgtgtgtgtgtgtgtgtgtgtgtgtgtattttgaattttctacaaaacatctaagaaagggtgtgttactgtttacccgacaaagcccctcaatagcgcagaatatcgtgtgtgtgtgtgtgtgtgtgtgtgtattttgaattttctacaaaacatctaggaaagggtgtgttactgtttacccgacaaagcccctcaatagcgcagaatatcgtgtgtgtgtgtgtgtgtgtgtgtgtgtgtgtgtgtgtgtgtgtgtgtgtgtgtgtgtgtgtgtgtgtgtgtgtgtgtattttgaattttctacaaaacatctaggaaagggtgtgttactgtttacccgacaaagcccctcaatagcgcagaatatcgtgtgtgtgtgtgtgtgtgtgtgtgtgtgtgtgtgtgtgtgatgtacacatcaactgaattgagttttctaaaacaaataaaattttaaaatttgggtttttaccgattgaattaaagaaatgattgaaatgtgacatatagaagaggcttaatgataagaaggtgattggaggtggagaggataaggtgccttgttggagataaagaatggtttttttctttgtgaagtctctttactcttgcctacaaactatggagttttgaccccttccctaaagttgtagtgtagaactcttgggtttcacaaagagtgtgtttctttacttgggaggctttgtgcggtaaagttttgactctagatcatttctagagaagagggtggttctgacaaacaaatgtttcctttcattttcgggaagaatcgattaaccatcttttgttttactgtgtagcaagggccttgtggtaggtttcgttttctctctttggtctttctttggtgttatcttcttttataaggaaggctttgttggtttggcatgagtcttttgttggaaggaagtagaagaaagtgtaaggggtaacccctttgtgtctcttttgacaatttggaaagagagaaataggtcattcgaaaataaggaactctccgtgctaaggctaaaaaacttattcctttgttacttgttttctcaagctaagatgtacatagttgtaggctctatgtccctttgtgactttattgattggttggatcctcactacgggaaggagtagtttttgtttccctttccttttttggccatcttttggcaatcgttgtatgcatcctatatgctttggtgcactttctttttggcacttttaatgcatctcttgtttacctatttaaaaaaaacatagaaaagtgagctgaaattttaaacaaagggatataggcttttaaaatgggaaaatccaacgaaaaggttcctaacgttatatatatgtatggattcattttaattttgtggacgcgttttaatgttgtaagaatcctttgagccaagaacggacatactcagttaaaagtgggttattataaattgtattagagtttattctcaattccaatgtagaagtttgtttgactctacaagagaggtatgtttcttttggacttgcaatcctattttatgagatcttcttaacattgtagacgcgtattttaaagttcaaatggtcatttaggtttaaaacatacaattggtctgacaagaggtgtgtatatttagcttcataatcatatcacttcgtcttatggattcttcttaaccttctagacatgtattttaaagtaataaaagtcttttcgacttagagtggatgatatctatatgattgatcctatatgaggtatcttgttcatttggtcctacaattttatctcatggattcttaactttgtaaacacattttaaaatcatgaaggtcatttgagtttaaaataaataatatataattaagagaggcttcataggtggtagaatgtatctttttattttttatttttaaaaataaaagcttagaaactcttatacgaagagtataggctttacacgtgtgtattattaaatttaaggctttgaagtatatattttctatttttgaaaaaccttagaaactattatacaaagaatggaggctttatgatatctccttaaaaattattttcaaaaatcttaaaaattgaggaaataaaaattttctaataccccaatttttttaattaacttttaaaatttattgcctttttaatataagtctctaaaagttaatatattttataaagaagttattactattttccttttttttatataaaaaaatagagatgcatccaaactaatgagaagtaatgaatttaatttaattattttataaaaggagaaaaaaaaagtctaaaaaccttttattttacaaatttgtctctcatattatgaatataatttgaaaaataccatattatatattttataaagaagttattactattttccttttttttataaaaaaaaatagagatgcatccaaactaatgagaagtaatgaatttaatttaattattttataaaaggagaaaaaggaagtctaaaaaccttttattttacaaatttgtctctcatattatgaatataatttgaaaaatatcatattataaatttgtatataattaattaaaaataacttatttaagcattatgttattttaatgtaatatcaacttcattcatatgaagtctgtattaataaaaagttttcattttaattttgcattaaaatactgaaatcaaaacggcatcatataaatatttaaaataaaattgaaaatataattagtttattgataatttatattacataataaattatttttatttatttttattattactacataatatactaatataatagatgagtttaagtatcactggagacctaatcaaataataaccaaaattaaaactaaaaatttaaaatatattaataggctattaagatttttattttattttttttcatatttatgaggggaaaaaaggaattaaaaaaaacccaaaaagctatttacgacttaaaaccatatcatttttaaattaatataaaaaatatgtatattctaatttatgcgataaattaaatataattaaaatttaaacattttaaagacgaaatgttgacccacactgaagcatcgaagcactcacacacacttgcattctttttgttttgttttatttatttatttttattgggtatgaaattaaaggcatattgttggagaacccctccctctagctattaaaggaggccaaaaattttgaactccaacacgtaacgtctttagaattgggacagagacttattttgtttgatatgttcaaaatccacaaaaatgatccaacaacgtctagaaaattggaagtttttacccaaacaagcctctctattgaggtttcaatgcccgacacgaaagaaagttcaaaagtgactgagaaggaatcgatgtggtcattatagaaacaccaatgccagtatctaattccatctttttctctcaattcaaatggatgaatcgtataaaccaggcagtgacaactgacaaggcccacactctcgtttaagcataaagtagaaatacgtagttagaacttagaacgcaaagtctcatttaaacgaggccgtctacgtattttattaatttaggacaaatcataacacatatgggttggattttacaataaatataatttaaaaataaataaataaaagtaaaataaataaaaaatataatatttttcttaccatactctctctctctctctctctctctcacacacatatatatatatattccttatattttataccttggttgcattatttgtcacattttacatattttaatcatattattcatactttgataacattttttttttaccttggttgcattatttgtcacattttacatattttaattacattattcatactttatcaaagtatatttttgtacattgaacatattattttctctctctctctctctctctctctcacacacacacacacgcgcgcgcgcacacacacacatatatatatatatattccttatatttttgtatattgaacatattatttatactttggttgcattatttgtcacattttacatattttaatcacattattcatactttgataacattttttttttaccctggttgcattatttgtcacattttacatattttaattacattattcatactttatcaaagtatatttacttggttgcattatttgtcacattttacatattttaatcacattattcatactttgataacattttttttttaccttggttgcattatttgtcacattttacatattttaattacattattcatactttatcaaagtatatttttgtacattgaacatattatttataccttggttgcattatttgtcacattttacatattttaatcacattattcatactttgataacatttttttttaccttggttgcattatttgtcacattttacatattttaattacattattcatactttgataacattttttttttttttaccttggttgcattatttgtcacattttacatattttaattacattattcatactttgataacattttttttttaacccacacacacacacactcactgaacatattatttataccttggttgcattatttgttgcattatttgtcccattttacatattttatgataacatttatttttaaccttaatcacatattatttataccttggttgcattatttgtcacattttacatattttaatcacattattcatactttgataacattttttttaaccttaatcacattatttattccttagttatattattcatatattagtcatattattcgggtctattgtgatcgaatactaaaacttttatcacttgcaagtgtaaaactttcattgctgaaggcttaaagccttaaatagtgtagctgaaggttagtcctaagtcttgacctgcatatggcattggataatgttaattaaatcaattaaaaaataagaagcaaaatttagaataataactttcttgcattataccaaaatgagcaacaatactagcaatattatccttctatcatgtatttttataaaatcatagaagtaacaaatatttgaaattccgcctattttgcaatagtctgattttttttttttttgtcttgctttagacaagtctctcccttttttagggtccagctgcgggatctctcgtctctcccaagtcccaacctgctaggtttgaatctaggcataatgaaaagactcaagagtttgcatttgaccacaccatatattaatgcaatttcatcccattaaaatattggctaaccagttgatgacctattgaaggaggttttttttgttttttttattttgggtaacttaacatgtgtcgtgctgttatcggataaaaagtatgggtatggtaccgaaacgttaatttcggtacatagaccaaccctctccctgtaggggtagatgaaactttccctacattattatgcacgcacaaggcaaggcaataaaatccgccatttcaaggccaagaggcaacaaaggctggagagcaaatggagtcgatatggtggtatctgatggtatggacgctactttaccagagtac

SEQ ID NO: 13015 - DNA, 1576 bp, Vitis vinifera
  Intron number 3 from transcript GSVIVT01025020001 (locus G SVIVG01025020001) derived from phytozome v7.0 (chr-ID chr6 ; pos 5220015 to 5221590)
gcagggtactctccctcactctatactatgatcctcaacttgttcagattgaaacctttccaaattggattatgacgaaattaattctacatcaacaaatcttttatatcttaaataaacccaaagacaatcctccaaatgaaagaaactagatcaatattacttctcatcttataatcactaaaatatacatgctatgactgtcaattgtttgaattctgacaacatgtgtaagagttgccttgatgattcatattgatttgagtgatatggtgacgatatgatgttatactagtcggcagttcatgagaacattgtattttagcactaaaataaaagaatatgataaatgattacattttctttcaatacttctggcagtacttgttttgtaataggttgtaattgcccaaggtctctttacttctaactgatgacggtgctaaatttattcctacccattgagtgacccttaactgatatttcccatgaagaggaatgttttctttcatgatgcttgttcctgataagcaatggtttttccgtcctcatatgatatatcttcctcatgcttctctaattcggaaggtacatgttcataagttttgaaaacctttgaaattatttgaatgtgaataattgttgtgatggttggagaaaaaagccctggtaattttgtactcttaacctgcctaaaataagtgggttcagtttaatgttcttccaagggtaaccccatccaactagtttgtcaaggatttacatttgggttaggttcttggatattgaattttaaagcaatttaaagtaaccttttctaaaacaattttagagtccgtttggtaatgcttctaaaatgtgtttttaacccttttaacacttaaaattgttttatctttcaagcattaggagtagaaatgctttataaatcactgtcaaacaaactcttaaagtgcgtttagtagtgattttagaaagtgtttctaacttttataacacttaaaaatttttatcttttaagtactagaaaaggtagaaacactttctaaaatcactatcaaacacactcttaatgttgttaagtgctttctaattggctggatggttttactatggaataaacttcctaatatgtgagtcagatgccagagccaacctgattaaaaaccatcagactgaagcaattctttggcctgatcagaactttgcctatatatgacttatcactagcttgagatgagatgactgagaaagatgtttttcttagtcatggatctgatttatgcctgttttctgatcttccaaaatcaaagctcgttttcttctgatagctgaatttagcttgtttctctgaattaatctcatcggttttgtattcagaaatgcacagtatgagattttctcactcgtaggttatttgaataaatgtgtgaatatagatatttctatttttggtatttatttgattgttgtgaactattattttgctagatcatctaaaattctcttaatacaaatctcctgttaatgctttgtgatagattgtaagaggaaggctgatttttgtggaaatcgc

SEQ ID NO: 13016 - DNA, 9506 bp, Vitis vinifera
  Intron number 1 from transcript GSVIVT01018049001 (locus G SVIVG01018049001) derived from phytozome v7.0 (chr-ID chr5 ; pos 5795554 to 5805059)
tctggggctctgatcaccctggcatcgatttcactgtatgtccctgcctaattctcatttaattcatctagttcttggatttttgtttttcttttcggggttttaatcgtagtggttaattgatttggggttgctatgggatttgaagaggtttttggttttttttttttcctggagtatttagggtttttgtttggttggagagaaaactgaggaagagaaaaaggaaacgaattttggatctgagattttatgcagtttggcttctcaaaaaaagggaaaaaattcaagtgcccacaaacatcaaatagagatgtgttagattttgcttgataagacctagatttttggtttctctttcgggtgtcctcaaagtttctccacaatcaaacagtcgtttttcccctttcctttaattttattttaaaatagatttttttttttgtttcctataaaaataaatatgtatagaggtgttagggtgcaccaacaacagaaaatagatgtgttagaggtgccttatgatacggatgattgagggctagtttgagttctggtctttcgggtctgaaacagtggaaaattgtagaccctgatttttctttgtttaaatctcctcagtttttctcaggtctgaatttttgatatgttgtcacatcatttcatatcaattagaaatttagaataagattccgaagccttttggtgtatctgttctgggtaaaagagacataaataggtcaattatagattaacctggaagattctcttgcaattcagaaaattaatatcaatataccaactaggcgttatggttcaatggtaaaatgatcatatatcaaattctggaccaagccttttatatcatgaccagaaaaaggttcaataccgagatgaaatagtatcataactttgtattagatctgttgatctcaagcttcaattgcgtcttattcgagaattagtatccaattgtccaacctcatccttggggtgaaaagattggtacctggggaactccttaattgaagaaaaataatatccaacttgacattagtagggctgttgagaaatttcaaaccagcaggttgattagaggtagaggtaccagaagcttgttgagaagactgcagttagtccttaaggaaaacaataaacaagtgatcattcctagataaaattcagaaacaatcaaattcaaccccaaatattgtagtgttagtttagctcaatcctttgttttctgaaacaagaagctgatgcttccttgtagacttatccagttgaattgtaagctggactggtcctgattgtaaggttgtttgaaaaatctcttcctgtctcagaaaagtgaacacaggaattatatcctcggtcatccttgcaatatttaatgtctttgattcaagctggattaatcatcttctcgtttggttggattaatcatctgctcatgtggcctaaatggatggctttgatgatgatgatggcagctgcaattgtgaacattaaggagtaaatagttttgatgtaggacaacctaggatgataggaacatttttttttgataagtaggatataagaagaggaacattgaactaaagttattgttgcaggggaaaaaaataagatatagaacaagaaaaaaataaagaaaagataggaaactttagagtcttcccaattccttctaagagttagaaataaagtcttactcttgaaaattggaaggcacgaaaaaacttaatactatccatcgtcaataattagtctcattttacatcagttaccatgaaaaaagaaacccaatctatgtagtcatttagtaggactcttattcctttcttaaaactattaaatcttctaaaaagattaaaagagcatagaagcttttatatatatatatatatatatatatatatatatatatatatatatatatatatatatataattagaaacctaattttataaagacttcttttaataaaagtttataataaagaagagttgcagatactaaaaggacttacatagaaactttagagaagaaagattttagaaaatagacaatttagaaatttaaaaacttcttttgaggagaaattttcaattaaaaaaaaaaactttccaaattctaaatgcaactcaaatgctgattactatctaattagtacattagagaacctttaaaaaactacaaaattacctacataccattgatagagcttgaaaaacttgacctcgagtttaaatgacttttcatggttaattgtaatccaaagcagtgttttccaccttttttttcctttgttaccccctataaacttgttttttgattggctaagtgctagttgagggctggtattgtatttcctcttctttttgtgccctttggcgcctcctgtatactccctgtatacttttgggtcagcctcaaggtgcccttttctaatatatgttttttgtgtgtttgcctatcaaaaaaaaaaacttgttttccacatttcatcgaattttttttatataatatgaagtcgagattaaatttctttccacacttgtaaattattcaaaacaatcttcggcttttataggtcaagcattagctttacttgagcttgtacaacttcaaaacaattattacttagagtatgatctctctctctctctctatatatatatatatatatgtttgataggtaaatttttgtttctattgggactcgaacctgaaatctcccacaaactctccccaaccctttatcactagagccaagcatcaagggctcttggagtatgaactatgattgcatactcaacattgacagttaaaatccgtgtcatcactcacataaatatgtttggtgcattagttaattgagagattatgaccagccgctcatatagcctatccttaggatatatagtaagcaaaaaacctccaggaaggctcaaccttaatctttcttgaataaagccttcaatagatgattcatcaacttgtctttaaggacttgcttgcttcataggacttgcatagtagatggataaattaggtgattaattctttagcaccttaggaatttgcttgctagaatcaaccagcattcgtcgcacttctttgagctctcttacaagttattttgggatagattccaccacatttggcattctagatccatcataccttactccttgtttgcagcttcaaattatttcttaatggagtatttggtggtttttttggttcttagaatgttgattgctccattagttgctaaggtggtgaaatttccttaaatgaatagagaatcttcttatgctcattttgacatgtgttctcatgaccatcatgttgcactctctcatcaaaagtcatagtctttcaaacaaaatatgaacaaatttcatcgacaaaacatcacaacatatcaatagctcaaaattattgataaaagtagatgacaactattacaatgagaactcattgtaatagagttgtcatctacttgtgttatttaataaggatttggatgcttctttgtctttaagttaagcttgtcaacaagttcttatgaagctaagttggaattaatatttacaataatcattgcccaattttgttggactgtggaggagcgaggaaggggccttcccccttcaggtttgagaatatgtggctgaaggaagaaggttttaaagatttgttaaggaattggtggatgagcttccaattcagaggttctttcagtttcactctgtctgaaaaactgaaagcgcttaaggcctgcttgaagatttggaacagagaagtgtttggtaatgtcactactagaaaagattcaactttaaagcagatgatgtcttgggattcaatagaaggggatagggtgttgtctgctgaagagcaaactctcagaaagcaggctttggaggagtataagaaatgggtgataatggaagagacatcctggaggcaaaagtctatagagttatggctgagggagggtgacaaaaatactggttattttcataaaatggccaatgcacataaaagggtcaattccctagtgaagattaagataaatgggtcgtgggtaacagaagaacgtgacatcaaggatggtgtggttcaggctttccactctctattgtcggtaatagatgagtggaggcccagatgcaatgggctgcaggttggggttttggaaggggaagttgcagcattgttagaggctcctttttctgaggaagaggtgttcggtgctctctcggtggtttcacaatggcgttttggcaattcagttggagctttctgaaggaggaagttatggggttctttaaggactttcatgatcagggcaagttcgtcaagagcattaatgcttcttttatggttttaattcctaagaaaggaggagctgaagacctcaaggactttaggcctataagcttggtgggaagtctttataagttgttagcaaaggtgttagctaataggcttaaaaaggtgatgggtaagttagtgtccaagtcccaaaatgcatttgtggagggaaggcaaatcctggatgcttcgttgattgcgaatgaggcgattcattcaatgcagaaaagtgggggaggtggcatcctttgtaagttggatattgagaaggtatacgaccatgtgaattggagttttcttctttggttgatggaaatgatgggttttggagccaagtggatcagctggattcagtggtgtattgggactattagtttctctgtccttattaatggaacttcctcaggattcttccaaagttctcagggattgagacagggggattccctatccccctacctgttcgtgattgtcatggaggcccttagttgtttgttgaagagagtgaaggaggggggttttttgctggggtggcagctcagtggtagaagaggtgtgggagtggagatcactcatttgctgttcgcggatgacactttagtattttgtgagccttccattgattaggtgtcctacatgagttggcttcttatttggttcgaagccatgtcagggttgaaggtgaacttggacaaaagtgagatcatcgcggtgggaaaagtggagaatgtagaggacctgccccttgagtttggttgcaaggttagccagctcccttcttcttatttgggtcttcctttgggtgcttgtttcaaggaggtggctacttgggatggagttgaggaaaggctgaggaagaggctttcactttggaaaaggcagtatatctccaaggggggtagaatgaccttgatccgaagcactctgtccagcatgcctatctactggatgtccttgtttcatatgccaaggagcatgagtttgagattggagcggattcaaagggactttctttggggtggtggggccctggaaaggaagccccatttagtggaatggtctattgtttgctcagataaacgaaagggtggattggatgtgaggaacttggcattgctaaataaggcactcctatgtaagtggagttggcgttttgcggtggaaagggaagctttatggaggcaagttatatgtgcaaagtatggggaagaagagggtggttggaggtcccgtgttgtgagaggtagttttggggttgatttgtggaaagcgattaggagaggttgggatgtgttaggtgacaatttggtttattctgtgggacatggtaggagggttagattttggaaggacaagtggtgtggagataatcctttgtgtactttttttccctccttatttgctatatccttggataaggaggcttgggtgtggatgtgtgaagccattctggagagggagtgtgggctcctaggttctctaggcggattaatgattgggaagtgttcgatgtggagcgtcttctcttaaggttgcaagggaggagggtttatagtaatgtggaagatcaagtaatttggactaaggcaaaggacggaagattttttgttaagtctctttacaaggcattggagctagaaagactaggagattttcctgccagagttatttggaattctttggtgcctccgagggtgagtttttttgcttgggaggctacgtggaaaaaggccttaaccttggatcgtatttagaaaagagggttctccttggctaatagatgttatttgtgtctagcagaggaagagtttattgatcacatcctcctgctttgtgggttagccagaagtttatagagcttacttttttccctctttggggtttcgtgggtgctcccctcttcagttagagaggcgttattggggtggtttgggccttgtgtgggaaaggaaaggaagaaagtgtggttttcaactcccttgtgccttttttggattgtttggaaggaaagaaacagtagggcatttgaaaatgaagagcattcgattcatgggtgtaaatcgcttatcctttgtaatctgtgggcgtggaccagggggttttttggttctggtcctccttccgttgtagattttgttgattggttaggccctggttaagggtttttttctctctcttttgtatacctcctatatactctggggtgcttccttgaagtgcctcttttcttttaatatatttctctttattcatcaaaaaaaaaaaaaaaaaatcatattacatagtcttccttggcaagtaacatgaattaggaagatgttagttggtcctatatcctcctctttgtttacctttgccatagttgccaatggtcacattttaaaaataataatcttcaatcatggttgtgtaactttttccactactcaagtggacacattctttcatatcaaaactgatgtaagacaaccctaggatagatataggacagcgctaagatgattttttagaatcaaataaggtgagttagggcttcaagtttttaggatttaagatgtacaatgagccaaaattatgtagtggggaaaagaaatatcatttatcttattaattttgttttacatcagttaccttatttatggactttagaaaactcaaaaacgaataaaacttctaacttattaggactcttctttttccctagaactattaaatcttataaaaagattaaaagcaaatagataccttttttttttataactagaaacttaacttagtgaaacttcttgtaataggactttctaataaagaaaactttagatctgagaagttatagaaacttggagaaaaactttttacaaaatagaaagtttagtaatgtagaaatattttttgaggagaaatttccaattaaaaaattttaaacttctaaatgcaattcaaataccaactattaactaattatgatactagtgaacattaaaaaattacaaaattacctaaatacccttgataggataacttaggatttctttatttcctttcattcatttcttgaatagattttggagattcatcgtgatggaggctctttaagagattaaagaagggggtggggtgtgcaagaatgttgtttaaatttcttttcttttctttttttccccttttctattgagacctaaaagtttttatttgaacaataataatgcaagtaatatttagtatgtgcagcttttgtcttttgtgtctttgatatgtaaacaatatcaattgacctgatatgataatcacattgggacattggttttatgattaccattagattagactcctttgtatgtctcctttccatctctatttgcttgagcctcatcaaaggaggcttgggtggcagatttgtggggcaaacaggggagaggggttattgaaacccttgctttactagaaatcttaatggttggcagcttgaaaacataaaacattttttttgctaaactgcaagtcatgttaatggagaggaggacagggcaatgtggatagttttgaggaaagaaacattctcagtgaagtctctttatgctatcttagagatggggagctcaacttccttttctaacaggggtcatctgaaatcctgggtcttgatctaaggtaagtttctttgcatgggaagcttgttggggaaaggttttgactcttgaacaactacaaaaaggaggatggacaccggttatagatgcttcctttgtgaaatggatgagaaatcaattgatcacatccttctccattgccataaggatagggttctttgaaagctgttgtttcctttgtttgggatttcctaggattaggcagccatagtgagggagactttgctagggtggtatggattttttattttttttgatagataaacatcagaatatataagaaaaggctaaaaagccgcatgtatataggaggtatacacaaaagcccaagaaagagagctgaaaaaagagaggggaagaacctcacccaccctcaagtggccgcaagccactccaaaaagcctaagagagaataggtatcctcaccaatgtacaccctagcccaactccacaaattacatacaaaaaaattcttgaatttttgaatatctaaagaccccccccttaaaagctaacctattcctttccttccaaaccgtccaaaatatgcacaacggaatggaattccaggtattttttccttttttccccacaaaagagcccctccagctaagtaacacttctataactgattctgggaacacccattggactccaaaaatgacaagggcaatctcccaaagagtcttaaccactgtacaatgtaacagaatatgattcgcattttcctcttcacagccacacaaaaaacaccgattagggagctgccacccccttctttgaagcttatccaaggtgaggatcttcccccacgaagcttcccaagcaaaaaaagacacttttgttggaaccttatccatccaaatgcgtctgttcgggaaagcacaggctgaggacccaaacagcattttgtaagcacccttagccccaaaacaccattgccttcccttttccatctcacagcatcctcctcagtcgaagtcctgaagtagggtggtatggatatttgttggtaaaaagtgggagaaggtatggatagttgctttcttgtgcatatttgggaatttgtggaaagagagaaatcgaatgttgttcgagaatgaggagatatctatctggagtttgaaaggcatgttttttagtcagcttctcttctgggtaaagttgtacatcaatgatggttcgatggctctaatggattttgttgagtgattgggtacttattaagggagggaagcattttttgtaatcccaccttagttgctccttggctcttttgtattgttttctttggtattctttgtgtacttctgatatactctgtttttgcatttttaataaatttcatgattgcctaacaaaaaaataaaaaataaaaaatgattgccactggattagtcatttatttcttttaatcttggtttcatgcaggtgacgtctcccgcaggcaacacggtgcacactct

SEQ ID NO: 13017 - DNA, 2307 bp, Vitis vinifera
  Intron number 1 from transcript GSVIVT01016790001 (locus G SVIVG01016790001) derived from phytozome v7.0 (chr-ID chr9 ; pos 1383497 to 1385803)
tcgtgcttcctttgagactaacccgaatctttaaggtgactttttttcccttgttttaaggggcatggtctcttatctcattctcctgtctcttcgcctttttttttttttttttttctgaaattctggaattttgattcagtttggtgagttttatcaagtgggtatgattctcttttgtgtgtaagcatttggaggctgaggtggtggaattgctgttgtttttcctggtggggttgtggtggggggtggtgagaactgagcagttgttgttgttgttgctgcatgttttgttggtgtttgagctttggttgttttgcgcattcaaaaattttcttttcttttcttttcttttcttttcttctcttctgggattgcttttgggtgttgtaaatttgtaagtggtttctattctgaggtatggggtttatgtgatagtaatgctccttccttttttttgtttgaagtaatttgtttagcctttttagaatttggtttttcatggatgatttctgctgtttatctgaatctgatgtgtgtaatcctacccaaatttggtgggttttggcatgaagaatcttgttttttctgtttattagtttatgtatctgctgatgcttttgatgattctgtttgtttatatctttctacttatatgcagtgatttaaccttatctcccaattaggagcccaccttaatgtgcatccatgggtggtcagaaaatttagttttacagtttcaatatgttttcccccctgggaaagttatctaaaacagtaaaacaccaataaaataatacaccaaaagaaattattagcagggttattaatttagagagattattatgtttctgttctactatattcgttcatgtatgattaataaatcaaaaaacaatagatgtggtcaaaagttaatagataaaagcctaaaaaattgtaaaaaagaagagatgattattaatttttagaagatagaaaaactgttaaaaggaggatatatggtgtcaaaacttaatagtccaaaagataaaaatgtttcaaagatgtgatggttctgagaaaggattgaattgagcttaatactgtattataaatttttgtttgctatttttttatgcaccttttcaattattaatttatatttcctagagtccttaaaggatttttaaataaattatgatcttgtgcatttaatgaggttattaatttagtacactggcccgaattgggaccataagattttattatttaaacgaggttattaatttattgaatatttatttatcgaggttttattgtagtgtttatgaatttgggattgacaaaagtgattggatttatgaagacagtattttaactaggcatgcagacgaatgaccataatccccaaagttctattttaaatgagtttaagataaaaaagagattcattcaattaagggttattaaataaatacaggactaatttcaaatcctatgaagattataatgatacttttaattttaaatcccctatgggtctatataatggaggttcctgaaaacttacaccctatacactttcattggttgagaagaatattgtaatgaagaaggaagtggagttctttgtgttggagaagttggtggatttgaacttttaaagttgcagtgaagcagcattcagcatagtaaacagatttgtttagtgggcaatgtttttgtagcaaagttttggagttcttgaatgtgtttgatctgtcctcctgaaactatcagtaactggttctttaggatggttctttgtacccaatgctgattgttggtgtggagattttcaggtatcagttgcactttaggcatcgttctgttagtttctaatgtagttgtgtcacataaaaaataagttaaactagaccttgtagataatgcataatggtccagaagcaggggagtgtggttttgtgttggagctcatctaatgtggaagtgttcaagattttgaaccttcacatccttaacatgcttttttcagaggacaaatgtttcctgtaatgaaaatctgttgcaatatatcaattatattttagtggttactctgttcttgcatatggactgattgtttctgtctcagtcaatgattgagacatactgctgccaactcttggtgttttgcctttccaggcatgctctaaaagtaaaattgcttttaatagtgtatggtatttacttttgataattgactttcagaacaggacatctttaatcaaattctggtgtcatcatgcagaaaaacacttagttggatttgctcaagctgaaaac

SEQ ID NO: 13018 - DNA, 8366 bp, Vitis vinifera
  Intron number 2 from transcript GSVIVT01010684001 (locus G SVIVG01010684001) derived from phytozome v7.0 (chr-ID chr1 3; pos 11705751 to 11714116)
ctttaaccaggtattattgcaacacatatgctaggcatttatttacttattctatgtcttgctgtggttttgaatctctctctccctccccatctgtcccctacgccaaatcacttaccctcttaggatctaatttcaaaatatttgggtacttaagttgcttacttcaactgtcactctgtccagctaaaattcttctcacaacccagctccataccctcaaagaatctagtttcaaattatttgggttgttgagttgcccttttcattcgctttacttttgccattcaaatgttatcctttccattttgaaaatttcttttgatcgcattactttccattttaatccctcatattatacattcatccaccaatacctaattttttgctagagcttgataatttctggttgacgatataacaccgattcacaaaatatttaattggatgcattcaagaaatcagcttcaactagatgcatgttttattcatagatgcatgtctgtgaccttaaacctgtgtgtttttgtgaccttgtatctatgtttatgtacataagagagaccttatggctccatttggatcttggaaaatacttggagaaaaagaagtaggaggcagtcacacattcctttttatttattttatttatttatcatggaaaatcttaagggaaagaattgtagatatgactgcatttggatcatggaaattactagggaaaagaagaaaaataaagtaggtagcaatcacacatattatatatatatatatattatcatgtaaaatcttaaggaaagtcaaatgtagtgaaaattatttaaaaattttaaacatgttcaaattcttcactttctatatgaacacagaaagaagagagaaaatttagactagcatgtctgaaaatttttaattaaatttgaacctttttttttaattttctttcacttcttttttccttttatttttcctcttattttctttccttcatgttttttcttaaactttttcaagatctaaacaaagccgtaatcttttcctctatggttgtgtgtgcatgtttaatgaaaacaacttatatctatgcatgtgtgcctgtgtgcctatgtgcaagtggatgtacatatgtacgtgtctgagcttcacaatatcatagctgttaaaccatttgctaaacttaagcaactaagtagtctattaacactctcctactatgacttcagctctaaatataattctcctactataactccagttaatagtacaagcaaatttaaaggctagcagtactctaagcaaattgataatcatgtctaatttaacatagaaataacacttgctggtgtcctctgcaaccaatgtgtcaagtgttgctactcttccttgacctctacattaattgttgctcacaagcagttctggtgacaaagagaattgagctttagaaccaaggatttgattttcagttgagaatgtcatggttgatagacatgtggagtgttgaggttcggtattctaatttcacttcaaacttgattctactattgactttttaacttgtcctttggaagaattgtcattgacatgtaacatgtcaccatgtgaggaattgcgtaacatgcattttaggaccattttggcattggaattaattgcaatttcaattggattcttagtgatatacttcttttgcttttgcagcatcttgtatctttgtttgttcgtccttgatcatgtttaggatggctttggtggatttggtttttggtccttatgcgaattataagagtccaatgtaatgtgagattggcaaggccaaatcttgagaattaatgtcactcctccatatgggctttgacttcgttgacattttcttagaagttgaagcattacgagtttgaaaagaaactggcttattaaatggactagtaggtataatccaaacttaataagtggctttagaatgtttttaggatgtagcaagattttaagttgccatgtcctcaaattcccatctttaaaggcgattctattccttgtcttccaaactgtccaaaaaatgcataaaccgctctccgaactgtcttgtgctttttacccacaaaagacccattccaacccaagagagttccctaatcgaggaaggaaacacccaagacactccaaaaagagtgaagaacattgcccacaaagcccttgtattttcacaatggagaagtagatggtctatggattccttgttcgacaaaaataacatctatttgctagagcccatcccctcttctgaatttggttcaaagttaaaaccttaccccacaatgccttctaagcaaagaagcttacttttggctgcattagtcaactattatatgtaggaaaattgtataactgaattataggagttcttgtatatggtaggacaattgtatttaaattataggagaatttaggggtcagaataggaataatttaagggtcaaaatctgctaatcctcttgtataaatatgtgtattatttctctattaaaaaagaattggttttttatccaacatggtatcagaatcatctgggctcgttttctttcttttcttaagtgcctttgccccttcctttctgtaactttttcatcagctatgttgtgttaatcaaccactctagtttcatatgactgaacaatctttcaataacaaaatccctaaaaacagcaaaggttttcaatcaaaagcattgcaagctgcaaattctgccactacagacaatgcaacaacttctctaagtgctgagaacctgccttttacaaaagagtagcctgacctttagtataagctcataggacaatcagaggttcccccatttttcacttctcatgcatttgcacaatcaggtacagttggaaaagcctttaatacctctacattctctaattgtaattcctaaatcattgattcaggagccaatgaatatgtgatcaaagaattggatcttttctcatattatgttccatgttttgtaaaacaaaaatagatctttcacctttgtaagtggtaaaggaaatgtgtccatttcaccaaaaattactctcttctgtattacatgtttctaacatgtcttacaatttattgtccatcaaaactgactaaaacctgcaattgctctggaactctttcccaaatcatcgtattttttgggacctcacttcatggaagatgattggtggcgctaaaaagaaaatggcctttactacctagatgtctaggaagagaaattcaaacttatcaaataaagggaaatgtggttaagtgagccaaagaagaatattggctaatgcatgggagattaggacacctgacactcaagttaattttacttacaacatttatatcctaaactatgcatcagcttagttcattctaaattcaactgtgaagtatgtgagttagctaaaagtcctcgtgttccctatcctttaagtaatgaaaaattgaaagtcctttctctatcatccatattgatgtttggggaccttcacaggtaaattgtctctttggagtgagattgtttactggtttcattgatgactacaaaaggattacatgggtatacctcttcaaagaaaaatctgaaattacacagtgatccaaaatcaattttgcacacaggtgaagctgattagatctgataatggaggagagtatttcaatgagaacctcttctttacacaaaggtattattcatcaatctctgtgttgatactcgccaacaaaatggggtggcataacggaagactaaatatttgttagaggttgcttggccacttatgttagctaggaatgttctgaaacaattttcagaagattctacacttgtggcagcctactaaataaacagaatgcctttaaaagtcattacctcaaaaactcctgttggaaccttgaaactatatctttctcatataccatgtcttggatcatttcctctaaaaggttttgactgtactacttctgttcatagctgaagcaaagaccattctaaacttaactgtagagccattaaatgtattttcttaggctactctcccctaaaaaaaggctataaatgcaatcacccacctttttgaaaaatgtttgttacaacggatgttagttgctttgaaaaaatagatttactataaaaaaagaaaggggaggatcaacagaatctaggagatgctgaagctgctgaaaataatattggtgtcaaccatcaacctaccaaaggaaatttagacttgtctactcatgaagacctcggaaaactaggttagattaggaccttatctctctggtacacggtcaattatcgactctagaaagagatgtcttctatttctcctaattctactctcttgaatctttccaatacctagtgtttgatactaacctggacattcttataaccatttgaaaatgtgagttgtaccaattgtcctctgtccaattttttgtcttatcatagtataagcaactataaggccttcaccactcgtttgaccttaggtccagttcccaaaatatgcaagaagcatgtgctgatcctaagtggaaggaagctataaatggaaaaatgaaaaccttgtacaaaaatgatacatgggacatagttgattttcctaaggggaaggatttagttcaatgtaagttggtgtttaccatcaaatacaaggctactaatttgcggaatgatataaagcaagattagttgctaagagatatacacaaacctatgagattgaatacgaggaaacctttgacctattttaaagattaactccaacaaaatcctactatcttgttgcaaattgagactgacaacttcaatgatgttaagaatgatttcttacatagaaatccggaagaaaaggttttgagggtaatagttcaacaaggaaaagtgtgtaagctgaaaaaattcattgtaagtttgaaagatttgctcaatctcttgtcaaatctacataccgacagagccaagaaggccatatagtgttcattagtcaatcacttgaaaagaggatgactattcttattgtctatgttgacgataactggagatgacttagagatacaaaaattgaaagtgaattggtgtaggaatttgagataaaaaaatttgggaaatctcaaatattttttggtattgatagcaagatcaaagaagggaatatatgtatctcaaagaaagtgtattcttgatttattgaataaaattggaatgatagcatgtaaacctattgattcgcctacagattagaatcataagttgggagcaacaatgaaaggagtactagttgatgaggaaagatatcaaagacttggcagtaagttaatttggttttaaattaatttatttgtctcatacaaggccaaacatatgctataagcatggcatgccaatttatgcatgctcctttataaggccacatggaagccacgatgaggatcttagatatcttaaagctactccaggcaaagggttgttattctctaaaaacagatcatatgcgtgtcaaggcttataccgatattgatgggggaggatcaatgactaatggaaggtctactcctggatactgcacctttgtgggaggcaatctggtgacttggaggtgtaaaagacatgtagttgctaggtcatgtgctgaggctgagtttaaaactatggccttagatatttgtgaaatcatgtggattaaaactttagtcaaggaattgcaggtagagattgaaagatctatgcagttgtattgtgacaacaaagcagtaataagcattgctcataatcttgttcaacatgatagaatggattatattggaatagatagacatttcatcaaagagaaaattgataatgaactaatttgtactcctttgatttcttctaagttgtagctagttgatattttcattaaaggagttcgtagtccaagtttcaattcaatagcgagcaagctgggtatggaaaccttttcaaactagcttaagtgggagtgttggaaattggcagaattaccaaagtttaggaatttgattgtattataattggctgattttatatctttttggtaagtgatgcctggtaaaaggaatcaactattgtatagagtaggactactttataagggctcacatatggtaggcaattttataagggctgaattataggtgtaatcaggggtcagaatatgagtaatttaggtgtcaaaatctgctgagtgtcttgtataaatgtgtattatttctccaataaaagaaaaattgtttttatccaacatccttaacctccttcggcttgcttgaaactatgaacgaagcaagtgtgcattatcatagcctctctactgttggtttttcttcttcaacttgcttaaaagtttgtgcatatgttgtcatagcttctttaatgtttgttttttaaaaaagtcactcgtttcacaagtttgagcttctccttaccttttcttagctcttgaacaggtgaatatgagctttgttggttgagatgctaaaaaccgttgtcatgagggcgtgttgctaactcttaaaaggttctagctttattcgttgaagaatattgtaaaaccccaatggacccttttgtacatttcattattaaagcttaggataacttcatccttgtaatcaaggtttaagatcctcaatcggttaacatagttgatcatagttaaatcttttcacttgtaagaaatggaaagattgaccattctgacagcacaacacagtttgtttgaatggttgcggaattcttgcttcaattgatcccaactgcttatcaagtttggtttaagattggtatctagtcgcatgttttttttttccttttctgaatagattactcgtttcaccaagagaccccatcattggattcattattacacattctctcaaaatgagcaacttcttgtcttgagtttcgcttgcgagtgaattgctggaatttggttgttggtgacctggaggcatattatattggagagttcaatcttttgtgattagagcttggcataaacatgggaagattgagtactacctttatttatgccttcatgagtaatgcttgaaggtgatgatttcttactatagttacttcaaatggaccggatggacttcctgaaaacttgaatctatcatttggatgccaaaaataatcccaaatgatgaaacctttcacatttgaaacaaatcttcagtcctttataacctcaatctcatttgaacaagaatgtctttgtttccttctatcgcttcgcatagtttttctaagttcttgaatctgttcgtatcatctatctggaggtagtctgcatgggaaaaacatagttttaaaaggcagaaagcacacttaaggctcaaaagtctcttacagcttcagcgcaatgtgcaacacaaggcatgcttgagcgaagtgaaatgtgacctaggatggatatcaattttataagatacaatccaaaatctaatacaatcaattaaaaaaaattctgattccaaacatttaaaagaatcatttaacaaaaaagaaatgaaattatataaatttcagtattcaattagaaatttcaagaataaaattgtttaagaaggtaaagtagatgaggcatgtctatccaacaaggcgcattacttggtaagcaacgcgctacaactagggagtggttgcgctttgggcctgggtgtgcttgaagtacaccttttaaaactattggcaaaactgagtctcttatgatcagaaattcggaaatgattgattgttcagttctctcaccttgtggcagattagtagcaggatgaaaaggaaaagatgatgactctgaagttaatggactcaagtgacaataagttaatgaactgattcaatgagctttcctagttgttgatcctgcacaactttgatgaactgattcatggaggtttccaaagtgtagtcccatgtgtaacttggttgattggatgatgcaataccaaaagattcagaatgcttactagttcaagggaaaaacagggggaaaagcttttttcattgtctagtaatttgatgctttgattagtagtgaactattgtttttcttttcaatgtgcattctagttattttgattagttgtttttattttgattagttgtttgtgattgctactcattacatggatttgccataagattggcttaactgaaatatgtttattctgctaggtttaatgttttgactcattttttttcctattttcatgccatctaaagcacccgcttatgtgttcatttgtaatatcttgcagtgctctgagggaccgtcgattccctcctatacagg

SEQ ID NO: 13019 - DNA, 7499 bp, Vitis vinifera
  Intron number 5 from transcript GSVIVT01010617001 (locus G SVIVG01010617001) derived from phytozome v7.0 (chr-ID chr1 6; pos 15962701 to 15970199 reverse strand)
tttgaaggacaccctctattttcctcagagtgcaggtataggatatattggctttttttccaggtcttcatcataggaaataatctttcctggggtggtagtagaaaatataataatgttcttaaagtattataagatgtttgccccctttcaagtttcacatgcaatggctttagttttcttgatgttggaaattgacattacagctgaggttggaaagagttgaatctatccactcacccactgaagcaaatcaaggcctgatgttattatcaagcaaagaaatccctattgtttacagaagcaatatttctttgctttttttagatgttgtaaagagaatggcttggcaatgaacatcagcttgctcctagagtcattgttactgtctaatgccagatgtgatttctgttttcaagagagtgaaaacagaaatacatactaccagatggccttgaacttctttacttgagtcctagggaccagagacttggaatggaggggttaagcctcaaactcctagagatagagatattagaaagggcccttttaatgaggaggtggtgacaactttgtagagttgtgtagtgaaaaagcaccaggcccatatggcttttccatagcttgatggcctaagcgctggtccacattgagagaagatgttttgaacttctttgattttcacaatcttgggacatttccaaaatcttaatgctactttcttggttctggtacattaaaaggacatgggcagaggatataaaaatgcctaggccaataagcttggtgtgtggtttatctaacctttttggctaaggggttgcttaggttgaagaagaaggttgatctttttattctcataatgctattgtatgggggagatagaattcacatgcagtgttgattgttaatgagaccattcatttgagattgaaaagtagaagagtggtttggtatgtaaattggatattgagaaagcttataatcatgtggattgaaattttttgttatttgttatgcacaaaaatgagttttaggtaaaagaaaatagatggatggatggatggataaaaaactgtatccctatggtgagatttttagtgttggtcaatgggatccctaccggtttcttccaaaactcaacaagtttgtgatagggctcttcttatctatttgttctcttcatggaaatgttatgttgtttgatttgtaaaatggaggagggttgtttcattagtggattcaaggtcaggggaagcagggctgaaggtgcggggatctctaatctcctattttcctatgatactctttactactctttatgtccaatagcaagcagttactatatccaagttgggtgctcttttggtttgattggtttcaggacttagagttaatcttggcaaaagtgagcttgattcaataggaaatataatgggcttagactagcctgcatcatggtttggttgaaaacaagagcccttgccttctacttacctaggtttgcctctagctgctccttttcagtcctccatttgttatcttgtggaaaaaaggtttaagaagaaacttgctttttggaagaggcaatttctgtcgaagggagagatatttacactactcaagaacactatttcaagtttactagtatatattttcttgtctgtctttgtgattcccaaggggaggtgttgttgtggtatatagagaggaaaatttacttggtgacaggcttccatatgctccttaaaagctaatggggtgggctgaggtgcaaaaatctttctcttcttaatgaagcattattaggaaaatggtgttgaagttttgtcatggaacatactaatctttggagaagcgtcattttcggctggtttgaggaggtgcaggatgaggaagatgattatttctctcataaacctttggggaggtggactgcgatgcaaaaatccttctgttcttaatgaaatattttaggaaattagtattcaaggctttctatggagcatgataacctctagagaagagtcattttgagcaagtttagagaggtgtaggatggggaggggcacttatgggataagtctttggaaagccactagttgagcatgggatgatatctttggtagaaactagccttgaggtaggcaatgtgatgaggacaaatttttggtggtttggtttgatgtgtggtgtgggaaggtaggattaaaggatcgtttttggttatggtttacctaagttttgatgataaccaaataaatgatttgtaaatctaattattgtttgggattgtaaacaaatttaattgaatcactcttaaagatttatcaagaagaaggtcgattgcaagtaaagaagctaaaattacaagagaaggttctttcaaaatctttatctattggttctttttttaggctagatcaagttgttaatcaatgaggataagtatgcttcaaaattcactgttaaaattgaagtattttttgaacaaaaaagaatcaattctttaaaatgttttttaaaagaacttatttatgtactactgatgatttttatatatacaaaaaaaagtttgatttatagaaggataaaaaaaaaaaaaatcatattttgatatccattttcatcattaaaaatggtgttttaatcttaagttttcaaattgaaccaattgagccattaagggacacttgtgcaatattttttgtgtttccaacttgagtggttgactaggtggtttgccaatcatttgaccggttcacctgtgctagttgctcaattagtgcattttaggtagtgtttagtgaatgaccaaacaactaagcaagtggtaaactgatttattactctgaatctcaattgttactagttagtacagttaatgtgcagtgggctagttggatagttgaccaggtgatcaacctgttcgtcgggaaaatgttcttaatagttatattatgtaaaaatcctatattaaagacttttgaacctcatttatagataagatatcaattgcaaatcatcctattgtccaaaccttgagttttagtactttgagtgcagttatactaaaacttgcaaacctcattcattgcagcttgaaactagctatcttttctactacgtaatacttgctaaactagttcttgtggtctcttaatttcaaattcattctactttatgagaatgattctaagttttggaggagtagttgtggtgttgtaaatgtccactggtgtctagaaattaagagtacattaaaggattctttggtttaaaggatccttataatatagcatctcaaggttcaagttcgaccttgaggtcatggatgtaggtaagattgtgcaaaaccacattaaaatctttgtttgcactctctttcctttatctcttcattattattgttttctacttttgttattgattatttctctatatccttattattaagatgtaatcttgtaatttggaaaaaaaatttaaattaccatcacccaattgtggctaaaggatatttgaaaaagggtttttcaatcttaaattttcaaatcgaaccaattgaaattgttgaaggacacttgggcaacatttttttgtgtttccaacttgggtggttaaccaattggttgtgctagttgctcagttagtgcatttctggtagtgtatggcagatgaccaaccaaatgaacaagtggtcaactgattgagcactctaagtctcaattgttacctgctagtgcagttaatgcatagtggctggttggatgttgatgtaggacaaccctaggatggttgcctacactcaagggtaggtgggctagggttttatttttagggtgtaaggagaggaacaaggaataaactttgtggtagagaaaactataagataagaaatagagagaaagaagaaacaatgaagaaaagatggaaaaccttagagtctcactaaggccttctaggagtctcatctagaagaaaatcaatggagtctcaccattgagggttgcaaccttgcaatgaaagaaagtataatattattcataaaaaattcatccctttgatttacattgattagcctatttataggcttctctaagaaatccaaagtctactaggactctaataacctattctactaggactctaataacctatcatgactcaaattctaattatattataactcaactagctaatcctaattagactccaaaaaatattaatcctaatttaattccaagtaataataatcctactttaattacaattaatactaattccctttcttgatatatatcttgaatattcatcctcatcagatgttcaactggttcattggaaaaatatgttgtgtcaaaatcctatataaaatattcttgaacatcatttatggataaactaccacctgcaaagcatccaattgttcaaaaaaaaaaagaaaaaaagaacttgcaaatctcatttattgtacattgagactagctattttttctattatactaatactttctaagctggttcttgtgttttcttgattccaaattcattatactctatgagagagtgattctaagttttggaaaaacacttatggtgttgcaaatgttgattggtacctagaaatcacgtgtgtattaacaaattctttggtttgaaggatcctttgtatagtgcagcattgaggcttgggttggatcttgaagctatggatataggcaagattgtgctgaatttgcactctttcttgatctctttattattattcttgtttttatttttttgttgactctttctttttatgctcattattacatgtaatcttgtaatttaattggaaaaaattttaaagtcaccatcacccaattgtaggccccctatccctaggtaattatcttaggtttgtcattaggtggactccacgtatttataggtggaagaagaggggaagcttggtcattggttgccttgattcatggtaaagggttattgagggttgtgggagattctaggttcaagttccaatgaggacaaaaatttatctacaaaaaaaaggttcaaagtattggttgagtcataccagacacgtctaagtcatatttgccttggctaggttcaaggcaatttttataatttagttacgatttcacaacatttcgatgctaacttggttgttttactgaaaggactagcttgacttggttgagttttgaaaatgactttgagttggggcacaaaatcccccttcttcttcttctttgtcactggctacccatatgttcatgttggtgtcaacatcttggatggtggattagatttttttatggcaatatctccaatcgtggcttggctttccctttggcaacatatttggtagtgctttgttgtgattatcatttcgaggcttgagcaaaggagagaggagagagcattaagaatcaggaaaaggatgttggagatttggggatgatcgatgtggttattatagaagatttggaaaattatatatatggatatggatcatgggtattcaatattttatgtggtatggtattggatatttagggatataaatatataaattgggtaatggatatttatatggtcatagtgaatatgggtataaaggtttggatatgaatatgggtgtgaatatacaaattaataaattaattcatattctaattgaatttataaaattaaaaataataatatattagaatacattttagtaattacttgataaaaatataattattttaagatattgatgaactatagctttatattattgataaactaatgatttaataagttattataaatttatgtaatcaaatagtttagatggatgtttaagatttactaaatgtcatctaaataattatgataaattttaaatttaaacatttcttaattaaattgtattaactattatcaaaatatcttatttcatatttgggaatatatctaagtttttatctacattaattgattagttcatatgttcaattatttatccacattaatcaattcattcattttttggtaatttatttttgtatgatgataatttatataaaagagtattattaataatgtataaaaagtttgcatagaagtttacttaatgacatcgaaatgaattatttgaaataaaagattgttcaattttaatattattaaataatattaaaagtggtagaagtttattctactaatttttttaagttaatctaattgtatttatttttttcataattttcataatctttttaaagatttaattttttttttttttgaactttggctagcatattttgcatatcatttgatgatattgaattgagttatggagaccaatatgccttggtaacttccaagtcgagaaccaatacggtgactttgaatcatgctttgattcagaaggaaatttcaggattgggagttgacatttgtgtaggctcttttgcagcatgtctgtccttatactagaatagaaaattataaggataagttggcatggcggacagccaaggacatttctctgtgaagttctttttgtctttcactatgcttagggaactctgtttgattcccctctaataaaaattttgcacttcagctgctccttctaaaatgtgcttctttctgttggaggctagatgaggaaaggttcttactattgatcaacttatctagtgaatagatgttgcatgtgcaaacaaaaggaggaaacaaccaatcacatccccattcatcgtgagtgggcaagtagtctatggtctttattattctcctttttgtgtgagatggactctgcttaaaggggttaaggagctcttgcttcatggcttggtagtttctgtgggaaagaaatatacgaagttgtgaaggatgactcttttatgcctagtctaatgagtatggaaagagagagtaggacttttgaaggtgattgacagtcaaaagtggcattcaaacaccacttcctcaaaactctttttgtaagaggagatggtagggtcattcctcctttttggatttcattgatcgttttggtatgtgtaggtggcatttatgtttgtattttctttctctattgtgtgtcttgtggtgtgctttgtatactacatgtgcgcatggatgaacccctttttttgttccatgcttttcattaatattctatttgcctatcaaaaaagaaaaatacatgcactatcaagccctatgctaacaggttatatctaaggatgggacagtttgtttaatgtcttgtgtgatcaagttgttgttcagttttgtttttattcaaccttgggtagtaacagttaatggaaacaaaattttagatgcctcgactcaagtcctcaaatttgcctactggttaaaaactatttctttttttctagctagctttctataaattgtttccttaaatcttctgagggcaatattaatgtttgatcaatgtctcagattctggactttgggaa

SEQ ID NO: 13020 - DNA, 18721 bp, Vitis vinifera
  Intron number 1 from transcript GSVIVT01028618001 (locus G SVIVG01028618001) derived from phytozome v7.0 (chr-ID chr7 ; pos 10875021 to 10893741 reverse strand)
actattgctattgccaaaacatatcgccttcaagggtgataatggctacttcctcagtgcccggacgatcgagggacacccatatctggagttcgcatcaagtgacattggagacccgacggtggggaacgaggtcttcaccactcacgatggaagtgtccacataaagtcagattacttcggcagattctggaggcgcagccctaactggatatgggctgactcagatgattccaccaccaacaaccccgataccttgttttggcccgttagagttgacaaaaatgtggtcgctctccgcaacttaggtaacaacaatttctgtaagagactcaccaccgagggcaagatcagctgtctcaatgccggggtctccacaatttccagagaggcacgcctggaggtggcagagcttgttttatcaagaaacatctataatgtcaattttcgcctcatggacgctaggacctacgaccagagggtcatcgtgatgaccaccggggaagccattaacatgacccaagaactgcacacccaacaggtgaagctctcgtatacagagactaagagccgtacttggaagggcagcgtctcattgaagttgggtgtcaaaatgaccatggaaagcggcgttccattcatcgctgacggaaagttagaaatttcatccgagtttagcggtacatatgagtggggagaaactgaatcagtgacaacagcaatggagactgtgtacaatgttactgtgccggcgatgactaaggtgaccgtaagcatgatagcaacacagggttcgtgcgacgtccctttctcctacactcagcacgacactttgaccgacgggaaaaatgttgtttacaatatggatgatggtgtttacgttggcgtcaattgcttcaacgtcaagtaccacaccaaagaggaaaagctgtgatgtgaaatgccaagtgatgcttctaggactagttgcattggtccaatccccctcccttgcctaataatattatcaagggtaataaaattgtgtttgcctctacgtttgggacttcttgagagtgttgtccatgattggagagcgctttaaagaaagatgtttcttttataacttatcgtgctactcgagtttgtgttttctaagtattgatgaaataaatattatgtgggtgttgtgcagcattttttttttaaagttttaatattctcattggatagaaatatacttatcatatcacctagacttagactatattcttcacattgaaaacttagattcctattctcattctcgttggataggaatgtactacttgtgtcatctaaactaagatgttcacattgtagtagactaagataagttccttttcttaaaacccttattttgatgacaaatcacattaagctcaataaaatatagtaggtgcactcctcttgattttgaaaacaagatatgttgtcattttcgccggtcctgtagagcaggaacaagaaatggtgcaggtgtgcatgtgaaagctaggatttggtcaaagctgagaagaggccaacaaagatgggttgtaaatgcccagcaggcttttatcccaaaccgtatacaaaagggcctatgcaagagacaaagcagcattaacaagcctgtggagcccttaatataacagtcactttgaatgggcgcaccacatgccatcttcttcaattaatgtctgttttgggaaaaataggggactttcatatctttataaaaagggattttgttcttttgccatttcataaacatatgttgctacttgcttgacatacattcaaatatcacattagaacgattttatttgttgtcacatcttcttatataattataatattcaattttatattttaattttaattcaatttaattaatatgcatatcttaatttgtagttataaaatttaggattcctttttcttttgttctcattactcattactaattgaattctaaaaaattagatatattgcacttgtagcaaaacatggtcccttatttttaaaattatatgaaattttagtcttaatattaccctttttcttagtaaaaaaaatttatattttattcttaattctttcaaaaaataaaaaattcacacaataaaagaaactccttttattctaataaaattttactataaaacgaaattctttctcatgtactcttcatctactactttcattaaaatttattcttcatcgtaaaaaataagtttaaaaatattttttaaccatcttataaagaaagacatacatttcataggactttgtttgtaaggagaaaggatggtgtccttgtagtagcccaagtatatgtcgataacatcaaatttagtttcacattaactgatgaagcacatgaatttattcaggaaatgagcacaatgaaaaagttattttactttcttggactgcaaataagacagattaaaaatggaatctttatatcgaagtcaattatgctatagagttggtaaagagtttggcttggaatcagctaaacatgagagaacctttgtcagaacaagtgttatgttctccaaggatgaaaaaagtaaggagattgatcaatctacatcacatagaagcatgattggagatctcttgtatcttacatctagtaggctagacatagcatgtagtgtaggtttttgtgctaccaatcaagcccaaaagaatctcgtctcgcaatagtaaaaatgatcatcaactgtattgctagatcttacaatttagggttatagtgtactaacaatattactctaggtttcttgtattataaaacagtactacaagaggttgattttacgtcaggagcaacttcgttgcatggatgagaaaaaggcagaattatatttgcttatctactacaaaagttgaatagtataggtaattcttatactcaataaattggattaaatagatgatagaagattttggaatcaaatgcaatactatgttcatcttgtgtgataatagtagtgcaataattgcttcgatttcaataagcgtagtaggactaagcatattaacatttgattatactatattagggagcttgttaaaaataacatagtgaaaatagaatatgtttatactaaaaattaaatgggatactgtcacgaggaattgcacaccaagtttgaatgtttgtcctttatataaaaacattaatttttcaaaagcactaatttttgttgtaataaaggcatattgatggcacatattttgaatagtcaatctaggattaattgagtttttatcatgactgattaagattaattgttttgataagtaccaagagtatgtccttgaatatatgaggttatataactccttgaaaaagacgatgatgaagctttgagttaattcttaactataaaaccttttgtacatcaaccattgtccaaaaaagatgaaaaatataattgacaatctaaaaatgataaaagccttgagtgaattcttaactatagtcataaaaacatttttgttttcatcaaatcctctttcataaagtttttcaccttcgcctttgacatgttgcctcaaaacgtgggcaaaaatacaagactatggaagttgatatcagagggagaaaatgtgtgcttggttgagagacacatgcataggaggagaaatcattggagcaaaattcatgattcaaagaaaggcctgattgctcaagtccatatgactgccaatcgtatgtttcctttgtatctccatagtgttactaatttatgcttctctactaagatggaggatgttgcaaggctttggcattttcgactcaagacattataataaaaaaaaaatggtgactagccttcctcaaattgaattccctcaacaagtttgtgaagaatgtgtagtggcaaacaacaccaaaatcaatttccacaaggaaagtcatggagagcaaagaaggcattggagctggtgcattatgacctatgtggcccaatacatccatcttcaaatggaggtaaaagatacataattaccttcattgatgattttagtcagaaaacttaggtatattttttgcaggagaaatatgaagcttttacagcctttaaaacctataaagtgctagttgagaaagacatgggcagcccaatcaaagttctttgtacagactgtggtggagaatacatctcataagaatttgcaaacttttgtgagaatcgtagaatcaggaggcaactcactgcaacttacatgttcaacaaaacggagtttgtgaacggaaaaatagctcaattcttaacaggtatttattaatcaacctcttggttatattaaggttggaaatgagcataaagtgtataaattaaagaaaactttatatggactaaaacaagccccacaagcttggtatagtaggaggattgatgcttattttttgaagaaaggttttaaaaaatgtgagcatacactttttgttaaaattggtgatggaggaaaaatgctcattgtttatttatgtgtggatgatttaataaacactggaaatgatattgctattgttagcccaagggttctcctaatcgggttttgatgataacaaaccatggttaagtgactaatttatttaatggttaagaatctcaggcataaactcgaaaattcatcaaaggaccaaatggatacaagatcgagacgcttgtaagacttgtgataataggaaactaatgtaagatgaatgcatgagtgcacttaggattttcacacatttcatgcatctttgaaaacttggtttattatttaaaacgtcgatttcattaaaacctgagtttttaagtaatgtaccttaggcaaaatattttataattggcttaatgatttacctaaagaccttgcctaagtgttagaaaagaaaggaattaaaaaaataggttttcggggcaaaaaaggctcaatcggtcgaggctatggccaaccagctcaatcggttaaggaaccggtaaaccggttgtgctcgtctggtcaaggaccggtcgagggaggccaaaaagtttctctctttcccagtagccttctcttcccggtcgaggggattctcttaccgatcgatgtccggtcgaggaccggtcgaggtccggttaaggcaacggtaacctgtcatgcattaaatgctccaatggctagtgaaccggtcgacccttagctcgaccggacgaggttaccttttgctgtttttgactcccgagttttgaaaccaataaattgagagctccacttcatttattacaatagaacacttgcattcaatagcctacctacctgttcttgataaaaaagctctcatttctttcatagtgcattaaatcaccacttgcatatcatttagtgcactcttgtgtgtcatcctagctttgtcttgtatttgagctatccttaagctaggttgagggatcatttcttataaaaatctgagtgtcaaagccttcaagaggtttgaatcttgaagagattgtgtaagagcccattggagccagaatctaagtgtaagaagattggaagcttggttgaagcttcaagttagtggaaccctcactcaattaggaggttgaggagagtggacgtaggcaaggaagtgccgaaccactataaacctaagtttgaattctctaaactctatctctttattttgcttatattgtgtttgaatttgttgtgattgaaaagattttaaaaacccaattcaccaccctctccccccttttgggtgtttttcttaactaagtatagcctttgttttctcaattggtatcagagctagacctcttgtttttttctaaagacttaatcgtctaagaggaaatggctattccatcaagctcatcccaagctgaaattttttcaaaacatagagcttcattctttacgggaaccgactattcctattggaaaactaaaatgacttggtatttgcaatcaactaatttagatgtatgggatgtcattgaagatgacccaactttttccactaaactagttgatggagttttggttccaaaacccaagcaagaatggagtgagcttgatagaagaaactttcaattaaatgctaaagccggttttactttgcaatgtgctatggatagaaatgaatataatagaatatgacaatgcaaatcggctaaagaaatttggaggttgcttgaaataactcatgaaggaactaatcaagtgaaagagtcaaaaatcaatttacttgttcataactatgaattattttcaatgaaagaaactgagactattgttgagatgattactaggttcaccgacattgtcaatggtcttgaagctttgggaaaaacctacaaggaattcgagaaggtgatgaagatattgaggtctctcccatcaaaatggcataccaaggtcaccgcaattcaagaagcaaaagacttgactaagctacctatagaagagctcatagggtcattaatgacatatgagatcaatttgacaaagaagctacaagagggtgaagacaaaaagaagaagagtataaccctcaaagctacaaccaaggaagaagaagattttgaagaagaaaagccaagtgatgaagatgatgatttagccctcatcacaagagagctcaacaaatacatgagaagtgaaaggtttagaggaaggaaattcacctttggaagggatccttctaaaaaggaatcttcatcccatggtgacaaggagaaatgggaagagaaaagagatttgatatggttcaagtgcaaaaaatcgggacacattaaatatgattgtcctctctacaagagtgaagccaagagaagaatgaagaaggcaatgatggccacttggagtgaaagtgaagaatcctctgaagaagaaaatgagaaggaagtggcaaacatgtgctttatggaaatagatgatcttgatgaggtaaaatctaactttagtgataaagatatgcatgatgtttttaaagaattatatgaggattttgaaaaacttagtttgaaaaataattctcttaaaaagaaaattcaagaacttgaaaaggaacttgaagaagtgaaagaaagattttcaattgttgaaatatctaaaactcatcttgaaaaagaaaatgagattttgaaaaagaaaaatgaatggttaacctcctctctttcaattttctcttgtggacaaaaatattttgaaatgatcttagctagccaaaaatgtgtctttgacaaacaagggctaggattcaaatcttaaaaaaaaaaatcaaaagtattttaaaaactactttgtaaaagaatccgcaagtgcaagtccttccaccacttgcaacttttgtggaagaggagggcacatttgtagtacatgtcccttaagaaattgttctcaaaagaattcaaatgctaaacctaaaaaggtttgggttgagaaatccaaggtcactaaccctcaaggacccaaaaagatataggtacctaaatcagcttaaattttattttatagggatcaaagaaggataagtggttcttggatagtggatgctcaagacacatgaccggggatgaatccaagtttgctttccttacaaagagaaagggaggatacgttacctttggagacaattcaaaaggaatgatcattggtcaaggcaacattggtaatgacatatcctctcttattgaaagtgttttattagtggatggtttaaaacataatcttttgagcataagaaaactttgtgacaaaggttttaaagtgatttttgaagcatctcattgcatcatcaaagatattcaaaatgataaaaccatcttcatgggccatagatgtgataatgtttatgcaataaatatttcaaaatatgatggccatgatagatgcttttcaagcatgcatgatcaaagttggttgtggcataggaggttgagacatgctaacatggacctcatttcccaactcaacaaagatgaacttgttagaggccttcccaaaataaattttcaaaaagacaaagtttgtgaagcttgtcaagtgggaaagcaaatcaaaaactcttttaaaaacaaaaatttcatttcaacaactatgcatcttgaattgttgcatatggatttatttggtccctctaggacaccaagccttagaggaaaatcttatgcttttgttattgtggatgacttctctagatacacttgggtcttatttttaagtcaaaagaatgaagccttttatgagttttcaaagttttgcaacaaggttcaaaatgaaaaaggttttacaattacttgtataagaagtgatcatgggagagaatttgaaaatattaattttgaagactattgcaatgagcatggtattaatcacaaattttcggctcctagaactcctcaacaaaatggggtagttgaaaggaaaaatagaactcttcaagaaatggctagaaccatactaaatgaaaacaatttaccaaaatacttttgggctgaagcggttaacacttcttgttatgttttaaatagaattttattaaggcctattcttaagaaaactccctatgagctttggaaaaacaagaaacccaacattagctatttcaaagtctttgggtgcaaatgatttatattaaacactaaagacaaatttggaaaatttgatgcaaaatcggatgttggaatttttcttggttactcaacttcaagtaaagcctttagagtttttaacaaaagaaccatggttgttaaggagtccatccatgttattttttatgaatctaacaattctctccaagaaagagagagctttgatgatgatttagggttggagacctctatgggaaaattacaaattgaagatagaaggcaataagaagaagttgtagaggatcccaagaaagaagaatcacctttggcactacctcctcttcaacaagtgcaaggtgaatcaagccaagacctccctaaagattggaagtttgtcatcaaccacctacaagatcaaattataggtaatccatctagtggggtaagaactagatcatctcttagaaatatttgcaataatcttgcttttatctctcaaattgaacctaaaactataaaagatgctctaattgatgaaaattggatgattgccatgcaagaagagttaaatcaatttgaaaggagtgaagtatgggaattagtgccaagacctcaaaatcaaagtgttattggaactagataggtctttagaaataaaatggatgaaaatgacataattataaggaataaagcaagattggtagcccaaggttttaataaagaagaagtgatagattatgaagaaacctttgctcccgtagctagattggaagccattaggatgctaattgcctttgcatgttttaaagactttgttttatatcaaatggatgtgaaaagtgctttcttaaatggctttataaatgaagaggtataagttgaacatgtagggaattaaactgaattcccaacccatgagaaacaaaaattagagaaaacacacgccaaagaaaaacaatcacacgcacaagacagtatttacgtggttcggcaatttgcctacgtccacggagttgcagagatatcactattatcagggaagaatatagagtaccaccacagcggctacaatattttctctctatatataacataacaaccacactacactaaaaaaccctaattacaaaaggtggttccacaatgggctaaacgggcccaacaagccttagtgaatctcccattaaaaagccatgcaatattattcgggtcaggttgccaaaccggatcaaacaaaactaggttccacaaagcccaacaaatctcccacttggagattagttcaatcaccaacatcaaaccgctatcatccaagaaacaatccttcatccctacaactcatcctcctgtcctcaagctagaagaccaattgaagctgcgcacaacttcaacttctcaatagtgacacccttagtcaacatgtctgccgggttcttagatccacaaatcttgtcaagtattaccagtttatcttcaacaagataacggataaagtggtattttgtttgtatatgcttcgactttgaatgaaaagccgaatttttggcaagaaaaattgcactctgactatcactgtgtagaatgcccatctcctgcttcttacctaattcatctaagaaaccatgtagccaaatcatctcctttccaacttcagttgctgcaacatattcagcttctgtagtagacaaagtaacaattaatcttctgtagatttgaagcctatgatatagttgtaccacctagagtaaaaacaaacccagtagtactctttctactatcaatatcaccagcaaaatcagcatttacataaccctacagtttcaaacttgcacctgtgaagcaaagacatgtatctaatgaacccttcagatatcttagaatccacttgactgcctcccaatgctgctttccaggcctactcatgaatctactcacaattcccactgcatgtgcaatgtctggccttgtacacaccatagcatacatcaagctgccaatagctgaggcatagggcaccttgctcatatggtccctttctttttctgtcttcggtgactgttctttgcttagtttgaaatgactacccaagggtgtgctcactggtttagcttcattcatgttgaacctgctaagaactttcttcacatactctgactgtgaaagcttcaatgtaccattagccttgtctctaatgattctcatatcaaggatttgctttgcagctcccaaatccttcattgcaaactgtttggacaattgcttcttcagattattaatcttttcaatgtcagaccctgcaataagaaaatcatccacatacaatagtaatatgatgtaagaattgtcaaaggacttaacatagcaacattgatcagcttcacatctcttgaacccaattctatgcataaaattgtcaaacttcttgtaccattgtctaggagcttgtttaaggccatacaagctctttttcagtttgcagactagattctcttgtccatgaacaatgaacccttctggttgaatcatgtaaaggtcttcctccaagtcaccatgaaagaatgttgtcttcacatctaactgctcaagatgtaagttttctgcagccaccattccaagtacaagtctaattgttgacatcttcacaactggagaaaatatctctgtgtagtcaatgccctccttctgttggaaccctttaacaactaatctggccttgtaacgtttgctaccatcatgctcattctttattttgtatacccacttgttgtgcaaagccttctttcctactggcaattcagtcagttcccatatttgattccccaacaaggaatccatctcatccttcatgattaactcccacttgcttgaattctcatcttacaaggctcatcataacactctggctcaccaccatcagtcaacaggagataatttaaaacaggtgaataacgctgtgaaggtctaatgttcctggaagatctgcgaacttcagctacaggtgtactttgatctacttgtgaatttacattctccttatcttcttcactccctttttggacaatactttcaatcaattcatctaagttgacaaactcagatttcttttgatctatctctgtaacatctgacactacagttgacctgtcattgtacataacctgttcattaaatatcacatttctacttctgatgattttcctgttttgttcatcccaaaacctatagccaaatttctcatcaccatagccaatgaaaaaacatatttttgactttgcatcaagtttactacgagcatcaaaatcaatatgaacataaaaaatacaacaaaaaacttttaaatgtgaaaacttcacctctttaccgctctaaacctcctcaggaagtctgaattccataggaactgatggtcctcggtttatcaggtaagctgcaatgctaacagcatcagcccaaaaagtttttggtagtccaacatacaacctcatcttctagcacgctcattgagagttctgttcatgcgctcaaccacaccattctgctgtggtgtcccaggaatggtcttctccattctaattccctgtgcaacgcaatactcactaaaccctccatctatgtactctcctccattatctgacctcaaacattttactttcaaatctgtttctgtctcaaccatgaccttccacttcttaaaagctttaaatacatcaaatttatttttcagaaaataaacccatacctttttgcttgagtcatcaataaaagtgatgtagtaccttgaaccaccaagggatgcaaccagagaaggcccccacaaatcagtgtgtactagttccaatttttcagccttcggtgtcctgccagttttcaagaagctcactttttttttgttttcctaagatgcaactttcacacatgtcaaaatcaatggacttcaattctggtagtttcccttttgataacaatatcttcatccctttctcactcatgtgaccaagtctacggtgccataggcttgtatcagtacttgcatcagcaactgcaattgtgtctcttggacatgaggtcatatacagtgtaccggtcttttttccacgagccaataccctagttccctttgtaaccttccgagtaccaccaacaaatagtattgcatgtccttcatcatcaagttgtccaacataaatcagattcctccttaggtcaggaatatgtcgaacttctccagtaaccaaacagacccattgggtaacgatattcggacgtctcccagacccacaacatccaaggctgaaccatcagccaaatacaccttaccaaaatcacctgcaacataattctgtatgatttctcggtgtggaatggtataaaacgaagctcctgaatccaaaacccaatcatcgagtggactgtctactacaagaagtaatgcatgttgtacctcttctgttacaacattagtagaatcatcttcattcttcttcttagggattttgcattgccttttaaagtgacctgttttcccacagttccaacattgtacttgttggcttgatctagatttgcttctgttccgattagaatttctagattttgatctaccctggtttgaatttttgtcattacctctgcctcttgtctcaaggtttagggcaaaactagatcctgaggtttcgcctgcatctcttcggtgaatctcctcagccagaattaaatcttgtatatcattgtatttgagcttttcctttcctgtagaattgcttattgtcatcctcattgcctcccaactgtttagcaaagaagccaagacgattagagcacgaatctcatcatcaaaatcaatttctacaaacgataattgatttgtgattgtattaaattcattcagatgttgtgctatttatgcattctttgccatcttcaaattgaacaatttctttatcagatgcaccttattgtttgaggacaacttttcatacatactggacaaagccttcattagatctgctgtggtcttctcctttacaacattgtgtgcaacagacctagacagagttaacctaataactcctagaacctgtctgtcaagaagcgcccattcctcagccttcatactctcaggttttgtccccaaaagaggtagatgcaatttcctcccatagagataatcttcaatctgcatcttccaatacgcaaagtctgtgccatcaaacttttctattccagatgcctttcctgcttctttttccattgctcccactcaaacctaaccctaggctctaataccagttgtagggaattaaaccgaattcccaacccgtgagaaacaaaaattagagaaaacacacgccaaagaaaaacaatcacatgcacaagacaatatttacatggttcggcaatttgcctacgtccacggagttgtagggatatcactattatcagggaaaaatatagagtaccaccacagcggctacaatattttctctctatatataacatggcaaccacactacacttaaaaaccctaattacaaaaggtggttccacaatgggctaaacgggcccaacaagccttagtgaatctcccattaaaaagtcatgcaatattatttgggtcaggtcgccaaaccggatcaaacaaaactaggctccacaaagcccaacagaacaaccgcccgattttcaaagttttaaccttcctaatcatgtttttaaacttaaaaaggcattttatggtttgaaacaagcacctagagcatggtatgaaagattgagtaaatttcttttgaaagagggttttaaaatgggaaaaatagacacaactcttttcataaaaaccaaagaaaatgacatgctcttagtgcaaatatacgttgatgaaaaatcaaattgattttgctttgtccaaatcaattcatcttttttgaaccccactaaattataagagagactcttcttatggaaattaaccttatttaccatctttggttattatttcacattaggttttaagtctacttatttttggagtgggtattagtagatgtcatgtaaaataataattatttatagaaggagacccaacaaacctaacttctaccaacaacatatcttcatagtttgtaaaattattaatgaaatctcactacttgtagtatactttactattttcaccattcaatgctttatgttatagtgaatactttttatttttttatttttttattttttatttttatgtgtgatatataacttgttttgtgaacttgatagaaaaaaagaagaagaaagtcttgcgattactaatatctaataaatgtagtgagtcaaatagagagaaatcacgtcttgtaagtgtttgtatccaccaaatgagagcagaaatgggaatgtgaatatgaatttaagtttaaaatgtgcaacatagtttttaaatgttgtaagacatggaaagaaatgatgtcttttatttattggtatcctctaaatgagaatgcgaatgcaagtgaggatgcaaatcttagtttattatgtgagttaccgttttaagttaaatataatttttggttaattcaagttttcaaaaagttggatcatatacttcttgttcaaatttgtcataaaatccaaataatcaatagtactatgctgtgacaattatgcttaagagaaaaaataaaatcaactaaaaatataaaatataggaatcaatataagggttatgaattattaggaatggatgattgtgatctattcattttttcaacaccataaaaattaatattaaaaactcttctcataggagttaacctcattcataacttaggattagtttttacttcagattctacatctacttctttttttgtgtgtatttatagatgtcacatccaataattatttaaagagtgagactgacaaatctaacttctaccatgaacatgtctctataagttatttaactattaatgaaaatcccaccacttgtagtccactctaccattttcttcattgaatactttacctttcatgatttcaaatttatttttatgctaaatatgtgacttactatgtcaaggtctttcctatccttatccaaacatgtgatgtagaaagaaaggatgtcttgtagtttgataaatgttgtgagacatatacatataaaggaaatataatatcttatattattggtacctaccaaacgagaatgagaatgagaatgcaaatgggaatgggaatgtaaatctaagtctaccatgtgaaacatggttttacatttaaatttaatttttgattaattcaattaagaatggacctagatcatgtattttatcttcatatttttcataaaatcttaataatcgatattatcatattatgctcattgatgcttatttgataactggtgagatgtcatagtagattgacacacaaatttaaaaattctagatatatcctagtgaattcagttttcaaccatttaacatgttgattattcatatattagattgaaaattttagcttctttttaaataaatccgacaaaatttaaaatttttaaaagtcaaattgattttcttggtccaaattaatctatcttttcccaatcccactcaaaatcgtcagagagactcttcttttggaaattaactttattcatcatccatcattattatttcatatgatgttctacgtccacttatttttggagtgagtattaatatgtcatgtaaaataataattctttacaaaaggagatccaacaaacctaacttctaccatcaacatgtctttgtaggttatataagtattaatcaaatctcactgcttacaaatcgcttaaccattttcacccctcaatgttatatgttttgtgagtccttatctttaccaagcatgtgataaaaagaaatatgacgtcacacatttactaatatctaataaattttgtgagatatataaagagaaattatgttttagatttattggtatcccccaaatgagaatggagctgcaaatggaaaagagaatcgaagtatagaatgtgaagccttgttttagtcttgctgttagtgatatccaataaatgttgtgaggcatgcatatagaaagaaatagtgtttttaatttattagtattcacaaaataagaatgagaattcaaatgggaatgcaaatcttagtctataaagtaaattttggttttacatttaaatttaatttttggttagttcaatttggaacaagttggattgtatattttatcttcaaatttgtcataaaatctaaataatcaatattatctagttttgacaattatacttaagagaaaataaagtcagttgaaaaaataaaatttagaagtccatgtatgagttatagaatatttgaaattgatgactttttaatgaccagtgattgggtattgaaacacaagtttaaaaattatatatattaagtcaattttgttttcataatttaaaaggttgataaattatatattagattaagatatttattgatgcaataaaatataaaattttgaaaaatcaatttcatttgtttgatccaatccgagtcatgtttccaatcccacaaaaattagaattaaagacgactcttctcataagggttaacaccatttatcactcaagattagctttttacatgagattcacatctactactatttttttttgtgtatttataaattctagtaaaataataattatttacaaaggaagacttgacaaacctaacttctatcattattaattattaatgattaaggaaatcccaccacttaccacttatgttcactcttatccttttctccattaaatcttttacatttcacgcattcatattacttgttatgtcaaagtctttcttatcattagccaagcatgtgatatagaaagaaatgatgtcttgtagtttaattcatattgagagacatatataatggaagaaataatatattatatcattgctatccaccaaataagaatgagaatgcaaatgggaatgtgaatctaaatccacaatgtgaaacatggttttatatatatttaaatttagtttttggtttattcaattaggaataaaactagatcatgtatttatcttcttatttctcacaaaatctaaataatcaatattatcatattataaatattatactgaagagaaaaataaaataatggaaagcaaaaaaaaattatggtagtcaatgtatgagttatagactatcgacgattgttaaatggctagtgagagtgttatagaagtgtgtattaataatagatgtcatgtgaaattatttataggagacccaaaaaacctaacttctaccatcaacgtgtctttataggttatatgattattaatgaaatctcactatttgcaatccaatttactatttttaccactaaaatgttttatgtttaatgcatagttttatttttatgtcatatatacattatttgttttatgggagtctttcttatccacactaagcatgcaatggaaagaaaggatgtcttgatttattggtatatacatttaccaaatgagaatggtaatgcaattgagaatacgaatcaaagtctataatttgacgtggttctagtcttgctattaatgatattcaataaaagttgtgggacacataaatatataggatcttaaatttctttatctaccaaatgagaacaagaatgcaaatgagaatacaaatcaaagtttacaacttgacatgtggtttaagtcttgctatcaatgatattcaataaaagttgtgggacacagaaatgtatagcatcttaaatttatttgtatctaccaaatgagaacgggaatgtaaatgagaatacgagtaaaagtctacaatttgacatgtggttttagtcttgctattaatgatattcaatgaaagttgcgggacccagaggaataaatagcatcttaaatttatctaccaaatcagaatgggaatgcaaatgaaagtctacgatgtgaaatatggtttcacatctaagtatagttttttcccttataaataaggccgagtgaagggaagaaaagtgcagtgagaagtgattaaagaggaaatggcattaccaaggt

SEQ ID NO: 13021 - DNA, 9484 bp, Vitis vinifera
  Intron number 2 from transcript GSVIVT01034467001 (locus G SVIVG01034467001) derived from phytozome v7.0 (chr-ID chr1 8; pos 20855587 to 20865070 reverse strand)
aagacttttgggtgctcgcataaccaggcaagtgctcatccttgtttatattttcttctaattctcattctgtttggattgaaacggaagttatttgcttaaagttcgaatctggaactgggttcttgagaacattttaggttttgcctagaagttgtggaatttggataggtattcattcttttagcacttatttctattttgttcgctgtgtgcaaaaaatatgacgggaaaatttgtttgtttttcttttctttaaaggaattttcgatgccaaagacgaattgggttgattctaaaatgtgtgaactataaaacttcaaaaactagggaactttgtaagagcttttccattgatcatgtttgtagtttcttttggtggcatttaccttggtggatgtacttgagaaataatcctattagtttggtgagaggaggttaatcagtagaaaacaatattggcaaattaatttgttcattttcttaatgggcaccctgggaactcaagcaacctattatcagttaactcatcagctatcaaacattgaaggcaaatcagctttttgtccaactcataaacccaataatccactagttatatattggatcctctggtgatgtttgagtcttctgtgagtcttttctgttattaaaggcaatccatgtttagatggaaaattgtattcaagttttttttaatgtcaaatacaaattggattaatttcaaaatgcgctagattcagttatggttcaaagtctcagtataggttgttgattttggcaagtcctagtgctaggtggtcttggcacttcacattggtatcaaccaatatgaataatatgctacttacaaaacttaaaaattctaaaaagaataatgtgaactgttagaaaaataactactatttgatatgctctaacaaattaataaaaaatatctatcaaatttgacgctgattaaatagttataaaagcatatacttcttttaattggcaaaaagcgaaaatatattaaagatgcctaagcaagaggtatagcaatgtacacatggtgtatacatttgatgcccaccaaaggtgtgcttaaaaaaggagggaaacacaaaatacaacttcactcttcttacattaagctaagccaatcaacaaagtcaatcatggacaaagaatgatcatctatgtacattaatgacctcttgcttttttcccttctacaatgtccaaaacaatcacaaagaggtcacctccaagatttctttttttttttttctccgtttttttgcatgaaagcaccatgccaacttaaaagattttttcttattgtggaatgcatcacccaaacaataccaaaaagagagaaaactggttgccataggatactagctttggggcaatggagaagtagatgatcaattgattcttcctcatttttgcacatgtagcaacgattaggcatcgtccattcaatgcttttaaggtgatcaatcattaagatcatcccccaagttgattcccatgcaaagaatcccaccttcataggtatccaaggattccaaaccatgatgaaggggaaaagctcacttcttccttgaactaaagagtgatagaaagatttaattgacacgccatttttggattccttccacctaatttgtcctcctcctcactcctaattgagcacttttgcagcatctgtaccaaggctgtcacaccttcaatcttccaatcatgaaaatgccttgagaagtgggggctccaccaacccccttctcctccttgatcccacacctttgctacccacccaaatgtctttatcattggttaaagagaacaaagatgaaaaagatacattcaaagatgagtcaccgcaccatctatctttccaaaatttaacacttgttctattgccagcaatgaagtgcgttccactaaacgagggaggtgattgtgggaagtattaagaattgtgaggcaattgtgggaagtttgcagacttggaagggggatgatgctttggtgaaggtaggggtggagttggcttaagcctttggaaagccataagaaagagcggaattgatattttccataggatgaggtttttctttaggaatggcagcaatagagtcaagttttagtgcaataaggaccccttaaagcatcatgaaaaatatttgtgatgagaatagttggtttctcaaatgcagacgaaaattttcaaacatggaattttgaggattggaatcattgctatagatctttaccctcttttgccatggaggtttcctagggaaggttttgctttgtgacatctggttatttaaagcatttatggggcacatactaatgggtgggatgccaacactatagtcaggtggtaacatcgttgtccatggaaagctattgcataggtctttcaggattttactaggtacattcaatttgtggtgggagatgggacgagaatttgtttttgggagcacttgtgataaagggatcaacctttggattctcaattctcaggtttattcagaattgtcatagttgaaaaccttgctatcacattaattcttaggtcttcttatcatttttcttggaactttaacttttgttgtaagcttttgattttgagatagtgtaggggatcctggatctctctgttccttatcttaggactaggttaggtgcatgataactccctaaggcttttagatcctatatgatagaagcaaaaatacactttttaacattaaaggacctagattaagtgctttagaaactttacctttgatttagatgttcccaaatcaaagtcgttaagagaagatcaaatttaaaatcgctggaaggctcgtatacccacaacctttcgcttgatgacttgacctcaaaccttggcactcgaatggtggggtgtttgggagggtggaggctaaagctcttttagccttactctttggatagtgaaagccaacctaccggaaattgtaactcttaatggggtatatatggggtttcccactaggtttaagtgacttgagctcattaggggcctaacgcacttaatctagcccaaaaaattggtcttaattaattaattaacccaatatgattgtttaattaatcaattaactcaatttagatatatcgtttactaatccctgggcaatcttacatgattatcaaaaacgtctttatgcacataagtgaacctagagcttatccaactctcataaactatgtcatcaaggtatatgagcttgagcagggaccactaggacccataggatagtactggcttcctcagaatccaattttgaagttgattcaacatcccactatagagaatcaactacacttcagtaacctatgaaaataataatgagacgaagcttgagttcgtaacctaccatccactgcagggagactccttataaattggtgtccgtaatttaataaattagtgttatcacctattaagaccacctttttaatccttgagttatagattcacctattatgtgatcagttgacatactctatctccaaggagcatatgtcaagttttcattgaaggaaatgctatgattatagtcttctagatcacatgttctttggattacccaaggggatgtattgtttcgctcccatgagatatcatggtgcctttattgagaatacttattgtcatccaccttcatcaatagtgaccaaatccataaggatatatgatcatcttagggtttcacccataggtcaatgtttgttgttaattttgacatagactcaatatcctctcaagattgagacaacaaataaccttacgtcatgattcattgtaggttttgtttaatgtgtaactatgcacacttgtgcattgatagtgagaaacctatcccgacggccaaaacaagccatcatttcaattaagaggtgatgcactacagtatctactggatcgcctaaatccttgaaccgattgtgaacaattaatcattttacaaggaacccatgacttgtgtcctttatataacttttaatgtatccaagtcatgtacaatgcaaacaaaatggacgtgtatgcttagataatcaatcaatgcaaaatgggatggtaaagagaacaagaagcataaataaataaatttattaatgaatctaaaactattttatgttttctaaggctttatcccaatagatagaagatctagaaagactaatttcctctcttacttgtttgcacttgtctccatctgttctagatgcgagagcttagtctttgtcttcttcaagtttatttacagtaaagtctttctttgtagccttgtctaatcattttgatccagttcatttcctttctaccaattttgtttgaaaaatctcaaactcctcttaaggttaagtactttgcttggttagtgtcatataaaaaggtaaacgtcaatgacttgctacaactaagaagatcctacaaagccttcaatcttgatgtttgtatgttgtgtatggagtgtggagaatcggtagatcatctttttttatattgttcattgactttggggctgtgtcacaaattatttagattggctaagttggattgggttcctcctaggagtatttgtgacatgatgaccattgcatgtaagagattgggatgctttattagaggcttggtactatgacaaactacttgtttggctttcatttgggttgtgtggtgggaagaaatgttaggatttttgaggataaggtgaggaattttgaagttctttgggataccattcatttcctttcttccttttgggcctcttgcaccacaacttttaagggtgttctccttaatgtggttctacttgattggttgttggtgtgtaggtccaaagatgtgggctagcaaggagaggttgtttcgtgtactttcatacgatgtataggtttatttagcattttggaggttccatttgtttagttctttgtttttaggaggatttctcatcattcttttgtactttttaaaccgtatttaatagattacattattatttctcataaaaaaaaaaaaatctttaccctctttttgatgttaattgatgtggaggataagctattctagtagattgatagaaagggtttattttccatcaaatcatactattgggtcttagtttttaaagggccttcttatttattgctaagtttgttgatttgaactctagactcgccttctaagacacttttttttttttttttaaattttaatttttttttttttgtggaatcaacctaggagattttagaccaattcatgaaaagaggctaggaattagctaataggtgttgtcttcgcaaggatgatgtggatttggtagccctcaatctcattcattgcaaatgaacctatggttcatggtctatggtcctttctccttttggtgtgccttagatgtgtccttaattagttagagaaacacttcttagttggaattgtttttttgtttgaaccaagtgcgtgaccatttggaggatgattcaattatgtattttttgttcacttggaaaaagcataatagaagatcttttgaaggtgtagagtgatcttgtgtggagctgaaaaatattgttctaaaatctttatttttattgctagagggattatgggctctcactcaatgcccttcttggattttgaagatagtatagggataatatcatagttgttaactcgtaaaacgtatcgtgtattgtttttctataacgtgaatcatattgtattgaatatcataagtttttttataaagtgaaaaataaatagaaaaaatatgtatatgtttgtatttctatttaaagtatggagtatagagtaacgtataaccaattttatggaagatggtatgatctaaagagttaaagtatatctatcatatcaaagcattgaatgttaaagttttgacaagttcaaactaacaaaatagaactttaatatatagattcattacataatccacaacaataaacctatatatataaaaaaaatccacaacggtaaacttcttcaatatttagttacaaattttgactaggcatattttgatacacacattgaatgttaattgatacaaacacacatatgtatgtatgtctttgtgtcatcttcaaaattctagctttttaagtttgtcatcatttcttttccacaaaaaaagaaataaaaaaaactaatatgttaagtaaaaatttttagacactaatcaacattattttcattgccaacattcaaactattcaaatgaaaaattttcaatattcattataaaaataatgacttctaatatagaatatgacaacaagaatgcaacttttcatgttaagattatttaacctatttatcatttttatgatcaatttttaatctttttgtatattttagacaaataatacaataaattcttttaacaaaaaaaattttaatttatttttttttaaaaattccaaaaaataattgaagatatatatatcgttgtatcgtaatatcaagtattgtatcatgtatcgtatatgtatcataagatatgttttaaaataagatatggattgtgatacgtatcaatttccataaaaaatgtatcgtatcatgtattgtaagtttttaaaaactatggataaaataacttagccttggtgtttgcactttgtgcacttccagtacactttgtgtgtacttgggttgctctccttatctctcgttagtcaccttgtaatgcattctatttattttcttgtaaaaaaagtaatttctgatgtcaaaaactctggctagatcctttcatggttcaatgtggtattgattttttgcttcagtaaatccctatgcaaattgttatcagcaacttggatcaatattggctaatatgcataatatgggagttaaaaactttaaaagttctaaaagaaatgaaaattataaaaaagattgttacaattagataaattcaataaatcaataaaaaaatatttgcgatatttgagatttattaaatagttataaaagtatgtgcttggattgtgttaaggagcatgatatgcatattgagtccaaatcttgtaagtttaagttttcaagaaaattggttattcaacatggtatcaaaacttggtttggcgggaggttgtgggcttgagctacttctccacaatttgcatgtttgtttcctcatttggtatctctcttctccaatttgctgttctatggtatctctttacgtgtaggtatgaggctacacatgagggagggtgttaaggagtatgatatgcatattgagctaaaatcttataagcttaagcttttaggaaaattggtagttcaatagattggtttataataatattaagacttgaaaattattaagcattatcataacattttttatattcaataccaattttgttaatttgtatattaaaacatattgaaattataacttgctaaagaactatttttattttttgaaaataaaaataaaaattaataaaagaatgtaattgattataattcaataattatttgaaagtaaatcaaattgaattttttgttccttggcatagattgagacattttttctggatgtggggaatctttgagaaatgtagtgatactctatttttttcttgtttttgtttaattaagttgtggtgcttttttttataggtaaataagaattgcattaaaagaaagaaagtatacacatcgtatacaaagaaaaaaggataaaaaggcgtgaagacacaaaaacttgctaccgcatcctatcgtgagcctatccaatctacaaagtctaacaatgataaagatctgccctcaatgtacaatctaacccaatccaaaaatagatacaattttttttttttaattgtttgatccgtgctttcaaagttgtcaaaagccctcctatttcgctctcgctataatgcccaaaatatatacaacagagtagccttccaagccttcttcctctttttacccacaaaggacccgtgccaactcagaaggacctctctaactgaataactcaacacccactgaatgccaaaaagtgcaaagatcaactgccacaacaaacgagctttcgaacaatggatgagaatatggtcactactttcttcttcttccttacacaagtaacatctattaggaatcctccaacccctctttttgagttgatccaaagtcaaaatcttgctctaagttgcttcccaagcaaataagctaattctcgagggcacctaagaattccaaacaataccatgggggaatggttccactctcctatcagccaaggagagtaggacttaacaaagaaagcaccatcctttgtaggcaaccataccatggcatcatccgtctccacagacaaagggtgtgttgacaatctccccaagaaggcctacaccttctctagttcccaatcatgcagttgcctagtaaacctaggactccaaccaccatcctcccaaaggtcactcacccaagcatctttagaggaggctatggaataaagcttaggaaaggactctctcaaggatgaatccccacaccacttgtccttctagaacttcaccctattcctaaacccaattgtaaactcagttcttgttttgaacatctcccatctgcctcagatagccttccacacccccacaccatgtccttccccaacaactttagaacaccaacccccctcaacttgtccatacttgcccacaatcacctgtttttagagagtgtcccattcacttgcaaatctccaagaccacttgcctaagagagcctcattgaggatggttaaatctctaatgcccaagcccccttgctgtttgtctaactgaacaatagcccatctcaccaagtgcggcttttgttctaaggcacctcttcctcacaaaaaagtcggacaatctatttgtgctaatttggtgtgtggaaaaagcagaactggaggaattttgaaagatctggaagctttgagttggctttggaagatattataatcaaatctcatttttgtttgtcagtctcggcagtcatagattgcttggtagaggttaagaattgctttattctgtagttgttccttttctttttatgttgtttggtgcttcttccatgcttctttgtactagggctacggcccactttttgaggcacctcttttatggggaatttcaagacttcatttcaatatcgagaaattagaaagtgtgcaaggttttcaaattcttaatcatttttgggtgtttggctgatatttttatcaatcttccttaaattagattcctgagttacatgttacttttttcatattatgatatcaatgtggtgtactaaagctgatttccaacttggggaaaaaacctgctatgataggttttttacaagtctgaaaggttaattccttaattagaagtgttaaagggttgtttgtttttttaa

SEQ ID NO: 13022 - DNA, 9616 bp, Vitis vinifera
  Intron number 3 from transcript GSVIVT01018248001 (locus G SVIVG01018248001) derived from phytozome v7.0 (chr-ID chr1 5; pos 12554163 to 12563778)
aagtaagttaaacctttgtattcgtcacttctttacaattctgatttttaggagaattatctttttcttatcttgttcaatcaagcatgaatattaattgattttgctattaaattttcctttctgaccacaaatatattgaagttttactactgtttgaaaaattatgatatctatcgatgttgtgctcatctgttcattgcaatgattttagatatatttcttttctttttattattttttcccaacatactttgaagttgcttctaaactttccttttgagtagaaatgatggtcaatgttaaattaataaattgtaatgccatttgattttttttttccctgagggcatatgcgtgacacccctaaaattaaaaattttcagagagtgtgaagagtgataaataactaatcaatctaatttttatgtatcctagaattacaaataattaggtgacacatttgatgcacataagttgttgaccctgataattatgacatgctgataataataattcataacactcaacttaaatcatgtggatgaaaattttggtagagtagattaatacagcacttgtggaaagtttataacttcttgtcctttttttttctcttgatattttaaagcacaacatagatagttaaagtacagtgcaatttctatactagatttaacaaatatagcttccaaaaattattagaatttcaaaattcaacatgtgaccttcccacaccattttagatactcaactctgaatgctgtctacagataaaaatcccaaaatttaaagtaaagttgttttcggtaatataatttgattcaggagaattggtggatgtttactttactagaagcttgctgataaacttcttttgtcttagattagcgtcaaaatggaaaaaaaattatgctgtctctctcttttgtctagctgatcaactagtccatctaattttgtatgtagctggattttgaacttcgtccagttgccatagtatggctagaatactcacaagcactttcagagtccccatgatcaaccaacccacagaaatagtagttttgacagcccattacagatttgcttctcctttgaagcttcaactatgatgttcttcaaaaaaaggcttttatttttggatcattccatggtgctctccttagtcatcttttgctggagttgtcctagagctagttaattttactccctagatctcttccaaaccttgagttgtagtaaataatgttttggtctagtcaaaataagtttaatcataattttcaatattattttatgactttggttgtttctaatgatgatgtagtctttcacaaatttgaatgcctcccaatattctagattgattagaaatttggatgaagacattctttgggattatccttgtgtgaaaggaattctccaatctgttgagtgttgatttttcctaaaggttgactatgtggagtgatgaggatgaatcttcaagatatatatcaagaaagggtattaatattagttgtaattaaagtaggattaatattacttaaaattaaattaggattaatatttattggagtctaattagaattagctagttgagttataatataattagaatttgagtcatgataggttattagagtcctagtagactttggatgttgtaattagaattagaattataataggttattagaatcctagtagactttggattttttagaaaaacctattaataggctaatcaatgtaaatcaaagggatgaattggtatgaataatattatattttctttcattgcaaggttgcaaccctcaatggtgagattccattgattttcttctaggtgagactcctagaaggtcttagtgagactcttagaaggtcttagtgagactctaaggttttccatattttcttcattgtttcttctttctctctatttcttatcttataattttatctaccataaaatttattctttgtttctctccttacaccctaaaaaataaatcctagtccacctacccttgagtgtaggcaaccatcctagggttgtcctacatcaattttggtattagagcgaaaattcttggcatgaaggcatatgtaattgaggagtggagcaacgtatgcaatggttgaaggctacaacttttttatgcagccattggtgaacataccaaggctaaatgaagaggaggattggcgacgtactagcatcttccaaattcgtgttgcttgttaagggagactatgtactttgattattgatggaggtagttgttccaatctagctttagaggagcttgttgagaagcttaatctaaagacaaaagatcatccaaatccctatcaaatagcatgggtaaatgacacatctattttggtgagttctcgttgtctagtgacgtttaatttcagtaataattttgagttatcagcatggtgtgatgttttgccaatgaaagttgcccatattatgcttggaagaccatgactttttgatgaaagggtccaacatgatggatatgagaacacttacacacttgtgcgcaatgggcgtaagaagatcttttgtccaatgaaggaaattccaccacataagcaactagaggaaaaattagcacccttaaaactagaagagccatcaaatattcttactaaaaagcaagtcgaagttactagaaaggagaaagaaatcatcaatgataaatctagaaagcaagaggtgatgaaactaatcttagatcaaccaatagaagaactcaaagaagttgaagaagaatcgatgattgacttcccaaggccaaacattatcatgagtggtggcaaacatgaagaatctgttgaaatttcttttgaatatagggaattcaagaatcttattcttccacaaaacaatttacaagaagagtgtgggaaacaactttccacaagcttgttgaagacatataattatttcaagaattatcaacttgttgtacaacatcaaaaagttttttgaagtccagtatttgtcttacatgaaattgaacaagttcaagagatcttgagatcctatcttaccatgggaaagagacgacgaagaaagaaatggtggaaggcattgcttagaatttcaattgatcatgagaaatcactaaaactcaagattgagtttttttcaagtcagggggaattgatgaggatgaatcttcaagatatatatcaagaaagggaattagtattagttgtaattaaagtaggattaatattacttagaattaaattatgattaatatttgttggagtctaattaggattagctagttgagttataatataattagaatttgagtcatgataggttattagagtcctagtagactttgaatgttataattaaaattagaattataataggttattagagtcctagtagactttggattttttagagaaacctataaataggttaatcaatgtaaatcaaagggatgaattgatatgaataatattatattttctttcattgcaagattgcaaccctcaatggtgatattccattgattttcttctagatgagactcctagaaggtcttagtgagactctaaggttttccatattttcttcattgtttcttctttctctctatttcttatcttataaatttatctaccataaaatttattctttgttcctctccttacaccctaaaaaataaaccctagtccacctacccttgagtgtaagcaaccatcctagggttgtcctacatcatggagtttgttttctaaaagaggatatccaagggcatgtgtgactatttaattttattaccattcttttgctttttcaggccttgtatacctcctgggctagggtttttatttttagggtataaggaaaggaacaatgaataaattttatagtagagaaaaataaaataaaaaataaagagaaagaagataggatgaagaaaagatggaaatcttcaagtctcattaaggccttctaggagtgtcacctagaagaaaatcaatggagtctcactattgaggattgcaatacttgcaataaaaaaagaaaaaaaacataatattattaacatcaatcaattcattcatttgatttacattgattagccttattcatagacttctctaagaaatccaaagtctactagaattctaataacttattatgactctaattctaattgtcttataacctaattggctataatctaactacaacaaatactaatcctactttaatttcaactaatattaattctcatttaattccaaataatattaatcttacttaaagtttatttatgtctttacttttctttcttgaatagactttaaaagattttcccccatcaatctcccctagcttgaaagaactcagctctgacgagttaaaagcttgatacaattcatagtgatcggggttaagcttttgaaaatttgtggttatataatccatgtatttttagagtgtggtttgcctcgccatttcaccaaaaaattttggtatccaccttgttgagtggacatagtttgatcttcaagagcatactcgatctcaagacgtgggctaagattggtggcaactaaagatccaattcttcacttacctcgctttgatgaccatggtagacaaacaaatcttacacattaaatattcgactaaaatgcaattatgaagaaagctctgaaaaatgcgcattctcacccaatcactttagcacccaaaataaacccattttcttagtttgaagcttgtgatatgtgctcgaatgaaatctttttggacatagacgaaccattactaaatcaccttcttgaaattggatatatctttgatgtgcttttattgcctcctaatggttctcattgttgattttgattttttttttgtaccttttcaaattgacacatagtaagcacctttttttggttgtctcccctggcttcttcattgactagatttctttcattagacaaatgatcttcttacaccccttatgtatgagagtatatgcattttcatagccgtcatattgaactcttctatcaaaaagctaagatcttccaagtaaaatatgatttacttttattggtaagacctcacaccatataagttcttgaaagtccctaccagaaaggaaagtgaccaaacaataggaacttactgaaatagaggtgtcattaacccatgctactcaaaatggatttggatgtttctctattttaaggtttagcttctcaacaagctcttgcgaaactatgttcatattgctacctccattaataatcatggtgcataacctcccttggcaagaaatacatgtctggaaaatgctagtacattgccaatcttcttctccttttacctttgggatagttaataaaggttgcaccataagactatgactttgcgtcatactatcatagtaattacattcttcgctaagttcatcttcattgtaggtctcttcttcctttggataactttccaatttagattcagatttttcaacacaaatgtgtaaaccttttcttgggcatacaacaacataatgaccatgcccaccacacttaaaagcataaaggagtcacgtctacttttctatcaccaatacttattgaagttttacccttaaatatttcatcaaaagcttacagcggcttgccaaacaaaggctaagagaaaaaagagcacaggtatgaccgacataacatctacaattggattcaaaaaggcataggcttcgggcaatttggcgaagaaaaaattactcgaataaagggtagaattaagatagatacaaatcaaactaaagatattaagcataacaaacattttgttaccatccttattagctacatttgaagtttgttgattgttgcccccaccattcgcatgattagaagttttgaagcttgatgtgcttaaaggtctacttgttgtccgattggagaaagtgctcctaatttgtgaacttttggaaacccgaaacctgaggccttcttctatttggagggctagttgataaatatcatttacggtataagagtgtgtagctatcatctcaagttgaagtctagctttataacgggctgcaagttgagcatcgctttcccgcacttgattttgaatgctcaattcatggaattcttttgtatattcttcaatggacttagtgccttgtttatgggaaaacaattttatgtacatgagttgttcatattcaattgggagaaagtgttttttcatcttcaacttcatctcatcttatatgtctataggtggttgaccaattctatgaatttgattctcaatattatgtcaccacaaatgtgctgctcctttcaactttgccttcacaaaacaaacttttttattttcgggtattgcataccaaccaaagtaatcttccacaacatgatccaatcaagaaaagatgttggatttaattttccataaaattcggcaacttcaaggtgtaccttttttgtcacatcgtcatcttgttcaaagagtttgctccttctatgattccccatcataaaattgccttctctgcttgtctaaattgatgcttatagtctcatcttcattctaataactttgtgatctcatcaagtttgctatttagttgtattatagaatcgtgatgagattgttgtgactgaaatttcctccaagcgtttgtagtggcatcttgattgtgataagtatttttagaactcatgcctgcataagttactccgttcctcaatcacatatgccttcaatccaagaacttttgctctgataccaaaactgatgtaagacaaccttaggatggttgtctacactcaaattggttgactagggtttttatttttagggtgtaaggagaggaacaaggaataaagttatggtagagaaaaaaaaaattaaaaaaaaatagagagagaagatatgatgaagaaaagatggaaaccttaaagtctcacctagaagaaaatcaatgaaatctcaccattgaggattgctatacttgcaataaaaaaagaaaaagaaaaaaacataatatcattaacatcaatcaattcattcctttgatttaccttgattaactttatttataggtttctctatgaaatccatagtctactaggattctaataccctattatgactctaattctaattgtcttataacctgattagctaatcctattccaactaattctaatttaattccaaaattatattaatcctacttaaagtttatttatacctttcctttttttttcttgaatagactttaaaagactttcccccatcatcttaattgcctctcatttctgttatactgttacaacttaatgtcatataattactatccaaacactaagaaatgttgcccaataatgccttttgagttttttctacaaatcctcttagccttgagtgatacgagctattcatcattgttagctgccaagacaagctacactaatttaagtgtttttttttttttttttggtagtctagacaagacactgtaattgatgacatgcatttcaggcccctgatttccattttctaggacaccatgcacctaccactgtagagcaccacctcgtttccttacttgaaagtgaaattctttttttctcaattatctcaggtggaactaatttgggttcttatggcataacactatttctaattggccttaaccagcatttttgtgatgatccttcccttcctatcacaaactatacccttgatgatccagttaatatatttgttgttgaacctggggacctcatggacacatttggatccagtgaagctgaattgccaccccaccttggtcagcatggggttaacccaatcatatatggagtactagctaacgatttcctgaatggtgaactgttgtgcctgattgattgaattactaactgcttatgaagtattccccttcttcttacctatttgtctatggcatccatacccaagcaatgataatgattactaagatggaaaatgaggggagtttcattggccaaccttcatatgagatggaacataagggaagtttaattaatcaaccgttgtctagcagcttgcttcatcattctgacatacactttcattgtcatacctcgatcagccttctagttaagatcaagtgttacgtatattttaatttacttttcttgttgttccatggaaaaggattcttagttaaggtataacattgactagataattggtttcatagggattagttatatttgtttcacattcctactttttcacacctagaatggatgtggtcgtttaaccctcctaatatgcctttgtgcttgcaccttttgagctttgagaggttgattcccaagtatatagccactgactctaagattcttgaagaatactgtagaaatctgactcagctaatttgcaaagttacctcagaaatcatgtgtaatttgcaattttaagttgtcaagttgtggccttcctatgacagaattgatgccttgaaaaagatctctgtatgctcttcttgacatgttatttggagcattcacctttagtagccaaggtaaataagaatggggatagaagatccttgcctgaattctcaagaattttttgaaaagtcctgaatgattgtcattagtaaacatatgcagaatgtcgaatttgtatttatcacttcaacccaaatcgcatcctgagaagtaccaatcataagagtggttataatgcacccatggatatctttacttgcctgtgatttatcctcaaatggtattggaattgttttcatctgaagcacatcatgtactagtgtaattgtatattgcaaaatttgattgtgttgaattcaaaacttcaataatcaaacaatcatttatgtgtgattttttggagtgggttaaattgtacataaaaatacataaatttttgtgtatcttccattttgtgttgcctttagtgtctttatatatctcatgcatgctctttgtgcacccttttgttaggcaatgttaatatattgaatctttgcctatcataaataaataaataaggcataatcttgaagattacaatggaaatcatatattcataaattgcttttatatttcacaattaatgttcttgttagtaggaggatgcttgtttttgttttcccttttgcctttgggcatacttaggttgcaccccctcttttgttagtgcatggatgcacttgatcctgtcttttcctatttctgaatttatagtttatctattaattacaacttaagcccgtaatttgactatttataaagaacaaaaggcttggtggcctataaaagaatattatttccttttactacaggactaaaaacatattctgttttgtttttttttgcctgccaaaatttgtaatatatattttttgtaattttaatattagctatgtcattttttcttcttcctcaaaaatggaggttcttctctttactttgtgtatagatggatgggcaagcaattgacaacttgagattgttattacaatttgcaggtacttgtatagaggattgtctactggagatcgtc

SEQ ID NO: 13023 - DNA, 1692 bp, Vitis vinifera
  Intron number 7 from transcript GSVIVT01025756001 (locus G SVIVG01025756001) derived from phytozome v7.0 (chr-ID chr8 ; pos 12183278 to 12184969 reverse strand)
cttgctgctagaaagctctcaatccctgttcgtgggtatgtcttctaactcaatttcagcttctcatttcttctaagtttatttaataaactcttttaatttttttaggcaagttgattcaataaattctactcatatatattttataattataaagtagtttaagagtagtgaaaatatcataaatttctcttaggagatgattaaaatagagagataaatatatctatgttacacaaatgacagaaactgttatctgcagaagaaatatatacctcatatgtcgtgcgttctgttgtctagaattttaataaaaagtcttctccttaatggtgtgttattgatcctctttgcacacatagtagatgacttttcctgatgttgtctcccatttgtgccattctctagctcctcatgaatctatcatttcttgtttccaccctcttcttgtattgccacttgtccatcttaacacctgaatcttcactttggctactcatctttttgcctacaattttttgtagtattttataccataaagcatagctggcatgagaattttcatttcctgataggtactcttagagtccgttggtggtgcttttggaaaacacttctagcataaaaaatgtttttgaagaaaaattaagcgtttggctaaatttgtgaagtaattttaaaaagttgaaaaatcatttgtaatatttcttagagaagcacttgatagccaattctctgaaaaaacacttctagagaaagcacttcaactcaaagtacttcaaatagaaacactaccaaacacactcctaatcacccaaaagaaaaaaagagatctgcataagcaacatttgtcctcttcattcatttactacatatttatcacttttaggctccaaatttcaggttttggaaactttgggggaaataactagtgaagggaaaaggaagaaaaggaaaacagaagggtggtttgaacccaataaattttttctccaaatctctcttaactttattcacttggaaaaaagaaaagaagagagttggagcttgaaaatgtataaagtttaatatttcattttttcagtgtattttgcatctcaaagaaacaagataaattcagtattccatcaaatgaagagacttggtgtctagtaaaatctctttctgttcagttatttagatgacaaagcttcattgtgaattgtttttttttttttctttccatctgatttgattcatcgattgagatgcttagaaatgagcaccttgttggagatggctcagagatgagatttactatctatcaacctttgactatttcctttaccgttttattgttaccccctagataaatttatcttttatcttttaaaattctatactctctttctcttcatttgatgtcctcaaataaaatttatatgccgaaggactatcttttgagttgtaactattttttggcataaaaaaaaaggatgatttgtaaagaatctaaatatattttaacctttgtgttttattgttgatttctatttgtaacctttcattgaaaagaagtggctagatgtatgacatgaaaactaattagtacttttctattttaattcaatttcttgctttatatagaagggtaataattagtccttgatgttctcagatacatatcgtgcgttgtgggttgtccactggaag

SEQ ID NO: 13024 - DNA, 19419 bp, Vitis vinifera
  Intron number 12 from transcript GSVIVT01013976001 (locus GSVIVG01013976001) derived from phytozome v7.0 (chr-ID chr 16; pos 8285054 to 8304472)
ttgctgttctaaagcacaaggaggttgattcacaggtaatattgtaggtttttattttatacacacacacacaaaggtaacagaaattagtagggactggtttaatggtagctaggcttttaagtggtagtatgagaatcataagttggaacatcagaggattggggtctagaatgagaagggagacgtcaaggattttctccatcatgaatctccaaacatagtgattttttcaggaaacaaagagagaggtgtgtgacaggagatttgtggctagtgtgtggatagctaggaataaggagtgggccactctactagcttgtgggacattgggaggggtattaataaaatgggactcaagtaaatatagttttcagatttggtgttaggattcttcacaaattcgattgagttagtttcagatgaagaaggggccttttggcttacctctgtgtatggtcccaacatttccactcttagaaaatacttttggatggagttagtggttccttttgatttaatctatccgattttgtggtgcgtggtttgtttttgttttttttttttttttgggggggggtggggattgttgtgtttagggtggtgggtgtgactttaacatcatcaggagaatttcagagaagatgggtggttcaaatgtgttgaaatttggcattcaaagtttgggttttaatttaggaaagtaatttaggaaaaaaaaaggagagatcatttaggatgattcagtttcctaattttaggagagaatcaagctagattgatattttcttattcggtcatttgtgtatatatatgtgtatggtgtgtacctaaaaattcaataaaggaattcagaaattcttcatggtatcagagctagttttctgaaaccctaatcccttctggccacctcttattcaggccatcattcattccggccaaatctctctggccatctctcaatccgaccatctctctctctggccatctctcattccggtcatcattccggaaaagtccctgtcctcagagccaagggagaaaatgctttctggtcggtcgaatcgtcgtcagaaaacattcaccgctggcaacttttccggcgacagttttttctacaccgcaaggaccgcctggaggagatctctaattttgcccaaagcaccggagccagaaaaccatccatgcgtcggccacgcacgtttttccggccggcgactgcatctcacgcgccggcgcgtgagggtgcgtgagccacttttcagcgacgcgcttcctcccccaggctcgcctgacgccaaccagccacccttcttacctgtttctgccatccgagccctgcacgtgcctcttttggggttttttttgcctccgcgggccctccgatcagtttttccggcgtcctccggctattttttctcaactccaatccctgcacgtgccttgggaagtgttcttctacctttccggtccatgacaaaatacggaatggcatcatcacaagtatccagcgtcacgtcaccagaatcagggggcagatctgaaattccaaaccttggtggcagtgattcctctcctattctcatcacaggacacaaattaaatgaccataactatttacagtggtcacaatctgtgttgctgttcatttgcggtaaaggaaaggatgagtacctcactggagaagcagccatgccagaaactacagaaccgggtttcaggaagtggaagattgaaaacagcatgatcatgtcatggcttatcaattccatgaacaatgacataggtgaaaattttttgctgtttaggactgcaaaggacatctgggatccagccaaagaaacttactcaagttctgaaaatacttcagaactttttcaggttgaatcagccttacatgacttccgccaaggagagcagtcagttctcagtattacaacacactcacaaggtattgacagcaacttgacttattcgagactcactcatggaaatgttcggatgatgcagcaacatacaggaaaattgtggaacaaaagagactgttcaagtttttcctaggactaaatagggaattggatgatgttagaggccgaatcatgggcattaaaccccttccaagtctcagggaggctttttcagaggttaggcgtgaagaaagtagaaagaaagtgatgatgagatccaaagagcaatctgccccaacattggatgcctctgcccttgctgctcggtcatttaatagtagtggtggagatcgttagaaacgggataggccttggtgtgattattgtaagaaaccagaccattataaggaggcttgctggaagcttcatggcaaaccgactgattggaaaccaaagccacggtctgacagagatggcagagcacacgtggctgccaactctgagagcacatctgttcccgagccgagtccattcaacaaagagcagatggagatgctacagaaactattaagccaagttggcagtggcagtactaccgggatagccttcactgctaatcgaggaggaatgaagccgtggatagtggacacaggtgcttctgatcacatgacaagagatgctgccattcttcaaaattacaagccaagtaatggtcattcatccgtccatattgctgatggttcaaagtcaaaaattgcagggacaggttctataaaacttactaaagacttatatcttgactctgtcctccatgtccaaacttggattgtaatcttttgtccattagcaaattggcccgtgatctccaatgtgttactaaattctatccaaactcgtgtgtttttcaggacttgaaatcggggaagatgattggcagtgctgaactgtgttccggactctacctcctctcatatggccaattctcaaaccaagtctctcaagcaagttgcgtacagtctcagagtatgttagagtctttcaattctgtgtcaaattctaaggtcaataaagatagtgagattataatgttacactatcgtcttggtcatcctagctttgtttaccttgcaaaattgtttcccaaattatttatcaataaaaatccagcatcttatcactgtgaaatttgtcagtttgcaaagcatactcgaacagtatatcctcaaatcccatacaaaccttcgactgttttctctctagtacatagtgatgtgtggggtccctcccggataaaaaatatttctggcactcgatggtttgtgacattcgttgatgatcatacaagggtaacatgggttttccttatgaaagaaaagtcagaggtcgggcacatttttcaaaccttcaatcttatggttcaaaatcaattcaattccaaaattcaagtccttaagtcagataatgcaaaggaatactttactagtagtctcagtacttatcttcaaaatcacggcattatccacataagttcttgcgttgacaccccacaacaaaatggggtggctgaatgcaagaatagacatctcttggaggttgcccggtgccttatgttttcctctaatgttccaaactatttctggggggaagctattctcatagctatctatttgattaaccgtatgccatccagagtgcttacctttcaatccccacgtcaacttttcttaaaacaatttcctcacacccgtgcagcctcttctgatttaccactcaaagtatttggttgcacgacattcgttcatgtgtatcctcaaaatcgtagcaaatttgctcctcgagcgaataagtgcattttcctagggtattctccaacccaaaaagggtacaaatgctattctccaaccaacaaaagattttacaccaccatggacgtctctttctttgaacatgtcttcttctatcccaaatctcatgttcagggggagagcatgaatgaacatcaagtttgggagtcttttcttgagggtgtaccttcttttcactcagagtcaccaaatccttcctaattcgctcccactgagttgtccacacccatgccgtcatcagtccagccagcccagcacacaaatgttccttctcccgtgaccatccagtctcccatgcctattcaacctatagccccacaacttgctaatgagaacttacaagtttacatcaggaggaggaaaaggcaggaattagagcacggatcacagtcaacatgtggccaatatattgactccaattcaagtcttcctaaagagaacataggtgaggatagggctagagaggtgttaattcccagcattgatgattctactctgccgattgcattgaggaagggtgttaggagatgtacagatgatccaattgggaattatgttacgtatgaagggctatcaccatcttacagagaatttgctacttctcttgatgatactcaggttcccaacacaatacaagaggcattcaaaatttcagaatggaagaaggcagtacaagatgagattgatgcacttgagaagaatgggacgtggactatcatagatttgccggttgggaagaggcccgtggggtgcaagtggattttcactataaaatacaaagcagatggatcagtcgagagattcaaggctcgtttggtagctagagggtttacacaatcctatgggatagactatcaggagacttttgctcctgttgcaaaactgaacactatcaggattcttctctcattggctgtcaatcaagattggtgcttgcaacatctggacataaaaaatgcgtttctaaatggtgacctagaagaggaagtctacatggaaataccacctggtttcgaagaaagtatggcaaagaatcaggtttgcaaactccaaaaatccttttacggccttaaacaatatccccgagcctggtttgatagattcacaaaagcagtcttgaagctgggctacaaacaaggtcaggctgatcatactctatttgtcaagaagtctcatgccgagaaaatggccatattgatagtctatgtcgatgatattattctatctgggaatgatatggaggaattacagaagttgaagaagtatttgtcagaagagtttgaagttaaagaccttggaaatttgaaatatttccttggtatggaagtggctagatcaaggaaaggaatggtagtctctcaaagaaaatacatactcgatcttcttaaggagaccagtatgcttggatgcaaaccaattgatactcctatggatagtcagaagaaacttggtatcgagaaagaaagtacaccggtagacagggggagatatcagcggcttgtcgggcgcttgatttatctctcacacactcggccagatattggctttgtagtgagtgctgtaagtcaattcatgcacagccccactgaggaacacatggaagcagtctacaggattcttagatatttaaaaatgacacgagggaaaggtctattcttcagaaagacagagaaccgtgacactgaagtatactcagatgtggattgggcaggaaacatcattgacaggcggtccacttctggatattgttcttttgtctggggaaatcttgttacctggaggagtaagaagcaatcagttgtagccagaagtagtgcagaaactgagtacagagctcttgcatagggaatctatgaagggatttggataaaaagggtttttagtgagttgggacaaacgagttcatctccaattctgatgatgtgtgataatcaggcagctataagcatagcaaagaaccccgtgcatcatgacaggaccaagcatgttgagattgacagacacttcatcacagagaaggtgactagtgagacggttaaattgaactatgttcctaccaagcaccaaaccgcagacatcctcaccaaagctttacctaggcctaacttcgaagacttaacttgcaaactgggattatatgatatatattctccagcttgagggggagtgttgaaatttgacattcaaagttagagttttaatttaggaaagtattttaggaataaaaaaggagagatcatttaggatgattcagtttcctaattttaggagagaatcaagctagattgatattttcttattcagtcatttgtgtatatatatgtgtatggtgtgtacctaaaaattcaataaaggaattcagaaattcttcaaaatgtaactctttgcatgagagattttgatgaattcattcaagagatattagaccatcaaaatctcagactttagagtttaaacatatcaactatcaaaatatcagaccttcgacatataagcttcgtcacaaggctatataagatcatagctaaattgctttcaggttgtacccgaggagtccttcatgaaaccatccacattttcttaggagcttttgttgagggagacaaatttgacgttttagaccacacactagaaatgaagaggtttagtatgagataaaggtttttttttttttttttttgattaatatgtacgagatggaggttatggatgaggggatgcatgtcttcaacaaattttgttgtattggtaaatagaaatgctaaaggatgatttaaaagcaactagaagttcaaggcaaagagatcctctttcccctttccttttcaccattgcagctgacgtttttagtaggatgttaacaagagtggtggagagaggtattttggaagggttcctagtggggaggagcaaaactagggtgttatatatgcagtttgaagatgacactatctttttttcttgtgctagtgtgggagagttgtaaaaaatcaatttagggtgtcatcccatggtgaagtattttttgcagcttatcttattgatttttgggtgcctttcttagatcaatttagacaaagtaagttgctaggaataaacatgagtcaagatcaaatcattagattggattttctgctagaatgtaaagtttatgatgaaaaaatcctctcgtatttctttacattctgatttacaatacatatatacaatgaattccaataaaaaaaatacatatatacaaagaatgagatctcctaaattaggctacttataaaaaaaatccctaaaatcaagcaatttgattgcaagagttctatatggaaatttacctaaggttcctatatggaatttacccaaattcttggcattaacttgggtaaaagttagctgttcttagtggacaatgtggagaatatgaaggagttggattttgaggttggttggttgtaaggttggaagtttaccctctacttacttggggatgccgttgggtgctcacttcaagtttgtggcaatttgggatggagtggaggagaaattccttaagagactggctatgtgaaaacgtcaatatatttctaagggagggagaattaccttgattaggagtacactgtccagcttgcctacttaatttatatcttttcttcaaatgccaaggggggtcagattaaggctggagtagatttagagagatttcctgtggggaggtggggctttaatctggagacctcacttagtaagacgggcaacaatttgtcatgataagagaaaagagggtctgggggttaagagccttctacactcaataaggccctcctttgcaaatggagttgatgctttgcgaatgagagaggggctctgtggaaccaagtaattagggggaaatatagggaggaatgaggagggtggtcttctcgggatgtaagagaagggtatggtatagggttgtggaaagcaattaggaagtttgggcacatagttagcagtagacctttgtggtggggaatgaccaaagggtgagtttttgaaagggtacttggtgtggggatggacctttgtgtgtttccttccttcccttccttgttcgctctagctgatccaaaagaagcttgggtgaaggatgtttggtccaggatagcaaaggggaaagaagggggggcgggggtagagttggagcccttgctttactaggtcctttaacgattgagaggtggagggctttctgttacacctgtgtggtcagaaactgatcctggaagaggaggatagggtgcagtggatggaattttctcgagaaagtcactttacaaagcctagagctgggttccttagttttgtttccaatgaagaacatttggaagtcgtgtgtgcagccaaaagtaagcttctttgcttgagaggcatcttggggtaaagttttaaccttgaaccaagttaaaaagatgggatgagccttagcaaatagatgttatttttgtcaagcggaagaggaattcattgaccacctccttcttcattgtgaaaagataagagcattgtgggagatgcttctcactctttttggagtgtcgtgggtgttcctgtcgtcggttagggaaaccctattgggttgaattggtttctttgtgggaaagaagcacaagattgtttggagagcgggtcctctttgcattttttggacggtttggaagactaggaatatcgcatttgaagatgagatgctgtccatccaaaggctggaaactttttttcttaactcactttggtcagagactactttgtttataaaaggttgcccctccatctttgttaagttcattgattgagtgggttcccgttaagggaggggatatttttttgtacatctttatggacagttttttgttttacttgtaaggggggtgagtatttccttttctattttgtacatcttgagtcgcttttttagtgcctctttgcaatacaatacttttcttacttattaaaaaaaaaaggaaagaaaagggtcaactgttacaagaaaggaaaaatatggtaggagaaatcagctatatatgaagaaaaataattgctaatttcttagcttattcttctaacaatttcaatgcaaagggattctttggttaggatttggggagggaaaaagacaccatcttataagtccaaacagagtgtgcatgtgaaatgaggacggtgggtggggctttgggaggatatctttgaggaatagggtcctcttaggaaagtaactttggaggtttcctaggggaagtacaactctttggcataaggttatatcaaacattcataggacacaccctaatgcttaggatgctgatattttagttaggtagtcacatcgttgcccttagaagacctttgcttattttttccaagatttttttagtcattgggaagatttgtttgggttctcaatttcttaatctttatagtggtgtgtcgattagaaatgctcaaatgaagtgccaaaggactctcttgtttgtacccttttccactggactcaccaacatattcaagagggtcttggttccttgttagattttattgactggatgtgtgctagtgagaaggtgttttgtttgctcttttgaggtgttcatgctttttttggctccctttgtatacctcttgtgtccttggggtgtgccccctctttttgtttgatgtctttaatatattcttggttgcctatcaaaacagaaaaaaggaaaaaaaaaaacgaaactctcttgtatcatgtattgttagcttcacttcctttttttgcttggaactttaactttcaaccaaacctcattgacttggaggtagagaatcctaagagtctcttatccattctcacttgtgttaacctatcttcttgagatgtgcaaatttggtcaatatcatcttcaagcttatttatagttaaatcacttttgttggccttatccaatcaattaactccaatttttttctctagcaaaatttatatggaaatcaaaagcctcatcaaaggtcaagacatttgctttgttgatcaataagtgggtgagcacaaatgacttgttgtaggtgagaagaccttttaaagccttttagtcactcccttgtgcttgatcgactaatcattcatggggaatgattgcaaaaaagcgtggagagtcactcccttgtgcttgatgtgcacgctttggagagaaaggaatagaggagcttttaataatgatgagcaattggactaagcaatcaagtttgattttttgtatacttttgtgaattggactaaggcgtatatagaggaccacacaacttcttttatgttagattttatagattggttgagcttaagtaaggagagtggttttttgttttttaaccttcacgcttatattgggcttttttttttcatatacttcgtgtgtattgtgctatgcctccctttaggtgcttttaatatatgttctcttttgcctatcaaaaaaaaaaataaaaaaaaatctttttttatgtcggttgatgactttggaattatgatacaagctatttagactagtcaaattggattgggttcctcctggaagtattagtgacatgatgcccatttcttttaggggcttgggaaatcctattagagctaaattctatgacaaatcgtttgtcttatgctgatttggatagaatggaaagaaagaaatgcaaagatcctttttttttgatagacaaaggcagattgaattaataaactcctaaaaacagggggcgtaccctatgtatacaggtagtatacaaacaaagcccaaccaagttgcagaaaagagaaatagaacctacgaaacctacaaaagggaggctagtttccattaaagacacctaaaaattcaaaaagaaagggattgtctaaccacagaatctgctgagaccactctaaaagtgaacgggtaaaaagcttccttaaactttggtttgacatctctctcctggaaagttcttcgattttgtgctccccaaatacaccaaaaagacaaatcggagccaatctccacaccactcttttcttcttcctcagcaccttaactttccattctagaataagatttctcactgaatctagaaacacccaaaccagtttgaaagaagttaacagcacagtccaaagcatttttgtcttgtcgcaatgaatcaaaatatggttagtcaactcctcactttctttgcaaaggctgcacctattggccatggaccattccctcttcattaatgtgtattattaagatttttctccaaactgcttctcaagcaagaaaacgacttctaagaggagcacacgaaccccagatctcattggtagggaataaaatattgctttcatcccttaacaacttataatatgatttgacactaaactttcccctttcctcattcttccaaattaaacaatcctccccttatgaacctttagtgcagaaatacgttctgaaaaacgagccgcctcctccaattccaaattttggaaagatcttctaaaatgcacctcccaacaaccgcctccatccccttgcctcccctaaaggtttgccactatggcaaatttgtgggctgcattcctgaatggagaaggaaaaacatccttcaacttaaatccccaacccaattatcctaccaaaaactcgtgtgtctaccatttccaatacggatactagttctaagaatgaactcttcccacccttttctaatatctttccataggttcagcctgaaagaatccctcacctctttggtggtccaacccccctccacctccccaaattttcctctaatgactttccctcgaaagctttccttctcaagggaaaatcgccacaaccatttgcctaacaaagcttgattgagctcctccaagtgccttaaccccaaccttccatgcttcttatctttacaaataaccaaccaacttactaagtgtatcttcctcctttcctctatatcaccccacaaaaacttcctttgaattctttctaatttgattcttactttccttggcattgcaaaaagcaacataaagtagatcgggaggtttgaaagagtgcacttaataagggttagtcttcctccttttgacaagtattgtttcttccaagcaacaaatttcctcttgaatctctcctctattacatcacaaactccacatgacttatgaggggctccacggggtaagcctagataagaagtagggagttccctactttacagccaaatagagcagctgctctttccgcctcctccatgccccccattggaattatttcattcttttgcaagtttatttttcagacccgacagcaatttaaagcaagtcacaatccacttccaaagcttcagctgaacctcattattctcacaaaagagaagagtgtcatttgcaagcaataagtgagacatgaaccccttctccacctctcctcgctactttgaatcccgtaatgaagcctccctcttcagccttagtaattaaaccacttaaagctttcataatcaacacaaacatataaggtgataatgggtccccttacctcaggcctctatgcaacctaatttagagatgctatgagacctaatttatttctattccggtttcttaggcctctactattacaattttcaaaagcatttctcttaatgttattcaacttgattgaaattcgatgtgtagatcaaaagaatcaaaataacaaagagaggaacgatgctttgggacctttttgtaggagttgtacaaaccccaaaggaatgttgagctgcttctctttgtattgtctttgatgtgtagtatagaaggtttctccacctctgttatttatcatattttgtaaatttaagaagcatttctcatcttcacttgtatctctctctttctctctctctctctctctctctcactatatatatatatgaaagcctttgggtgcgtttggttttggcatctagacttgagaatgaaagtcctacttccagaaatgaatccttaaaatgtaagtgaaatgcttggttaattctgggaatttcaaattcccgttaatttttattcccattctagtgattgtttgaagaatttcttgggagttaattcctatttacacaacaatccttcaaataatacttacaaaaattatatttatttgtcaatgaagaatgaaataaaaattgattgttcacattccttttattgtccttccttagaaatgacagttaaaaatgccaagccttgaatgggtaaaaggttgacaaatttgagggaataccatatccaagaaaatcaaaatttccaaagctatttgcaacctaagcatggtaatcgtgtgctttggaaataggatacccatttcttagttgagatacttgtgaatgaaacgtgctctttaggttaagggtttcccagaaaaaggtgatgagagatatctatgtagatgagggcaagggattaagagtcagtgttgaaagagaagaacttgatatgaaaatagagaatgaagataagacgaggaaaataagaatgagggagggattcataggccttaaagcagcaaatcctccatttatcatttatcctcgtggaataaactatattaagaatcgttaccttgagtcaagttggagtaaccatcaattgtccctagataaaagcgactttaaaacgccaaaaaacacttactggttcacgactatggtatgggttgtacatccaccgtacctagtgtactagtacataaaccacttagagcatggatgcttagtttgtgtcatactatcgccagtgttttcttaaattttatttggttgataatggcttgatgttttattctaaaaggatttgtggtgaggtgatcaccttttttgattacaatttcctaatctctaccttatttgaaaggcttgagactatcttatttgtcttctcccaacaaatcctcttcaaattaatcttgtaatcttcattatcttgtaatttgttagaccaagtaatgaatgatgtaaccacttttatgcttattttaatcttatttgtttggtccctttgctcttgatgagagggtgtggtccttggattccaatggcttgttattcttgaaaattttccttgcccgaaggttgatcgcctagtgccattccctttgcctagttttgtttggaggtccaaaagctttggttaaattcaagccttttgcatggctatggggcaataaaaaggtaaatatcaatgacttgttgcaagtaagttctctggatattaaggtgtattctaggcggaagaataggttctccacaagtatttgagatttgttggaactggtaagaaggtttagggttttagagaggtttatccatgaaaatcatcagttggaatactaagggtttgggatctaggaaaaaacgaagggtggttaaagattttttgcggcttgagaatccggatgttgtgatgtttcgggaaacaaaaagggacgtgtgtgacagaaggtttgttggtagtgtctggtcggttaggaataaggagtgggctgctcttccggtgtgtggggcttcaggagggattttgattatttgggactcaaagaaactttgcagtgaggaggtggtaataggctccttttctgtcttagtcaagtttttgttggacggatgtggatccctgtggctgtcctcagtttatgatccaaatagttccttaggaaggtttttgggtggagctcttagacatttttggcctcttttttcctttatggtgcgtggacggtgattttaatgttataaggagaatttctgaaaaattgggaggctctagtttaacttctagcatgagggactttgatggatttataagggattgtgaattagtcgaccctcctttatggaacgcctcattcacatggtcaaacatgcaagagtcacctgtgtttaagagattggattggtttctttactcaaatgagtgggagtacttcttcccttatagccttcaagaagttcttcctagatggacatcgaaccattgactgatagtttggataccaattctttcaagtggggtctaacttcttttaggtttgagaatatgtggctacaacatcctagtttcaaagattgcttcagtagttggtggagaggtttttagggaaatggttgggaaggcataagtttatgaggaagttacaatatgttaaggccaaattgaaagaatggaataaggattcttttagagtgctaaaggagaggaaaaaaagcatcctaagtgaaatagctaacattgatgctgctgagcaagaagaggttctttctcctgaactttcagctcaaagagctttaagaaaaggggagctggaggaattaattttgagggaagaagttcattggacacaaaaagctagggtgaaatgggttaaagaaggggattgcaattcaaagttttttcacaaagtggctaatggtagacgaaataggaaattcatcaagtttttggagaatgaaagaggtttagtattgaataatactaagagcatcacagaggagatattactttattatgaaaagctctactcgagtcctccgggagaatcttggaaagtagaaggcttagattggtcccctatcttagaagagagtgcttctaggttggattccccttttactgaagaagagatttctaaagccatttttcagttagatagggataagacgccggggcctgatggttttaccattgcagtgtttcaagattgttgggatgtgataaaagaggacttagtgagggtgttcgcagagtttcacagaagtgagattattaatcaaagtaccaatgccaccttcattgttcttttgccaaaaaaatccagacaaaaaaaaattcagactttagacctattagcttgatcacttgtctctacaagataatagccaaagttctatcaaggtgattaagaggtgtactacatgaaactatccattctactcaaggtgcttttgttcaagggagacaaattttggacgcaattcttatagctaatgagatagtggatgagaaaagacgatcagggaaggaaggagttatcttcaaaattgggattttttggatcatgtgttggagaagaaggggtttagtcctagatggaggacctggatgagaggttgtttgtctttggtctcttatgcaattttagtgaatggaaacgctaaagggtgggtcaaggcaactagaggattaagacaaggtgatcctctatccccttttctgtttactatcgttgccgatgtgttgagtaggatgttgttgagagcaaaggaaagaagtttgttggagggcttcagagtaggtaggaatagaacaagggtgtcccatctgcaattcgcagatgataccatcttcttttctaacttaagtgcggaagaactgcaaacttttttttttttttttgataaccgtggatgtccaggccagcttacgcgcacctcgaccaatcccacggggccctaaagttaacggccgggtaaacctccagtggtcttgaggagactcgaactggtgaccattggggagcaaacccaaagctggaccaattgagctacccctcagggtttgaagaactgcaaactcataagagtttattgttagtatttgggcaaatttatgggcttaaggtcaatcttaacaagagtaacctttttggcatcaaccttgatcaagatcatctctctaggttggccttgatgcttgattgtaaggcttttgattgacctatactctacctgggtcgaataaataaaaaaattgggatgccaaactcacgcgccaccagaagagttgaaccgcagaagtaatcgacaatgatggcgcgaggcttagaggaattggggaggtacttgacatagtgaaagacatcggtagcgcagaggcacaggaggtcgcaaaagagggcaacgtggcttcgagcaggagaagtactgtcaacggagctgtaagggaaggtgtggaaagcaatggaggggtgggtttgggagatagtgtgaatgtaggaggtggtggctggggttttgaagggaccattggttagcagaatagtgatggagagttggtgggcatattggtggaggatgagcttacccagctccaccatggacaccaaatgaccatgcctgtggctgggaataggagtattgtgttatgcgtgcctgcttcttgtgagacggaggaggaagcaaagggacagtggaggtttttgagtgtaatggatgatcaagaagtggtcattgtcactgccctgtcgagaagcattggaaggagggaatccaaaggcttgtggcttttgggatccaatgattgagagaatctcaaggagattagatgagtggcaaaagacttatttatcttttggaggtaggataactcttatccactcatgcctttcccacattcctagctactttctttccttgttcaagattcccgcttcagtggttgcaaaaattgagagattgctaagggatttcctttggtcaggggttggggaatgtaaaagagatcatcttattagctgagatgtagtgtgtaaattgaaggcaaaggggggattgggaagatttctctaaggaatctcgcttttttagggaaatggttgtggaggtatcctagggagagttcatctctgtggcatcaggtcattttaagcatttatggttgcatcgttgtccttggagggctattgcacaagtctttcaggatttttccgagtatactcggtttggggtaggagatgggaaaagaattcgcttttgggaagacttgtggtggggggaccaacctttgggtttccaatatccaagactatttagaatagtcactgataaaaatattcccatatcttttattctcgggtttgctcgccccttctcttggaactttaatttccgtcgtaacctttccgattctgagatagaagatttagaaagcctcatgtgttcacttgattgtttgcgtttatccccatcggtcttagatgcgagatcctggtcttcatcttctttagggttatttatagtcaagtttttttctagccttgtcccacctttccgatttatctctagtattcccaactaattttgtatggaattctcaagtctcttttaaagtcaagtcctttgtctagttagtggcacacaagaaggtaaatactaatgacttgctacaattaagaagaccctacaaagctcttagtcctgacatttgtaagttgtgtatgaaacatagagaatcaacaaatcatcttttcgtacattgttctttgacgatagggttgtgacacaaattatttaagttagccaagatggagtgggttccctcgagaagcattttcgacatgatttctatcaattataaaggttttggaaaatccaggcatagttttgtggcatactgcgtgcattgctttaatttgggctgtgtggcgggaaagaaatgttaggatttttgaggataaagctaggaatgcagagaatctatgagattccattcacttccttgcttatctttgggatttttgctccatggtttttaagggcattccccttaatgtgttacaattagattggctagtagtgtgtagctccaatgggatggtctagctaagagagattgtttgttgttttaccttttagcttcttgtttttgtattcttgttgtttagttttctttggtgggaggattcttcatccttcttttgtacttcttatttctatcaatatatttctttgttgtttcctatcaaaaaaaaaaaataaaaaaatgacttgttgcaagtctgaggccttaaaagggcttttgttctaactggtatggccatttgcttggatagtgtgagacctattaatctttttctttactctccaatcaactcaagcttgtggaataggttattttggaagctttgtaaagactacatctattgatcaaaggccatccccttattatttggtaaattgttaaaattttctcccatgttgcttctcaagtaaagaaacaagcactcaaagggtcaaatgaaccccacacctctctatcaaggaaaagataaaaatcccttgtgcacatcaaactatagaaagacttcacttggaaggttcggggtatctatctgctttggatgtccccaaaacctttgggttctcctaggttgtttgtcaacaacaaatatttacctatgtgcttgtgtgtaggtgggtgggctcctttgggttatctatccactcaatatatttacttcttttatttatttgtgggtgtgtggaccttctgctttctttctttatagatatgacctatgtctttctttgggggacaaacctttatgtgctttcaaaagctttgggtttgtttgtttatctattgactccaaatattggatgtaaaattaaaaaataaattctttatttccaaatcagaacttgtaagtttagaataaactcagatgtgatttttggatgatgttgtgttatcccaaggtctctttatccttggctctaatgtgttttttatttattttttatatatattttttgttttttatcttcttagaggcttgtaactattcaag

SEQ ID NO: 13025 - DNA, 2636 bp, Vitis vinifera
  Intron number 2 from transcript GSVIVT01025151001 (locus G SVIVG01025151001) derived from phytozome v7.0 (chr-ID chr6 ; pos 3959478 to 3962113 reverse strand)
caaggtatcaagtctctttaagtttaacttaattggatttcgttgcacacgtatgtttttgaaaaaaatttattttgtagttttttcttctggttcttaatttactgatttgatcaactttttgtggcttgttgaaaatgaaatgcaatgctatattgtagtttttaaaggagctagatttatttattttttcagtggtatatggtacagattaatttagtggtgggtgttagtgaaattggtgtaagcatactgtttagtttattgctatcttgtaatcagctttttgttttttgttgattggcaagtaagagtataattaacagtgccaaaatggcaatgagatggagagattagcaaaaacacctctcttgcataaataaaagccaaaccaatcaacaaaactatatcgtcatcagcttatttcaacagttttgcatcattagttttgttaagaattgttaatgacttgttgatgtggttggagaagcacatagactgaaatcactaagtttttttttaaaaattttacagcttcactttgcctattattttttccatcagtttttttttttaatcaattcagagatgggtattgacaactttcatccttgtaacttcatagccaagcaatgaattacaattagattggacagtacttccaccgatgtcatgcacgccaatattgattagacatatgtttactgggatgtccacgttatatttcttttgtttcctcctttgccaattagcaatacctttttgaccttggcttcaagatacgatatgttctttaagaaagataataggtcaaacttgttgatgtccttttgaaactgccaaagaagctcatagtgtggtaaagaggcatgctatgagaattgttaaccgaagattggttattagtaacattgcatctgtcttaaagttatttctcgtcttctgagtggtcattcctttgccttcaatatttttgacttctttacgcatgggattgatgatgataatggataacaggcttagaagggtcaccgccagcattaatggttcttatagaaagagaaaaaaaatatggtggatttctagagaccaagttgttgtcgtctagaaccttatgtttttctcttaatcataggtttactaacgtgttctttttctttgattgctgccttctatatttctttgatcaacttatcaaagaagatagaaaataaatttctatagaagatttgctcacaagagtcacttgttcactgatcatcttttttttagataaaaaaattccactaaatgatggaaaaattgaaatgggactattctagttatcaaattagttcaaatgctttctaatggcattaattttctgaaaaattgatcatatcacatccactggcttttagtgtttaacagtataatttttaaagaatataattttgtgggaggggggggggggcatggctctgttacttctttgtaattgtgttccataactgcattgataagtgaacttcaaaccttttagatttcagcatcccatctaatctctgaggatttatgactaggaacgggatgaaggaagtgaaaaattaaaattgaagacagttgatatactggccttattttccatctgccaatgtcaatatgatcacagtgatggagtgttgggactgcttcttcaatattatatctgaaaatgcaaaacattgagagatcgaattaggaggaaaatagtgtgtgcttttcaaaaacctagaaaaacaataggaaaaagaagtagtttggtcaatctcaacttgattttttttttcagtcagattgtttacttgtataacagtcacaaaaagtttaggggattttactttaagaaatttactttgcaaacaggataagtacatggttttaggtttctgattttatgttacaataaggtgatgaatcgttaaaaaattgggattggcagactgtgaatcaaaatatatagaataatttgacattgttattcttggccagcactatatccttggtgagtgtcaactagttgtgtgctcatgcaatgctgtcctgtttccagctaaatcataaagttcgtttatccaaataacatatcttcgtgattgctgccagttgctaaactagcttagatgatgggtggtttagctggtgttgtgacagcatggcaattattttaagtacacattgttgaaattagagttgaactcattattttgataggcctgagttggcaagggtttcttttttcctgtcattgtgagcttcaagctggcctgcagcccagcctgcttgggtttcaatttcaaatgctttactgaatgcatttaatggttgtgattaaaatgatttggttttagaaatgctgtttattatggttgatctaatgctgcaaaaatccctctccaatcaggaattctttcttttaaccatagaaaatttcctgaagctaccactggaacagtgctactcatcttatgttgggtggcttttgattcagtactgtgtatgaccacattgttaggaatggtggtgtgattttctcctttgcagtgggtttattggcaacactttttcattctcatactgtaggacaaattggcatattttcgaataaaggagctcaa

SEQ ID NO: 13026 - DNA, 3447 bp, Vitis vinifera
  Intron number 1 from transcript GSVIVT01029120001 (locus G SVIVG01029120001) derived from phytozome v7.0 (chr-ID chr1 1; pos 19412745 to 19416191)
gaatcgttgggaggtaagaattgattttttgttttttatttcctgagtggaaacgaatgtgaatctattatgcgattttatgctgaatgatcgtcaaattagtggcttgaagggagtttattttttcgagttcgaactgcttataagcttgctcaaggtctgtttgagttgatgggtccataggtgaatttgtgcagttgacccgctgcttgtatgtctatctataaattagtagatgcgtaatacaatttgagtttccatgtgaaagaatatgattgatatgttgcttcagcttgggtcaatgtttcataggagaaggggagaagagctgcttttacgttagttgtcaattatccaacttgcctgtcagcaaataaaaggcatatagtactcttgccttacgatatttggctcgcagtttaagttcgaagtcctactcagaaaagtaaggtcttaagagaaattctaaaaaaaaaaaaaaaaaaaaatactaacttcatgaataaacagtaatgataacaatgaatacccaaacctatctttaattaggcatttatacactttctagaaataagaggaaaataatgatagctataattggatcagttacctaaagataaacacggagacaatacaataaacctaaaaaggtaagatacctaaaaataggaaacctaaaaagtgggaattattgaaaaagaaactatttctaattcagaaaaatctaatcttcatgtgccagggctgcatgtgctgtagaatattgattatgatttcaatcattttagcaatattttgattaaattggagactatttaatttactattttgatgattgagatgtgttttttgatggcccaaggtgtaaaaatcttttttgataaatcaaaaagattcctcaataaatttagttgaaaaatcattatggacaattgaatggttcaatcaaagggcaaatttctcaaaagtaatttaaatgcaattaaagcagtctaagggtgaatctccatgatgaactataggagggggggggaggggtgtgcgaataggtgtttttatacaaattcaagaggtaccccaccccaaattatctatccttagaattttttcagtttatattattgtcttctaactactcttcaacaaaaattaaaaatcctatgcaatcatggacgcaacaacactcttccaacaatttgtaaatgtaagttacatgcaaatgcttcaccacttcccaacacaacttcataagaaacaatttcctccttaacacatttccgcttactacttgatatctttatcaaattgaacaaaaaagatattcaagatatccaacggataatcacacctattttagctcttttttcatccatccaacatatttttttttgatgaataaaaagcaatatattaaaagaaaaaaggcacatcaaggacgcgccccaaagtatacaggtagtatacaagagagagaaaaaagaaccccttaaacagggcttaaccagtctacaaaatctacaacggaaagggggccagagtaaaaaaaaccccttagtccacgcctaaagattacaaaggaaaaatgatttacacccctgaatcgaatgccccttgttttcaaaagccatactgtttctttccttccaaacaatccaaaaaaggcacaagagagctaaaaaccacactttcttcctctcctttcccacacaaggcccaagccaccctaataacgcctttttaactgaaaagggaagcacccacgaaaccctaaaaagagaaaaaagtaagctccataaacagaagatctcaataactgaaaataaattaatgagtagaatgagataaagagagataatgatactggattttacatggaaaatctcctaagagataaaaaaccacagatctaccaacaatcaaacttccactatgaagaacaactgatgtgtacaaggatttacttaacgcaagtccacctatccttcacgtactacttgaccaacaccttctcactttagctacatgtctttatcttccagatcatacttagattgcacaccaattttgatcttggcctcttcttgaagcttactcaagaagaaaatgagttctcactcaccaatcaaatgagaaaatgaggatgaatgaatgaaaagaatcaacccatttttaaaaaattccgatgtaaaaatgatttggaaatcaaagaaaatgatgattttcttggcaaccaaacacccctaatttggcaaaaagagagagcttaagaaggatacaaaaaatgactgcaagtctctctcctcaaaatatgtagcattttctagtttaaaaggcaaggagcccttgatctaatggctaagaaaaaatcaagcaaaaagaaaaaattggatcgatcttacccaaatttggatcaattttggaatagggcacttaaacacttggtaaaaaattgcttccctagcctccctaactccttaaaaaacattttaagacaaacaacaatttgaaaaacttttcattcagtttcatccatttacaacctcaactacatgccttggtctctttgtaaattcaacatcttgatctccattaaacaagtagtttgaggaaggattcaggaaacctgagttaggaaacatttaagaattattgttcagaattgcctacttagttaaacactcaaatagcctttcgaaacatgcttaaaatcattttaatatttccatgattgaaaacaaagtctcttaccattcctaagtgtgccccatggacagttttgtcttgaggtaaaattatgatcttcagttgcaatgtctttaggctctaggtgggggaattggatgttcaaaagatgaattagacacactagtcagaatatattttgggatgaaattgccaacattagaaactcaagtcacaaaatattctggtgcagggagtggccaacccataaatattaaagatatggaatcttagactcttagtacattgtaattccaagtaagtggaatgtggttcaatcaagaaataaataaaatataacaaaaatattaaaaatctatcaagtagtgcaacataaattaaatagctatttcttaaatttgaaacaattggacacatggcatacttctcatgggatttggcatagaatggcagcaaaagatgcactttagattgtgcttggttcatgaggtggatgcttggtgagaccttgagccataactgtattagaattgccttccgttgatgtgaggcttgggtttatgccaacataattttttttttccaaaccccgcctcagaccacacttttgaaaatatgatcctctattgaattgttggatttcataaatttgattttggatatcctactttgctgcctatgacttatctggtttttttttttgtttcagtgctgcagattggaaatacgcggcagagcaatttg

SEQ ID NO: 13027 - DNA, 3181 bp, Vitis vinifera
  Intron number 5 from transcript GSVIVT01007671001 (locus G SVIVG01007671001) derived from phytozome v7.0 (chr-ID chr1 7; pos 10622076 to 10625256 reverse strand)
aaccaaaactcgccaaaagatttggagaaaataaggtgatttctagtgctgacattgctactttgtgtgctaactccattaatgatagtgattgtactttggaataattttaaataaattcttgaatggtggtattattgttctgaacctaaatttgtaaatttcatctgaaaaattcttacaatagtgttatatggaaaatttatcttctggtttcagaccatccttgtcagatatttgccttcaacgacattatgtaacgtctcaactcaaagtaatatttgaactgtagctatctatttgcctcttgccctcattggatcctatccttacacgtcagtaaatctttttaccaaatagagctttctaacaggtgaagacaatctgctattctcaatcatggaattccaaataaagatcacatttcaacttggtaatcactggtctgttttgctgaggaaaaactttatgataacaatttggctttgtatcttctatttgattggttatgttgcttcttggaaaaatgaattcgctgtttttgtaaattttttgatgacctttagcttctcatctgtgataaacaaaagggccccttctcttggaactttaatttccgtcgtaacctttctgattctaagataaaagatttagaaatcctcatgtgttcactttattgtttgcatttatccccatcggtttcagatgtgagatcctggtctttatcttcttcagggttatttatagtcaggtctttttttctagccttgtctcacttttccgatttatctccagttttccctactaagtttgtatggaattctcaagtctcttttaaagtcaagtcctttgtttggttagtggcacacaaaaaggtaaatactagtgatttgctacaaatgagaagaccctacaaagctcttagtcctgacatttgttagttgtgtatgaagcatagagaatcagcaaatcatcttttcctacattgttcttggatgatggggttgtgacacagattatttcagttagccaagatggattgggttcccttgagaagcatttccgacatgatgttcatcaattataaaggttttggaatatccaagagagggatagttttgtggcaaactgcgtgcattgctttaatttggtttgtgtggcgggaaagaaatgctaggatatttgaggataaagctaggaatttagagaatctatgagattccattcacttccttgcttctctttgggctttttgttccatggtttctaaggacattccccttaatgtgttacaactagattggctagcagtgtgtagctccaacaggaaagagagattgattcgttgtttttacattttaacttcttgtttttgtattcttgttgtttagtttttttttggtgggaggattcctcatccttcttttgtacttcttatttctatcaatatatttctttgttgtttcctataaaaaaaaaacaaaaaacaaaacaaaagggtctatttctctttcttatgatatagttgaattgacattatgctatttattgagggaatgacgagattctctctcttctatgttttgtggatttgtctattatatttactatattttatttaatttttaaaatattatacagtgcacaggtgggccaaagaaatagcgtccagtaaccagcaacccttgcttcctttctcaaattcttatcatttcacaatacatttctcattcaacttcaattattgcaccttatgtgatatatttctaatttattttataacacctacatttcttgttcagcttccttctctttatcattctaaatgttagcatcacatgcatatcacatgtctccatctagtagtttcattaatgcagttctatttttgacttgcatcattatatatgaacttggagtgaatagatgggtgagtaatttcatgtgcctggcaatacccaagttcagcttttgttgttcaggattgaaattccatcatttgatgttttctggttcattgatttaaactcggtgttggttttcctactttccattgagggaatttgctacttgaagtgctcagatcatttcttacaagacattctgtgtatcaatccaagttattccaaggaggccattatagacattctatgacttggcaaattcatcttctatactagggtggatgtcggtttgtaccaaggaatctttttgggagttaatgtagttgggcctttgctatgtgccaaacaaaacactagctattaaaaatttatatttcacagttacaaaataagaaacttcagttttgatttctaaatttagcatcgacacttataaagagggaccatgtatgtgtcagacttggacactccagtgatccagggttgtagaaaatatttattttttttgcttcctataaatggaatatgtagatcaaacatttggtgcacaaggggcactcagggaaaacctatgttaagataggagtgctatgagttgcatttgttatgtaattatatataccctagtgtttgtatgaaagaaaatgtattgtatgctttgaattggacaaccataatcttagttggcatgtcttctgttgaatctttggcatctcttcaagtttgggtatcctggattctcatgtgcacaaccttggtttccttccaacatttggagtcctctccgtgtaagctttaatgtcctcattcagcagtcattcttgttcttaatttgtactctagaaattttatcttcaccttctacatttgaagctccgttgtgtgaaaatcttaaatttgcttcacagctctcagcttcccagttcaccatgttgctgtcttatctacttgtgtttcattttcattttgatgcatatcattggtatccatgctgttcttggcctgtacactcaatggtctttttcttgttgctgcaattattgccaatatagaccttcgagcatgtgtttggaacttaagcagaggaaaaaaatttctagagtgcttgaacgctggagagagattatatttcattttggttccatggcttagtctctgtcccttgctttattgtttggtttttgtatcgaactttccattattagtgtaaacttgtatggattatatttgctttttgtttgatggatatttctggctgatataaaattttcaggaac

SEQ ID NO: 13028 - DNA, 19344 bp, Vitis vinifera
  Intron number 6 from transcript GSVIVT01037421001 (locus G SVIVG01037421001) derived from phytozome v7.0 (chr-ID chr6 ; pos 14040587 to 14059930 reverse strand)
gattttctctttttaaaggtagtatatcatagtttcctcctatatgccaacgaagacttccatataagcctagtttatttcactagaatagtagaaacactgattctgtgaatgaagcctgatggatcccacgttttagaatttttttatattctgggttccctttcaatcttgattgggattggaataggaataataaccaagtatttagaaaatttgtcagtctactaattctagagcaatattataatctttatatggctccagaccagagggagattgcaaaatagtgaatctttcatagaactttaacaccttgatgcatgcagttgatacatggataaacagtgatatatatatatatatatatatatatatatatatatatatatatatatatatatatatatgtatgtatgtgtatattttttttacatgagattctgcattttatcactttaatgtaaaccatgatagaaattatatgtggctcttagcatgcttcataaagcctggcgccacttcaccttttgactcacaaacacttcttttgcacaatattttttaattagagaatagtagtggcatctgtgttcctcagaagagcctagtttgagcactcttgacctacttatggtctggaaggtcatgttgtttatatatattgttgatctgcatttcacttgttaaaatcctagaagagggattttgttatgttaaaaatttgaggttaatcttgtagtgatgaagcctaggaagtggctaatttttttgatccatgaaagaatttcccctatttttgtgtgcatacacacacgctcatattgcctaggttgaccaatttttcatttttgtcctgctttctttagggctctatagtcttcttgttggagatttcttggtattattatcccttatttcttggtattctaggatgctctatcttggaatgtcagaggggtaaatgacagtaataagagaagggtcattaagtcagtcataaaatcccaaaaagcggatgtggtttgtttgcaggaaactaaaattaaggaaacgagtacggggcttgtccgtagtcttggggtgggaagacatctagaccgaagagcagtcaattctaggggtgcaacaggaggtatactggtgttttgggataacagattggttgaattggttgatgtggaagagggggagctctcaatttcttatcggtttaagaattgtgtggatgggttgatgtgggtgttcactggtgtgtatgggccggtatgcaatagggataaagaggaattctgggaggagcttgggtcaataaaagggttatggaatgacccttggtgtgtgggaggggatttcaatatggttatatatccaggggagcgtagtaagggtggtgggctttcggcttcaatgaggagattttcagaagtggtagaggatttggagctaagggactttcctttaaggggggaccttttacctggagaggcgggttgaataaccagtcccactctagacttgaccggtttttagtgacagataactgggataacatgtttaatggggttatgcaggggatccttcctagaccagtttctgaccactttcccattctcctagaaggtggaggtatgaagaggggtccttccccttttagatttgagaacatgtggttggaggagaaggggttcaaagaccagatgaagaagtggtgggggagtttaaattttatcgggacctacaactttgttttggatgcaaaattgagagccttaaaagatattttgaagacttggaataaagaagtgtttggtctcattgatactaaaaagggtgaagctctcaaataggtggagtattgggatgaaatggagaaatattcagcttaaatctggaagattgtgaagctaggaaggaggctagggagtcgtataagacttgggtgttgagggaagaaatctcttggagacagaagtctaggtgatgggggaaagccttttaaagtttattcaaggaagaaatggaagacctaagtaaactttaagtaggattaatattaattagaattgaattgggattggtatttgttggagtctaattaagattagctagttgagttataatatagttagaattagaatcataataggttattagagtcctagaagactttggatttcttagataaacctataaatagactaatcaatgtaaatcaaaggaatgaatttatgaataatattatattttctttcattgcaaggttgcaatcctcaatggtgagactccattgattttcttttaggtgagactcctagaaggcttagtgagactcttaaggttttcaatcttttcttcattgtttcttctttctctctatttcttatcttataattttctctaccataaaatttattctttgttcctctccttacaccctaaaaaaataaaaccctagtccacctactcttgagtgtaggcaaccatcctagggttgtcctacatcaattttggtatcagagccaaagttcttggcttgaaggcatatgcaattaaggagtggagcaacttatgccagcatgagttctaaaaaaacttctaacaatcaagatgccgctacaatacgcttggaggaaatttcagccacacaacaatcccatcaagatgctataatacaactaaatagcaaacttgatgagatcatgaagttattagaaaagagtcaagaaaaatgaccaattgaagagaagattgcaagtcatcaatttagacaatcgccaagtcaatcacgcgaaaaacaagacaattttatgatggggactcaaacaagggctagactttttgagctagatgatgatgtgactaaaaaggtacgtcttgaagttgctgaatattatggaaaactaaatctagcagcttttcttgattgaattatgtcaatggaagattactttgattggtatgcaatgcccgaaaatagaaaaattcgttttgtgaaggcatagttgaaaggagtagcacgtctatggtggcaaaatatttttttttttgattggaaacgacacaaagatttattgatagataaaaataactacaaaagaaggatgaggaatcctcctgccaaagaaagctaagctatagaaaaatacattgaaaaataagcaaacactctaaaaagaccactccttatggagtacacgttgctatccaatcaagatgtaacgcattaaggggagtccccttaaaaaccttggaacaataagcccaaagagaagcaaggaaaacaatagagtcccatagaaactttgaattccttgctttatcctcaaaaatccttgcatttctttcccttcacacaatccgaataagagcgatgtttgcagcttgccacaaggctatccccctcttagacgaaccaaatccattgaatttgatgtacatcatgtcaaggatgctcctcggggggacccaatccatcttagctaactgaaataacctgtgccataaccccatcgtcaaggagcaatgaagaaaaatatgatcagctgattccccatgcttcatgcacagaatacaaatatccatactaagggctttgtagggtcttctcacttgtagcatgtcattagtattcaccttcttgtgtgccactaaccagatgaaggactgcactttgaaaggaatttgagaattccaaacgaatttagaaggaaaaacctgaggagatccaaaaaattgggataaagctagaaagaaagatttagctgaaaaaagccctgaagaagataagggccacaatctggcatctggaaccgaaggagataaatgcactccatcaagagatcgcatgaggccttctaagtcctcaatcttagaatctgacaagttatgacggaaatttaaattccaagagaaaagacgagtaggaccgagaactgaagaaataggtatgtttttatccaagactactctaaatagacttggatattgggatcccaaaggttggtccccccaccacaaatcttcccagaaccgaattctttccctatttcctaccacaaatcgagtaaacgaggaaaactcctgaaagacttgagaaatagccttccaaggacagcgatgtgaccatctgactattgtgttggcatcccaaccattggagtgtgaaccatagatgcttagtatgacctgatgccatagagctgaaccctctctagggtacctccacaaccatttccctaaaagagcgagattcctcagagaaatattccaaaaacccaaaccccctatttccttcggtttacacacgacatcccacctgactaaatgatcctttttgccttccccaatccctgaccataaaaaatccctctgcaacctctcgattttagcagctactgaagcgggtaacttaaataaagaaagaaagtaacagggcatatgggtaaggcaagattggatgagagttatcctccctccgaaggataggtatgccttttgccaaccatctaatcttcttgaaattctctcaatcacaggatcccaaaatccacctgccctggggttcccacccaaaggaagacccagatggagtataggccaaccagaagccttgcattcaagtgtctcagccaatcttgaaatatgagcttgatccaaatcgataccataaatattactcttgtctaaattgaccttaagtccagaaatatgcccaaatgctaacaaaagactcttgagagtctgcaagtcttcctccctagtgttaggaaagaagatggtgtcatcggcaaattgcaaatgagataccctagttctgtttctacccaccttgaaactctccaacatatttctctcctctgctctcaaaaacatcctactcaatacatctgctactaaagtaaacaaaaagggggataaagggtctccttgtcttaatcctctcgatgccttaacccaacctttagcgctaccattcaccaatactgcataagatactgaggacaaacatccactcatccatttcctccatctaggactgaaccccttcttctccaacacttgatccaaaaaatcccacctcacgtgatcgtaagccttttcaaaatcaattttaaagacgacaccttcctcccctgatcgtcttctctcatccactatctcatttgctatgaggactgcatccattatttgtctcccttgaacaaaagcgccttgagtagaatggatggtttcatgtaagacccctcttagacgccctgagagcactttggctattatcttatagagactagtgatcaaactaatgggtctaaaatctgagattttctttgtcgtactctttttgggcagaaaaacaatgaaagaggcattagtgctttgattgataactccgctcctatgaaattctgcgaacactctcactaaatcctccttaatcacatcccaacaatcttggaatactgcaatagtaaagccatcaggccccggagccttgtccctatccatctgaaatatggccttataaatctcttcttcagtgaaaggggcatccaaacttattgcactttcttccgaaataggggaccaatctaatccttcaatactccaagactctcctataggattcgcgtagagtttttcaaagtaaagtaagatctcctctgtgatgctctcgacattattcaacactaaggccctttcattttccaatgtcttgatatacttcctatttcgcctaccattagccactttatgaaaaaacttagagttgcaatcctcttccttaacccatttcaccctagctttttgtctccaatggatttcctccctcaaaattaattcctctagctccccttttcttaaggctctttgatctaacaattcagaggtgagacccccatcctgctcaatggcgtcaaagttagctaaatccttgaggatactttttttcttttcattaagctctccaaaagaaagcttattccattccttcactttggctttaacaaattgtaatctcctcatgaacttgtggccttcccatccgtttccttgaaaacccctccaccaatttctaaagttctccttgaaactaggatgttgcagccacatgttctcaaatctaaaaggagttgggccccacatgaatgggttggtatccaaagcaattggccaatgatccgaggtccttctgataagggtttcttgaatgccttggggaaagagctgcccccactcatttgagtaaagaaaacggtctaatctcttacacacgggagactcttgcatatttgaccaagtgaatgatgcgttccgaagaggtggatcaagcaattcactttctctaataaaactatcaaagtccctcatgcttgaagttagcctagagccccctaatttttctgaacttctccttatgacattaaaatcaccgcccacacaccacaacgggaaagttagaccataaatgtcataaagttccacccaaaaatccttcctaagtgagggactatttggaccataaactacagaaatccaaagaggtccacagccctccaaggcgaacttgaccgatatcgagaaagagcctaataccacctcctccttgcacaacttttttgagtcccaaatgaacaaaatccctcctgaagccccacacgccgggagaataacccaatccttatttctgaccgtccagacactgcccactagccttctgtcgcacttctccttttttgtttcctgaatcatcacaacatccgggttctctaacctaaggaaatctttaatcacccttcgcttattacttgaacccaaacccctaacattccaactgataattttcatggaaaacactcaggccctaaccctccaaaccaaatccacctggattcaaacgcctatggacctctattcttcctcctagagtacaccttaatgtccagagagcataggacctctcgcactttagccattttcctaggggacatgccatctataagaaagtcttccggcggggatgcctcattaacccccggactgcctggcatcaggttagaagacttcccaggggtagatctctcggacatctggttagaaacagctctctgattctcctcctcaacatggacagggatgccaacaaaatttaaggggccaacatcgcctatttcaggaaaattttaaatttaccttgatttaccgaaggagactgggaaagaatttctgaatatgggagatgaggaccggagggacatggaagattcttttccagattacaggaaggatagggataaggctcgggtggctgagaagaaaaaggctgacttacctccaagttttccactcccggaatttcacaatttcctccccaaatgatttctttacctctggttcttggaatagaaggtgacaccgtgactgaagaaccacaaggatcgtaccccgctcggcccgtaaatcctcctttgtcatctttgagttgggatttttgcgattccatctctcctcttgacgtcgaggtttcttccttcgaccagctgttgcatttccttggtagaagacaacggaagatgggactctctctgatacctcgtatctgttgagatcccatcccgccatccacttccagattgcggacttcgcaaagtgacgctgcgctccgtaggggaagagtcttgctgctactccgttgtctatgacggctagccacgcttggaaggaagagtttggaccacatctcccttgaatccatcgtcttttccccttatgtgaagtcttccatctgatccattggagctttcccctttctcgctgcgctttctccctctcgagacctatatctcatgctagacgacatcgatcctccttgaacttggcccaaccccgacgggcctaatgacttacagcccatagtccgacgcccataactcacctcttctgtctctgaaggtgggctagggttggatgaagtctgggcctgaaactcatcggctcgaccatcctctccaagtattacctcgacgtcggccctctcatcgcctgaacgaggctgcgtggtcgcttttgcagaggagcctgctcgctgtggaaaagaaagggatgttgctgcgtcatgggcttgagggacgtctgggccagcgtgaagcccacgactccttctccctttttgggcccttactggatgggctttagtagaagactcaggcactatgggcccaagaatgtcttcttctactaagcccaatctgcgcccttcccatcctttctcccttttggtcgccatgcttgtactcgaacaccgataacgtgcccagggaagaagctccctactgtagcactcattacccctgatactacctcgtagcccctcttgcaaattttggcgtctgagagacgcaacccccttctttcaaccactcgtacctacaatgggatgtctcggacgtgacattgccatcttcgccctcttctccgatgactgaaactgctactgtatgtttccaggccccgtcttccacctcaagcaacgctggaagcacgacattaggatgcatctccacccacagcttcaccttcgtcaagtccaacagcttcacggcttcccttgctacctccgtcaccctcccccacttcttcaagatgaatttcagttggtcttcctcccacaagtgaaaaggaaggcctttcaacactaaccaaccccttctgaattttccaggaataatcatattttctcttggcgaccatcttcttaggagaacaagccttcctttcactaaaagtctctcctgctcttgtaaccattttgctcttcctgctgtactcacaaagaaacaccccttaaaggcggaaatggggtttatagacaccatacctttcacacccaacatcctcgcaatggccttgccttcatgagtccagtcttgaactttttctttgcattcacatattacggctctaacccattttccagctgataatggaactccactcctaattccatcctctgcaaccacctctgcgtatgaccgaccacctctatatatgcttttactcatctgattattgccaaacatcttcttcagctcttctccgacttgatcagaataatcttgcactgaaagaatcgccctcctaaggacttcccatccactacctttaacaccctcggggatgacaagaagtagaggtttccttcttgtagcaatctcggtgattttcatgaatcgccctctattgttgaagcaaatctccatcaaatgaatcttattctcgcccctgaactttcgtgtaaatcccctggtattctccaactccatagctttcttcaagtgctccgttaaccaatccacctcctcccttccaaatcctactgatacaacaaaaccacggctcctttctgttactgatacccaagttccaccattcgatccttcaaacttcacctgaaaagactttttttccacttcaaacttttcaactttgcacttcatcatgcctcagatcaaagcagaataacttgttctcaagttattttctggcagcagctctttcctctcattgttttctaatattacttctatggtggcataatattgagaatcaagttcatagaattggccaaccacctattgacacatgggacgagatgaagttgaagatgaaggagcactttctcccaagtcattatgaacaacttatgtatacaaaattgttttcccttaaacaaggtaccaagtccgttgaagaatatacagaagaattccatgaattgagcattcgaaatcaagtgcgggaaagtaatgctcaacttgcagcccgctacaaagctggacttcgaatgaagattcaacttgcgatgatagttgcacacacttataccgtagatgatgtttatcaactagccctcaaaatagaagaaggcctcaaatttcgggtttccaggtgtccaagttcacaatttgggagcattttctccaacaagacagcaagcaaacctttaagcacatcaagcttgagaacttctaatcatgtgaatggtgggggcaacactcaacagacttcgaatgtggctcataagaatggtaataagggtaaaacttcaatgagtattggggatagaaaagtagacatgagtcctttatgctttaagtgtggtgggcatggtcattatgttgttgtgtgcccaactaaaggtttacacttttgtgttgaataaccaaaatctgaattggaaagttacccaaaggaagaagagacctacaatgaagatgaagttagtgaagaatgtgactattatgatggtatgacggaaggacatagtcttgtagtacaacctttattagctatcccaaagttaaaaggagaagaagattggtgatgtactagcattttctagatacgtatttcttgccaagggagattatgtactatgatcattgatggaggtagtagtttgaacatagcttcataagaacttgttgagaagctaaaccttaaaacaaagagacatccaaatccatttagagtagcatgggttaatgacacctctatcccggtaagttttcgatgattagtaacattcctttttggtaaggactttgaagagtatgtatggtgtgaggtcttacccataaaagtaagtcatattttatttggaaaaccttggctctttgatagaagagttcaacatgacggctatgaaaatacagatgctctcatacacaacggacgtaagaagatccttcgtctaatgaaagaagtccctctaattaagaagttagaggaggaggcacaaccaaaaaaggtacttactaagtgtcaatttgaaaatgagagcaaggaaactaaagttatttttgttttaatggctcggaaagtggaagaatttaaagaacaagataaggaatatctagcaaacgtacgtaaaatccttgatgacttttctgacttgtggcctggagagttacctaatcaacttcctcctctgcgtgacatacaacatgccattgatttgattcccggtgcatcattaccaaatttaccaacctacagaatgaatcctacagagcatgctgaattaaaaaggcaagttgatgaattacttactaaaggctttattcatgaaagcctaagtccttgtggagttcctgccctactaacaccaaagaaggatggatcatggcggatgtgtgtggatagtcgtgcaatcaacaaaatcacaatcaagtatcgatttccaattccaagacttgatgacatgctagatatgatggttggatcaataatcttctcaaagattgatctaagaagtggatatcatcaaatacgtattagaacagaaagatttcatccgagcaaatatcaaaagcttcaagctaagaaagcgggtccatttcgggtacgaaagcaggtgcatttcgggtattaaagcggttgggtgagaatgcttatttgttagagctcccttcaaacttgcattttagtctaatatttaatgtggaagatttgtatatctaccatgaccatcacaatgatgtaagtgaagagttggatcttcaattaccacctactcttagcccatgtcctgaggtcaagtatgttcttgatgatcaacttgtgtctactcgacaaggtggataccaaaattttttggtgaaatggcaaggcaaaccacactctgaaaatacatggattacgacaacggatttttagaagcttaaccccgatctttgtgaattgtatcaagcatctaactcgtcggagctgagttctttcaagcaggggagaattgatgggggaaagccttttaaagtttattcaaggaagaaagggaaaacctaagtaaactttaagtgggattaatattaattgaattgagattggtatttgttggagtctaattaggattagctagttgagttataatataattagaattagaattataataggttattagagtcctagtagactttggatttcttagaaaatcctataaatagggtaatcaatgtaaatcaaatgaatgaattgataaataatattatattttctttcattgcaaggttgcaaccctcaatggtgagacttcgttgattttcttctaggtgagactcctagaaggccttagtgagactctaaggttttccatattttcttcattgtttcttctttctctctatttcttatcttataattttctctaccataaaatttattttttgttcatctccttacaccctaaaaaaaataaaaccctagtccacctacccttgagtgtaggcaaccatcctaggattgtcctatatcactagggaattttggttgaaggagggggacaataacaccagattctttcacagaatggcgaatgctcacagtagaagaaactggctgaccaagttgaaagtgaatggttgctggcatatagaggagaatgatttaaaaaatagtgtggtgggagcgtttcaaaagctgtattctgaagaagaggggtggtgtccttgtattgaggggttgtctttcatgcggttagtgagcagtaaggctgaggggttggagattcctttttcggaagaagaggtgtttacagcacttacagatctaggcaaggacaaggcccccaatttggatggctttatcatgactttttggttgttttgttgggatgtggtgaagaataagattatgggttttttttagagaatttcatgagaggagcagatttgtaaagtcactgaatgctactttcctggttttagttccaaagaagggaggtgcagaagatctaaaagacttcagaccaattagccttgtggacaacctctataagttgttggccaaggtgttggctaatagaattaaaaaggtgacggggaaagtgattttggagtcccaaaatgccttcgtggagggtagacagatgttggatgtagttttgattgcaaatgaggctgtggattcaaggctgaaagacaatgtagaggatgtgttatgtaagttggatatagagaaggcttatgatcatgttagctggagttttttgatggcagtacttaaaaagatgggttttggggagagatggctaaagtggctagaatggtgcatctcttctgtgaaatattctgttttaataaatggttcctcttccggttttttccaaagttgggggttgagacaaggagatcccctttccccttatttgttcgtgatagccgtggatgtgtttagttgcttattgagaagggctattagtgggggcttcttatttgggtggagggtgagaggtaggagtggttaggggattctaatctcgcatttgttatttgcggatgatacgttggtattttgtgaggagtctttagaccagatgacttatctaagttgattcctcatgtggtttgaggcgtgttcagggttgaagatcagtctagagaagggtgagttaatcccggtgggtagtacatgatatagaggacttgaccttggagttgggttgtaaagtgggtgggcttccttcctgttatcagggtttgcccttggggacccccttcaaatcaatggctgtgtgggatggtgttgaagagtgttttcgtagaaggcttgcaatgtggaagaagcagtatatttcaaaaggagggagactcactctaatccaaagcactcttagctagtatgcctatctactttatgtctctcttctacttgccaagaaaagtgagactgcgtttggagaagattcagagggattttctgtggggtgggggagctctcgttcaaaaaccacatcttgttaggtggaacttggtttgcttggataaaaagaaaggtgggttgagtataagaaatttagctctgatgaataacgctctcttaagtaagtggaattggtggcttgccaatgagagaggttttttggaggcgagtcatcagtcacaagtatggtgaagaggaggggggatggcgcactcgggtagtaagtgggagatacagtgttgggctttggaaagcaataaggaaggagtggttgattttaaatggtagtttgacctaccaagtgggtagtgggcagagagagagattctggacggacaagtggtgtggagatgagccactttgtgagtcattccctgctttattttccatctctttgtctaagaatgcttgggtatcggatgtctggaatcctgttggtaatggggatgcaaagggttgggttaaggcctctagaggtttgagaccccctctcttctttcctttttactttagtagcagatgttctaagtaggttgatgtttagagtagaggaactgggctaattgagggtttctttgtggggagggataggactagagtgtctttgttacagtttgcagatgacaccatctttttctctaaagcctctctggaacatcttcaaaacctcaagattatccttttggtttttgggcaagtatcaggtttaaaaatcaacttagaaaaaaagcaccattttaggtattaatactgggcagaagttgttgtctagtttgacctcggttttttattgtagagtgtcagagtggcttttgtctaatttaggccttccattaggagggaacccaaagacaataggcttttgggatccggtggttgagagaatttcgaggaggttggatggatggaaaaaaacctttttgtcgctgggagggaggattactttaattcagtcaagtctgtctcacatccctagctacttcctctccctcttcaaaatcccagcatcaatagcctcaaagattgagaagttacaaagggattttctttggtctggggtgggggaagggaagaaagatcatcttatcagatgggatgttgttagtagaccaaaggagttaggaggtttgggttttgggaaaacttctttgagaaacattgctctcttagggaaatggctttagaggttccctagagaaaggagtggtatttggtataaggttattgcgagtatttatgggacacatcctaatggatgagacaccaacatggtggttagatggtcacacagatgtccttggaaggctattgctcaagttttccaggatttttccccttttgtctgcctagtggtggggaatggggaaataattcatttttgggaagatcattggtggggtaaccaaactttgtgctctcaatttgctggactttatagagttatttttgtgaaaaacctcactgtctcaaatgtccttgacaattcctttccactatcttggaattttaattttcgccgcaatcttactgattcagaaatcgatctccttcagagtttaatgtccttccttagttcagtgcttttctctccttctttgacagattcaagagcgtggtctttgtcatcttcaggcttattttcagtgaaatcttttttcttggccttgtcaaaagtctcaaatcctatcttgttccttccggccaagttcttatggagttcaaaagccccttcaaaggttaaggccctcgcttggttagtagcacatggaaaggtaaacaccaatgacaagttgcaattgagaagaccctacaaatccctcggtcctcaatggtgcattctttgcaaaggaaatggagaatcaatagaccacatatttcttcattgccctgttactattggactctggcacaagttgttcaatctagcagggttggcttgggttcctccaaggagtattgaggacatgttggttattacttttaaaggcttggggaactcattaagaagcaagacactttggcaaatcgcttgccttactttgttatggatggtatggcaagagagaaacaataagatctttaaggataaggggagaacagaagagatgttatgggacttgattctgttctattcctctctttgggcctcttgtactgtaacttttagaggagtttctctaagtgttttacaactcaattggactacggtttgcgcttcaaaagtttgagagtgttggggtttttctgtgtttttagttttctttagttgggtgttttctcttttgtttcagtttttattttgtgggaaggacctctcatccttctcttggtttcttctctttctcttgtatctcttctttctcctgtatcttttcctctattaatatacttttcttcgtttctgacaaaaaaaaaaaaaaaaaaaaagggatggttggacctctctttttgcaagggcgcttaatgattgggagattgagttggtggagcattttttgtataagatccaagcctttcgagtgcaaagggaggaggaagatagagtgttttggatataatcaaagtgtggcgctttttcagtcaagtctctttattctattttggagcccagaggttcttctgtgttccctagtgatagtatttggagggtgagagtgcctcctaaggtagcattctttgcttgggaggcctcctagggtaaagtcttaacttgtgttaagacgtgggtcctgtggaatcttcttttctccctttttggtgtgacttggactctatcgtgtacagtgaaggaaactcttcttgggtggcatggagcgtttgtggggaaagttcgaaagaaggcttggcaaatggcccctttatgtatattttggtcagtctggaaggaaaggaatttattagcttttgggaatgaggaactttcacttcaaagactgaaatattcttttgtatgtaatctttggtcttgggttagggtttctttaattttgagcccttcttctcttgtaagttttttagattggttaggctttaagtaagggaaggtgatgtgttgctttcctttccccttaggagtgtgtctttgggcttgtttgtatactccctgtatactttgagggcactgtttttggtgcttcctcttctcatttaatatacatccttttatccataaaaaaaaaaagaatgcccactattggcagatctactctaggccaaggaaggactgtacatagcagggttcaaaatctcggtcgagaccggtacgactcggccgagtcatatccgcctcgaccatggccggtaccggaccgatacccgagttggagtagaaattgtggagaagatcagatgagaggatcaaaacccacgaaaatgaaaaatacagagttagaatcctgcatcttggagttgtcggcgaggtcgaagaagcacgcctgcttgttcggatcgcccaagttcctgccggagatggaactgagcaacatcaagagcagagtcgccggactgctgttatcatcgatgttcagcaatgccgccaccgtcgcccaccattcaggcccagcttggccttgccgaacccgttcgcggtgttagcggcctggcgtcaggcgtgacgcagccccggacctcgtgcccgctcgcgccccaatcgcctgcaccacctgcgactcacccagtcgcgctaggagctcagccattgacgccgccctctcaatgaaatgggtatctttgatgaccgagggttatgggcatctgtgatgaggatttaggttttaaataatatgtttttattttttaattagattatgagtatttggtgggaatatgggtattaaataatttgataaaaattataatgataaaaaataaataataaataataggcttatatcaaataaataagaaatacaaattaaaattaatgaatatattttataagaaaaattatatttatttttttaaagatgaattatggttttatttgttttaataattgaaaatatttttaaaaaaattcaaaatatttaatttaaataattttttattaaaaaaatttactttttattattttcatcttcaataaaaaatatttatcatcaagtgattaaattaaaatatttttaaagatttttaatattattataaatcatcccaaaaatatgtttttattataatttgaataattttaatataataaaagtttattttattaattttttactctacttatttgtatttaattttttaataatttttataattttttaaaattattttgagctcttaaattagaattttttgcatatcacccgataccgatccgagataccgataccgatgtgcctcaggacctcccgagtcaatgaccgataccgcgactttgaactatggtacatagcctctgggcctcaatgccattaggtggtttcatgctccccttttttgacaatgatgccatctcaagtgcctctataccaggtgactttgtaatttgcttttctgttgtgcaagtagagatgcttccttctgaccactatgacacaaccacatgtcaggtggatctcagacataaggagataatgaaggttctgaactttagggatgttcttgtctgtgccatctcaaatggccatcaaggcatccacttctagtagtcttaggcttttagcagatgcaaggatcagttatctcttctctgtttacattggactgttgctactcacaccttaacaatttgggaagaaactcagttgttgaacatgaatgggggcctggacctattttctgcaattcggtcaaagctcacttggcaggcaagggttgtgcatgtacagcttcaccctatatgggggcctctttggcagctgccataaggaatggtttcatcagaatatgaagtggtctcatcttcccaagggactgcatccgtatccacagctcttgtactggagctgaatggaaccatgatgctcatggtcgtgcattatatggattgtcctaccccatggtgcctggccttgtatatgtggctggaccattagccatgtggatgggagaggacccagtgtcaacacatggatttctagaccttagttagaataggagctatcattttgaaatgacccatttaagaaaagaatgtcatgtgctccttctagcagtgtgtatagctatatatatatatataattctaaaaaactagatgcaattgcatgatgaatgtgcagtaggcctctttcataggaaacaatgaccccacctaatattgggtattagtgttatatattttacatgcaattccctcagtggccaaatctgggctgcttttgatattaaccatttgctggatggaggattcttaaataatgctattcttggatttttttttttttggtatacttaatttgaataatagccttgtacgacatctttgatagctgccacttcatcataggtgcatcaatgtactatctagttttctgcttaagcttctttcttttagttgcatctgcagccttcttagtcagctttttattttctatttttatttgcttatttatttatttatttttgcagaaatat

SEQ ID NO: 13029 - DNA, 1798 bp, Vitis vinifera
  Intron number 3 from transcript GSVIVT01028667001 (locus G SVIVG01028667001) derived from phytozome v7.0 (chr-ID chr7 ; pos 11870287 to 11872084 reverse strand)
tcaggcgacgtttttgcgcttctaattttcaagtgtgtaagtctgcccaattgttttaatactgtgctattttctcttgattttcttgttgtgacaagaattttcacttgacaggatcttattagattaatttagtctttaaggaatattctattattggcagcatgaattatttaaaccaaatgatcgattgctaagaaattaatcctaggaagacatgtgatcaattatattggctggatactatggtttcccaacaccatcaactgatatacatatagcctttaattgaggttctcctatttgtttggtttctaataaaatcttatgaatagccctaccattgtttggtttggttatgctataaaaattgtaatctatgtattttccttttccatctaagattagccgatctcccttgagttcccatatgcttcaaagttcaaaacaagtggctgtccatgttatcaataacattttttcttaagcgtcataccaagagttttatggaccaaataaatgtctcatgtgccctttatttgacctttggttttactgagatggcatgcttgtcttaagctttagtggaatttggaaggacatgtttctgttccagctggcatccgcaatgggctgataagtgagtagatggaaaacttaaggtgttaagacttaaatatgtttgtgcttgctcttttgtttcccttggagatgtcaccagatagcttttactcttgtttgtgaatcccttggagattgtccacaatgataggtgaggaaacctgtacacacaagcacaggcagtctagcatactcccacaccaaccacactcacatacgtattttttatgggcacaaacacacacacatgcaggagtatgataaagaattcaactcatgacttttatgaacggtctagaatagttcagtttctctattcaagcagttgaatagtactggcctccatatctgagtggtatctcatggctggactagggaaaggcttcgggttctactcttgggaaggtggtcttggtctatggggtaggtaaatgggttctctagtgctaaaaagggaggggagtgaagagctgtcttccatgtgttgtttatgtttactgaaagagaactttattctagtattattctatgaatgctaagatatttggtggaggtattatagccattattgaacgatggaaaagcagggtgtaagatgatagttgtatatttttactgcaaaaaaagtatgtgttggcaaatgttcttgctttagtagttaggtaccgaaatatgaattgggcatggtgattttgtgatgtgcaatccccattcatattgaagaaattatatagccataattttaaaaggagcacttttaagtgtacctaggctcaaggtgcaactacttcctagttatagctcctcacttgccaagacatacgtcatattgaagaggcgctttgtcaactttcctcttcctttttaaaaacttttattcatgaaatttttaattctatattgaaatttatataatttcattacttttttgtttattgtttggaatcttaaattttttattaataggattagattttgaattacattttataaaattgatatgcaccccatgttgcattacacttcactcaggtgcgcgtctctgttgtgccttatgcctaagctgtagtagacttttgtgccttttaaaactgcatatagaaacataagtaaaaatgatgcaagtatgaatttggttttttatgctataggctgtgactcgagtgaagccatatat

SEQ ID NO: 13030 - DNA, 2810 bp, Vitis vinifera
  Intron number 6 from transcript GSVIVT01017376001 (locus G SVIVG01017376001) derived from phytozome v7.0 (chr-ID chr9 ; pos 7536082 to 7538891)
tcatctccggttccaggactgtttcagaagttaaggtttggtatttatgatatccactgatgaaatgcttatactttttttttttgatacgtaaataagaattgtattaaaagaaagaaagtatacacgtcgtatacgaagaaaaaaggacaaaaaggttcgtagacacaaaaacctgctaccgcaccctatcgtgagcctacccaatccacaaagtttaacagtgataaagatccaccctcaatgtacaatctaacccaatcccaaaatagatacaaaaaagaatttttaattgtttgatccgtgctttcaaagttgtcaaaagccctccgatttttctcccgccataaagcccaaaactgatgaaatgcttatactttgtcattagtgaatattctttatactacacaaagtcaaactcttctccacgatgcccaagtttttggctaatttacacattagtgcattacatataagggattctctggttaaaactgctaatgtattttaatattcttgtctctgctttttatttttagaacaacttatgtgagatatttgtgtgatgagccaagtgaattatcagctcctgataagtctttcagttgaaaaactgttactgccacacaagtgtgaactatcaatcattatgcaaaaccatattcagatttgggttaattagaaagtagaaatagtagaaaattgacacaagagtataggaaagagactgcaagaattttatgtggttcactcatttatcagtctacttccatgggcaagtggataagcaatcttcattacaaatggagatcacaggaacatggcttcccccaaatctaattaaacaaattttgaagtgatttcttgaaggaacaccaagctaaaactcaaagaatcccaaaaactaaataaaaatttcaaaaatctcacgtccaatgcttgtagttgcaatcccaagtcccaagaaggcaaggtgtcgctccttcaattcctacaggaaacctttcctgttaattgaaaaatagaagaaaactctaagaaaagaaactgaactagattgggacttgagatcaaccctaataaaaacaagtgataccttattgttgctactaacttatttggaagtataaacttttgattaacctgaatccttaattgtgctttttgcctactaacacttgttcgcataatataattacaagtttttttctttcttatcgtgcttatgatgatggcataaagaacatcatagaaagcttgaatattgtggattagttgaagaaccaacctgtatccgatttctcggcataatttttacaacaaatcaaactaaatttacagttgtacacttatccctaaatttaaaatatacaacaacttatccctaaaaaataataacaaattatccttaaaaaataggtagcaaccatattagaatttgtcttatttgattgagattctcaacagaaggtcatcagtttcgacaaggtcatgagtttgaacctcatcacatgtttatttcactcaatttattgagcctttatgtaagcctaaagaaggctgctcatgacacaaggtgttaggggcctttgggctaaaacctaaattaacttgataaacaatgttagcccactatttaacaatttaagctcttaggaaaattggttaactatattaactatttaatgataaatgattaccttatcatctgtttattttacacatgatttacttaatctatcttattactttgcacattattttcttaatatgtgttttaaagataaaaccaattcacttttcttttattcccctctcttttctatccatgaattaatggttatttgtacttttgtattattggcatgttgaagcttataccttaatatctctctctctttgatggatactgtactctctcctcttcctccttcctctcatgctattactaaattactcacataaatcttgcttgggtgccttcaattccatttccatccatattgattgacatgactcgtgattattcaagatgctttctacattcaaggattcttcttgtgtggcaaaagataagtttgctttgtgttgagtaatcaaatttcttaaaaacttaagctattagaatttgaacccacagcatatatcatactttaacaccccaatgtgcaactctatgtaggaggcataaacatgggtatctacagactaattcaatttgtgattaatagataattagacatataaatagatggggagaatattttaacttgagatgtctagttaaccagtgctttaacaccaagttgagtaattaattttcctaaaaacttaagttgttatgatttgagtccataatgtatatcatgctctcacaatgtgtataatgaaataagaaacaattgattgatgaatctaggcataggtttttatatctttttccattaaaattagtgattatcttgatagtatttagtttaaccttttactgacattattgtgtttgattgtgaaactatatagaaggcatatagtagtcaaatcataccttttttgtgaaatgatgtataatgcaatatcatttcctttatcttctttcattttttttaaattgtttcatttctttgttttcttttatggttgactaataccctttctttcactctatattatgaacattaactaaaagcttgcctatgaacttcttttttctttaattttttggaacttatcaacactatcatgtttctttatttgattgaattaatttttctttgtataatcagaattcctctttacggtgaatttac

SEQ ID NO: 13031 - DNA, 12911 bp, Vitis vinifera
  Intron number 1 from transcript GSVIVT01014704001 (locus G SVIVG01014704001) derived from phytozome v7.0 (chr-ID chr1 9; pos 8792401 to 8805311)
cactattcctttccagagaaggttgctcggagtttgtagctcctaagtcaatgagcagtgttgagagttatgccttagtatctgctgaaagaaaggctgcaatcatcaaccacatgcaattgaagtcagcgagattactagagtgctgatgctatttttatgtttttaagtccaattctgatgctattttgtaggaggtagttgtttgttcaacaagtagcttgatttgctgtttttttgaggtcatatctgttacaatatcgtgtataaattcagccttatgatccaataaaaatatagagcagtagcagcacaactctgttctcagttgcttggtgtcttaacctgccttgctaccaacaaaatccaataaaatccgaaccaaagctcaaccatgaacaatccaatccaagcccatctgtcatgttcttctgcacttggtatatgctttagtctatacaccaaaatcaaacatattcccaaaaagattgtggaagctaaaaccttagatgcaactctaccctttacttgttttgtctcaaacagtggctgcattggcttactgccttccgcaccatacccacccatctctctgtagttgtgtctatacacaatggtgacaaatacagtagaggatatttataagcaaaaaatataaaaaaaaatgaatatggcgagtcaaggtctctcacaccgcccacattgagcaagatgttgtagcagattgatcatttgagtaattaattccattaactataatttcttggcaatggttacattttttaacacaatctatggtgtcatacgtgcagtccagtccaaactgtacatgtggagttgttgatttttgtactattattctattaaaataaatgctttataaattttcataaggtcccatgtgcttcatgctgctccggtccaaaagacccttacaactttcaaagaagatgagctttaaaactaatatgcctcggggttcaaccacatgaacactccaattgagaagataatgcagcaattaacttcatttcaacaaaataatagagccctatccatgccgcaactcttgtgggaaagctaggagtcacccaacaacacaaagctagcctggttgtattttagtttttcacaagagggagtgggtaacaatattgttaatttatgaacacaaagataaaataattgtcataatggtacatgaacttttaatgtagtttgacccatgtatatataacagatgaaagagaatcattttattataagtgaatcatttcactatatcatataaaatattataaaaaacccccctactccattggatatttctcatttttttgtcatttaaggaaatctaatattacaataatatattaatttaaaaaatattctatataatattctttaccgaaagaaatcaataataattagaaatcttaataatattcgagtcaccttgtcctacattagatgaatcccagttttcatgccccaaaagcttctcttccaactgtgaaattataccctaattaataagctctagatttttagctgatcataaccatgtgagaagttgatcctactggatggtatgaggcaaacatctatattaacatgatgccttttttatttcttccacaaattaatggaaataaattaataagcatatcaaggaaccttgtacaattggctcgaatataatagtggatggtgcgcaatactcatcattttggatgaagagagcttggtctacaggcatattaggccacaaccattaccttacaaataaaaatgtgtgtgaggcctgtagtctcccagctattttgacttccccaactaaactttcacattggacactgttaggatattaagtcttgtttatatgttggtaattttgtttcaatttatatttgatcataaaagtctttttagataatgatttgctttccattaaagattaaaagttgttgttcgttcaactaggaagtcataagtatgtctaaaaatgtttggtttgtggcaaataaggcttctttgagatataaaaaggtttggtatcatttttttaattgaaaatgttttgaaatgatttttcaaaaaaagtaggggctgcttaagcagtaaggaccactcaagcgattagccaactctaatggtaaggagtgctcaaatggagtgcttaaatgacctaagtttgttcaagtggtcaagacagtcctctcgactttagaaatagattttgaatgaattttactcaaactctaatttggaaacttaaaatatcaaaactctttgggcttttgcctgcctataaatatctttcttgtaaccccttaagggttagagattagagacctctcattcttaaaaagagtgattctttgaaagaaagcttaaatcgccacatcattcctgatctctcattcaagaatttgaatatttgaattatgagttgaagaccttaatccctttggagtgactaaatgatctattagggagcaacaaggagttgttacatcgcggatgtggatcaagttgtaggtgttggagggcaagcttttaaggtaaaatgactaggtaaatttgtgtaacttgatttcaaataatagattttaattgataagtcttagactagtgttttttatttccatagtttgcagggggttttcatgtaaaaatcttcgtgcctcattgtatatttttttattattgcttatattttggttgatgattttgataattttttttattaattagttagttggttattgagattgttggattggttatcttgcaggttatggttgttatacctatagccaatcattatttcccaactcctctcaagtatatttcatatattaacaattatattttatttttatcactaaccaattgcagggtatcttgaaaatttaaaaattttatttttatacacctaaagattctatgtataaccatttatttatctgagacatccctaatatctcttgagataaaagaatttgatataacatatagatctttatttaatttttttaaatcactcattcaacctattccctaatggattttttattgttatttaagtgacatcaaaatagtacccatttttcatacacaactctattgactgtcccaactaacttatatggctagaattatagacgagtttctagtatacttgaccatcaatcacattttttttctgtgatatactacataaaatagaataaaaagggtattagatatcctcgatgagacttgcttaaatatgtaaatacgttttaaagttatgataatttagcacaaacaatatctacacaatagatggagatccaaagtaatgttaaagctatagaatgtagtgctataaacatacaacccatttaggattaggttatgaaacttgtggtgattaagttatagtgtataagaccactagaaataagaatattctactattattcataagaaaatgaaaaggacataaatgaaaattaataaataaataaattttatcatgaaaaatttatgatagaaaataggagaggatataagaacccaacccatagcggatgtaattttgtaatttaatttaaggaagtaaaaaaattagattattttaatataatatagtcttaactttgatttaaatgtgagttgtctataattttgggtctttgaatttaattatggattaagacttaattacattggaaaataaataaataaataaataaacagtggaggagaaaatagtatttttctccttattggaattatatacatctaacccactaatttatatgttgggtttatcgtttagggggtgtttggtacacgagaatagggagtgggaatagacatctcattcattttctcccttattcctatgtttggataaatgttaagaaggcggaaatgaaataaaaaattattacggcagaaatcaaatccaacttatgagtcggatttgcattcattaaaagtaggtggtattcggattcattaaacctatttgataatataaaataacctaaattactattttaccctcttatcttgttcttcaaacccgatgtttatcttctttgcaaaggtagagatccattcatcatccacttcttatcttcttttcaaagctaaagacctactcatcatccaattctttgcaacaagtgattcttccaaattgaatcaattaaaccttccacgatattttaaaaaaaaaaaaaattcaatttctaatttatagggttttggatgttcattttgattgttggatttaggattcgtcattgtttgctgcaactaggttctgaaactcccttctacatcttcgatcaggtttaccttattttgtctttcttcttctacttctttatatgtgtttcttcttctctataaattgattaatttttttttattattaatttatgtttggaatcttttatgtttctttatcttgtattaatggaaactggagagaaaaattgaaatggttggaaaaagattttttgatttcacgtgtttacaatattgaaaaattttaatggttaggaaaaaaataaaaataaaaaaacaaacaaaaacaaaacttttggttttttttcccctttgtttattattatcggtgtcttcctttcctagttaaagctatggattatgccgtctcgcagaaaatctgctgcgtttccagctcattttggaacttagcatgggccacagtgaagatctcttcatatcattgctatttaacaataaacaaaccattaagcaccgagaaaccaacattgattaatttttttattccagctgctattaatctatatcggcctaactttaagtttgatgtagacatcccaaggaggtttgcatgatgcaaatctcccgacctaagccatatcacatcacaacaccaatgccaataaaacatgattttcatacctttccagatccaataaattattattattcttgttattgtaattattattattattattattattattattattattaacggatattattattattattattactattattatcattattactattattattgttattattattattattgttattattattattattgttattattaaggcaaattatggacattatttaaacaaccaataaatttaatgattaaaaaacccatgattgtgaggtcaaacatagaatatttaatctttttaatatttattagttgtttaaggcatatttgcctacattgaaacagtaggcagaataaacggaccaaaatttgggattaatgattcaagtaacaataaatttagaagtaatgcctaccatgattgtgaggactaccatgattctgaccatatacaaaaatgtcaacagaacatatggttatgttaaatagattaatttaatttttgctagatttcccaagcaagagtattgtaatgataaattttgcctatttgtatgtgccccacttgcctatttttttattttgttaagctactaactttcttaaaaggtatgaaaattagtattaatttggtacaaatgaatttacatatataaatttttctttgcttatagaaaattaataatgaggtcaaacatggaatatttaatatttttttgttcctattaaaaacacagaatgtttttttttcccgcctttatgattaggactcttgcacagccatggacctcattgagatggaaagaagagaacaacttatcatgattctatatattatagtgaacatacttaacatgcttactgcactttgcacgactacaaggaaatgttatcagaggcaaacattgatggaaagacttgcaaatagagaatttttgcgagttgaaaatcttaatcgattgatttatgggagtgatatagcatgtatggagcaacttaggatggatagacatactttcaccatgttatgttctatgcttcgtactattggtaaactaaaggattcaaaatatgttgatgtagaagaaatggttgcattattcttgcatattcttgcacatcatgtaaagaattgagttataaaatttcgattcttaaggtctggagaaactattagtagacatttcaatgcagtattgaatgcagtcattcgcctataaggagaattactcaaaaaaccagaaccagtctctgagaactccacagatgagagatggaaatggtttaaggtatataaattataaattaagtttatataggtttaattatttcatattatagcaatactaatgcttttatttaggtttaaattaagtttggacatattgaagttaagtcaaattattatgagtgacccaatgaaagtcaaacttttgttcaatttagatgaagatctcaaggttgaatgggcgaaacaacttcttcgaaccccatgaatctccatgttgcatccttattgatttattgtctttaggttggattgatagaaattttaggttggattttgtttcatcaatttcctatgaacttttttattgatttgatggcttaattttggaggatatactagttgtagattttagtagatatggtacttatattgagaactagaatgaagtttgtgtttttttatttccttttttgcaaataagaaataagtatttggtagctttcacaatttatatgttcttatatttttttttctcttttttttttcttactaaaatataattctatagctttttttgcatgacaaattatttaaaattttgataaaaaaaacgaatatttaaaattttttaaggttatggattttatcggatatgatacttgttgaaaattagaataaatttgaattcttttatttcctcttttgaaaataggaaaaacatttgctagctttgagaatttaaatattataataaataatatttttttgaaaaatataattttataactacttaagcatgacaaattattcaaatttttaataaaaataataattgaatatttgtgcattagggttatacgattttttatggttaattttttatttattgagtatatatatattttttagtcttattatttaataacaaaaaacctctcaatttaaaaaaaaaaaaagtaaaaaaaaaatattttaaattatatgtaaagatattattataaatttatttctttttcatttccattcctattattatcaaacattggaatgaaaacaaataatcatttcaatcttgcattcctaagttcattcaaatgttagaaatgaaatcatcaaattcattccattccactaagaaataggaaaggaaacaaaatattattttcattccctattccgacgtaccaaacacccccttaggagatttgaatcaagatttagagtaaaaaaattaatattgcttttagaaaccagattgatagataactgacattaattgattgatttcaaataaaaatatgtggttaattagtttatatagatcacaacaaattcgaatctccaggcaagaagaagatccatatcaaagtcggaataaagaaaaagtagaaaacaagatttgttggatggttagctgcttgatggtataagattaaatacttatatagaatatatatttttgggctgtcggaacaaattttattgatgaagagtgctgaatttatacatgtgcttgtaactgaaatgacattagaatagcagaaaatcaagctacaagatgatgaacaactacttcctataaaatagaaaccaaatcttgaccaaataaaaataagaaaatatctagatgttgcagattttgtgcaagactctagctacaatattcaaaattcaaattccagcaaatactaagtcaaaattcaacactcctccttgacttcgtagatgcaaactccaagtcttgtacgtagacactcaaaccaaacttcgaaaggggtctgcttctttaacacttttgttggcaatatgttcagaaaatatactgctctacttgcagttttagcccaaaattttttaggtagatatttttcatgcagaaggcatcttgtcatcttcaaaattgttctatttttcctctccacgactctattttgttatggattatatggtgcagtgagctggtgaacattgtttgcattccatttcaaggatgacatcttttgagatccatcaacatcagtatgcaccagttgcagtttttgggttgctctccaggatattttctttggaaagggaagtttagtttgcttcccatattgacaagtagcacatataggaagatctttttctaagtcaggaagtccttcagctatttgatttttcttcatgtagagcacatcatcatgatgaaagtgctcgacccttctgtcccaaaacattgttgtgctatcttgttgtaaaataacagtatgctcatcttccagtaaattcaaggcaaaactcttgcccttcatttttatgttgaacacctctttgccttcagcatccttgataatgcaattcctatcttcaaaataaactttaaattctttctcaacaagctgtccaacactgagtaagttttggtcaatgtcaagcacaaacaaaacatcataaatgagtttcaaacctgtttggctttcgatagcaaccgttcctttgcccttcactggaatatactcaccatttccaattatgactttggaaatagttgttctatcaagttctctaaagagatcttgatttgtcatgtggtttgtacaaccactatccacaagccagcttttagaggtgcttttattagcaaaacacgttgctacaaacaattgctcctcctggcaatagtcaactgctgcactagtttcttcctactgttgatttttgcaaatcctctccacatgtccttgtttaccacacttgttgcatttcacatccggtctcgaccaacatttttgtggagaatgatttgtcttcttgcaatgaggacaaggtggaaaaactccatttttctggttgttgccacacgacttgttgttgttcacctttccatttttatggcctgcatttttctgcattcttgcttgaaatgctccttctgcaatatctccttgtctcatgagtcttctttgttccacaacctccaaggaatgtaataattctgtcaagctaatagttgacagatcttttgaattctccaaagaggaaattgtagcttcatatttctcaggaagtgtaaccaatatcttttgaacaatcttctcattggaaaattcttttccaagcagcctaactttgtctgctattgaaagaagttgtgcagcatagtctttaataacatcagactccctcattttcttcatttcaaattctcgaatcaagttcatcacctggatgttcttgattctttcatctcctttgtattcctccttgagatactcccaaatttctgcagctgaatcaattttcatgattttgatgaaaattgatggtgaaactacagcaaacaagcaagctttcactttagcctttcttgtccttctttctttatgcaacttcatttgagccatagttggattggctcccaagggaggaacttcataattttcttccactgcttcccaaacatcaagtgcttgtagatgaactgtcattctaacagcccaagtttcataattgtctccatcaagaattgatggtgcaactgtgagacttgactcttccattgctaaatgattttagaaggtgtttgggttcactcacctcactggcccctcaagataactatggctctgataccactttgatggtataagattaaatacttatacagaatatatatttttgggcttttggaacaaattttattgatgaagagtgctgaatttatacatgagcttgtaactgaaatgacattagaatagcagaaaaccaaataaaaataagaaaatatctagatgttgcagattttgtgcaagactccagctgcaatattcaaaattcaaattccagcaaatactaagtcaaaattcaacactgcttaacttggttgtggcctttgggaagacagcctggcttcaaccacccttggctccaaatttggatgctagtggctgaagctagcatagtggataagagagagacacttctactgctactactactaccaaccacccttggctctaaatttggatgctagtgaatggttgaagcaagctaagtaggatagagagggagacaataagctggaaagctaaatttggatgtagtgaatggttgaagcaagctaagtgggatagagagagagacaatactactactactacttaactgggaaagagagaattactactactactacctatcaaaatatttctcgttaattcttattgagtgtattcaatccatacaacaataagagttcactagtgcattatctttgattcaatcctaaattttatttgtatcttaagagtttatcttgctgttaggattgtccttgaaatgatattcaagtgtcagattcacttgaaagagaagtgtaaagggttgatcggaactattatccaattatatattacagcctcaattagtagactctcaatgtgttgaaacttgagaagagtggggcataggttaagaccgggtcaaatcaccataaaatcaagcttgcatcattctttccttatattttttatttacatcaccatcaatttataggtcttctatctttttcttagttaattgcatccattagagttgaatttttaaaaattgacccccaccccctcttaggtgattaccttggattagctagctagactttgcaataattactccataatttattcttgtccactgtccacttgccttatccattataatttccagcaatagaagggggtttagttagtaccaaatctgaatttttaggtataagtttgtagaatttccaaccagtagttccttacaaatctcttcccttcaaacatgggtaaatgcttcattcaaacattgaaatggttcttcaccctgttcttgaaaactagcctgatcaagttattaggaatagaattctatattcctatcatttaggtacagtaggatcattcctatgagaggaggatcatgcctatacttgaaaactagcctgatcatacctaatatcttgacttattctcttaagctctttactatttataacaatcttcctctcttggcatgaacatgtaatagaaatgtcactaagtctgttttctcaagtatttggtaataggctggcaaagccaccttcaagagaacacaggagaatccttcctactcagactaatttaggtaccactagcaaacaagacatgctacaaggtggttccttcaaccatgtgatccaacagataacattccttcaaattccaaccaaattctatttaattatcctcatagttttgttattcatccaatgtgaccttccaccagccaacatttcacaagttcattattctcataaagaaagtctcaaaattttcaagaattaaagaatatatatatatataactttgatattcttaccttgtaatgggtcataactctctattttaagagtttacaattcttatccttaatcctttggttactataggctattgatttttgcaactcattcaaggcatcttccctagctctatcatagtctttcttcttatatgtgtcatgtggcagacctccatattcactttgtcataagcattcttgcttattttccatgcaaccaccaatttaagaaactttcacaatatttcttgttgttggccactttgcctctaccggaatacacaaaggagaggtttctgagccttgaaagaatctcatgtttccactagctctactccatcgagtgtcccccattcctcatcatatccctacctatgctatatagtctttataatttcatctcaatttcataattattttacccttatgtcctataatagttatagaaatattattgataattttttatttttcaagaaagcctattattacaacaaaataccaattatttaatattccacacaattttcttttaccgaaatgaatatgtattaaataggaatttgagatactttctaaaaacctttacttcgactcaaattctatttaggaaatcttctatttttacacagtgtatgtctccattgtacacacatgcacattctaatgcatatgatttctgcactttctagaaatatttctaataatgtactctaagtgaaaacttatttaaatcacgtctactcggttttgagaaaaggaatactaaacaatatccattatatctaatattaggtccacaatcctcaatcttttaaagcttcctaacatgactttcttcatcataaatctctcatgcaccacaaagactccatgtttgccttctaataaatctccatgaatttaaattgtttatgtttattctatgtatcatataccaacttatgaaagaaagattaatacttttgtaaccctcttatagattccaaattttttatacttttacgttcaaattgccctttcaaaatcttcaattttagatagtctcttagatcactcaaaaatcttcaattggctttgatactacttagtcaatttttcatctctttataatacatacttccattgtacatataacttttctacatgcacgtctttattagtgcaaatattcatctaatacaccattatggaggcaatcatgggatgaacttcacctgcaaagttgtttcaatcatatccactaaaatttaagctttgagtaaagaaatggtaaataataattcagtgcctccaaggggatggtacttaattttccaaatccgtactctatgccataactccatcacacaccatgaaaatttcatacactaaagttttgatgtattagta

SEQ ID NO: 13032 - DNA, 1886 bp, Vitis vinifera
  Intron number 7 from transcript GSVIVT01026955001 (locus G SVIVG01026955001) derived from phytozome v7.0 (chr-ID chr1 5; pos 19049634 to 19051519 reverse strand)
gaatcaaatctataattcatcctcatccagcagaggtaatcatttccttctgattttttgtgcgctagaagttggctggttatatatctgcttttcttctgatattgttcctaaatttggttgctaagttacccctaggcaatcagtttgtgtgtttccattgattggttttttcttgaagttctatacccacaaccatgctttgttcttaatagtacctatcatcatgattgaatttggggtgattgtatttttatataagctactaattgcaaataaatggttactagctctcatattccctgataataacagttgatggccatgcattttttcttcaacacctttcttgtcctctttcaccccttttttaacacatttattggatttcacctctgctgccactattccccttgtatactggttgctaaatcatgttttgctgtgtttttgagagcatcttgcgaaattactacatttggccctttttagttgaactgtttaatagatttgtcaatcaattggtaatatactgatgaactccagttcttatgcatggaagatgacagtacaattaatagaaacagatagtgatggtctattcttgaaccatggcaagtgggcacacaatcatacacaactgatggcacttgggtttgggtctcttgggtaggtgattgcttctttatagtttgatgtcaaggttgtccttttcatatctactaaacgctgcctgtgttaagctgtatcattgacattattaagtttgccttcaagtcgcttcctcttgttgcttttccttcttttgttgtcgcattatgcatagttgtaaaaggtgcacttaaagcatgcctaggcccaaggcagaaccactccctagttatagtggctcacttgccaaggcatgcaccttgttggatagacgtgtctaagctacttcatttttactttttaaatatttttattcttgaaattttaaccgtatattgaaattcatatgatttcgtattttttgttaaatacttattctaaatgtatggaagcttaaaattttttgttgtttggattggattctaggtcatattttataaaattgatatgcatcctagatcaaatttcacttcgcttaggctcatgccttatcatcttgcgtgttttaaaaccatggcattatgttaacaattatgtattcttctctttgttaacttaatttggttgtttattaaattcattttttggttggtcgtattatggagcttattttcaagtttagcttcaaacttaaattatgtgataatatacaagaacttgcgaggcgttctcttttcttaattaggtatactaggctgttcaactttatattatgaaaatcatttagtctatggaagtagaatatgtttttcctgcatcctagattctcaaaagagaaaactctaatatatagaatgtaaattggaatcacttggtgcttcattggagcagattgtggggaaaagtcattgatgattctttgtttgtttatgttgcgttttttccccttgcattcagtcagacctgggattagagaacacccagaaaattttgtcatctttgctgatatttgatattaagtgtttatcaaggtgttgctcatctttaagtgttttattaagatgtttgcagaactgtgaaaactttgttgagattttgaaatttatcatttaattgctgactgtgctcctaatgtttcattaatgtactttgggaaaattacgactttgtttttttgaactcaagatttagtttgtgtagatgcgataataatcttttcggttccttcttattacacacatttgtctaatgcttcaacaggttgggaatcctgaacttgaggatagcctttccca

SEQ ID NO: 13033 - DNA, 2147 bp, Vitis vinifera
  Intron number 1 from transcript GSVIVT01038180001 (locus G SVIVG01038180001) derived from phytozome v7.0 (chr-ID chr5 ; pos 24120565 to 24122711 reverse strand)
aaaccctaacttcgatctctttctctctctacaaggtacgctctccttctctctctagagaaaagggtttcacctagaaacatagctaagcatcacctgggcactgtctggcacgcattttttaaccacttatcatgcttttaccccctaaactcgaattcctttatttatttattttagatttgttgtgattttgttctacaagtggttaaggtgttgagaagtggtttttgtatgttcttttctctgtgtaaaatgaagctctatttctgtttggttgctgaggaaatgtggggaaagaaaagggagtagtctcgaaatctaagggttttcatggtatgggactaaaaataaaaaaataaaaaaatccatggagtctatgtaattataattttagtttaccgcggaatttctaaagcagcatggaagatgatttcatgtttatgtcctttaaccaagcaaaatgctagggtttctgttgatattctatttctgtgtgtcacttagttttggggttgtaattctaacaggttttttttcagtttagttttttcttctcttttatgaagttgtattggtgaattgtacttttagtttctgaatggattgtaatccttgttacatgggctctggtgggtgcccagtgttggtgtatttctaagtgtcaaatccatagatctcaggacatggtgacacaactaaacaatctaattaccagttttttctcattgtattcacaaggacgaattaaagcatggaactatgatagaatgctctaggtaatcctatggttgtttaccacagcaggaatttattattctgtttctttgttgaacacttgtattgggtacgaatttgactaacaggcatccatgcattcttttctccagtatttggattagcacgtagttcttgaaattgctttacattaatgttggagattctgcaattttcactctagattggtggcaaggcagtgagacattctagttgcgaataggttttcagggatatgttttatttgagttctcagttgaccacaaggttgttctctttataccctacctggtttaagttgagcatttgaagcaatgtttagtgggaaaacagctagaatctatgctattgtcctttggaagattgttgacctggaaggaaaatgtgttttgtctgttttcttgctctatgaacaattttataatgctattaccaaaggtgtctctgctcttaagacaattaaaacatttcctgcttcaaagttgttctaatttttgtcataaacatatggttaaacataatagagagtctgataaccttggtccatagattaaatattattttgataattgttcttaatgcttctactgtgtgttttcccctctctctttgttttttccactatggggtaatgctagttctccatggttagtcagatatcataatttcacaagattgatttttttgattgatcttttttgctcattgcatcacaccaacattctttttcaagtttctatattctattgtttttaagtttaccaaatccaggttcaaataaagattcctaatgttccaatcttcgtttaatccaattcatttcttacccatgattgcaattttgtttctccatccatgtaataaaggatggttatttacttgcttcaatttggtagaagttgcttgcttggtgttagggggtaattgatttccttgactatactgaatttcatatgattacataatatcctttgaaccattgaacattacattgttgtgtctcattttgtaaagaaaacaaaaaacctaatgaaatttatttgattaatttagatctgtcatggacatggttgtctgaacttttttcccattagtgcttttaaatggtggcttgacctgatgatctgtcatttcaggtgggttaatctaatggtgtgcacccatatagaacacaattttatttggatatattggatgcattggtacatgcaaagcatgaatgttcaaaagaaggctttgatctgttgatgaaattctagttacttgtttggtcctgctctctttgatgtatggtgattgttatttatcttttttttttttttttgttaatttcaggataagagctgatttatattagattctttactgta

SEQ ID NO: 13034 - DNA, 9900 bp, Vitis vinifera
  Intron number 12 from transcript GSVIVT01011657001 (locus GSVIVG01011657001) derived from phytozome v7.0 (chr-ID chr 1; pos 5526440 to 5536339 reverse strand)
aatctaaaggttccaatttacttttcggcaggtgtatgatatttacatgttccttccttgactgattttaattcttggttcttaattaatattctaagacataaaatgttaagttttttaggggcatgaaaatcttgtttgacaactttttacttgtagcacatatggccttttttcttttatttttttttatcagaaataaaagatgtatttattatagttaaaaataacatgagaaggatgaggaatcctccccacaattacaaaagtttgatcgaatatgattgaactcctccactatacaaggagtctatacaaaaagtttagactacaacacaatatacagagatgtcatcttctaaagtcctaactaaggtcccctcaatgatgcccaaacccttttgatttatacaccgaatgccaattaagttgaataacactaagaagaatgtgtaaaagaagaagagtgggaaggtaaatagaataaatttcttccttgatttcaatatgtacatctccacatatttatataaatattcctaaacaacaaaaaaatggaaactttcataatctaattctatcaaatccccttgattatgatattcctgattctctccttaattacaaaaatacacagttataatatttcctaattacattcttccacactctcccacaaattggtgaatagatgtttttcattcctaacttggatatacttgcttgaaacgttgtactatgtaaaccttggtgagtatatctgcaagttggcggtctcagtagatacataaggggtacaaatcaacccactatctagtttttctttaataaaatgtccgtctatctctatgtgcttcgtttgatcatgttgcattggattgtgtgcaatattgattgcagatttgttgttgtagtaaagtctcattgggccatcctattgaatcttcaaatcttccaaaatgatcttcaaccatagtagttcatagactccttgagccattatgcaaaattttgatttgttctagacttcgccaccatactctgtttcttacttctccatgttaccatattcccaccaagaaaggtgtaatatcctatggttgatcttctgtcaaccataaatccaacataatttgtatttgtgtatgcttcaagtactagtcttgagtttcattcaaataatatgcccttcttggagaccccttaaggtactataacactcggttagtggcttgtagatgaacctcttttggattgtgcataaactggctaatcaaactcacaacatatgccatatttggtcttgtgtgagagagataaatgagtcttcctaccagatgttgatacatctctttatctaccgtagcatcttcctcagcttctccaagcttatgattaggatctattggtgtacttgttggtttacatgctaactttcttgtttccttgagaaggttcgttacatatttttgttgaaaaataaaaatttcctgcttaaaatgtgcaacttcgattcttcttccaagtcttcatgcagaaatgcatttttgacgttaaacttttgtagatcccaattatagtttgctgccaatgataacaaaactttgactgtgttcatcttggtaaccagagcaaatgtctgtggataattcatgtcatatgtttgagtatatcctttaaccaccaatctcgtcttatacctttctaatgtcccatttgctttagacgctatatgtctagtcttttttcctgcaagcaaatctaccaactctcaaattttatttttctccaaggccttcatttctacattcatgacttgtcttcaattttaattagataaagcttcagatagagtggtaggaatatgaatattgttcaaacttgtaagaaaactcttaagggatggagacaacttttggaattacacaacatgagaaagtggatacaaaggatgtttagtacatttccttgttcccttcctgatgacaataggaaggttttgatttatgagtttttttagattgaaattctaacttagtttgtaagggaggatgagagattgttacctcatttccaaaagtcggttcggatccttggacttgtataagtcgaggaaatgtagctttcttccttaagtacactttgccagtcattcgattcttaggagcagtctcgataggtgatgacttaggttcaaagataggctcaatgggtgtcgacttaagttcagagaaggagggtacaagtataggactcgagactttaagagggtcaatgagaaagggatcaatgaaataagaatcccgatccttgtcttccttgatgaaattctctccctaaagataaaaaacgggaaaataagactcacttttgttgaaataatgccaaagttaggtttttaatttaggaaagtattttaggaataaaaaaggagagatcatttaggatatttccttatgatttagtttcctaattttaggagagaattaagctagattgattttttcttattcagtcattggtgtatatatatgtgtatggtgtgtaccgaatagtatcaaaaaaaaaaaaaaaggagttcagaaattcttcatggtatcagagccagttttctgaaaccctaatcccttccggccaaatctctttggccatctctcattccgaccatctctctctctggccatctctcattccggtcatcagtccctattctcagagtcaagggagaaaacgctttccggtcggtctaatcgtcgtcagaaaacattcaccgccggcaacttttccgatgaactttccggcgacggtttttttctacaccgcaaggagcgcctggaggagatctccaatttgtcccaaagcaccggaaccagaaacccatccacgcgccgtccacgcgcgctttttccggccgacgactgcatctcacgcgccggcgcgtgagggcgcgtgagccactttccggcgacgcgcttcctcctccaagctcgtctgactccgaccagccacccttcttacctgtttttgccatctgagcctgcacgtgcctcttttggggttcttttgcttccgtgggcacttcgattagtttttccgacgtcctccggctattttttctcaactccaatccctgcacgtgccttgggaagtgttcttctacctttccggtccatgacaaaatacggaatgacatcatcacaagtatccagcgtcacgtcaccagaatcagggggcagatctgaaattccaaaccttggtggcaatgattcctctcctattctcatcacaggacacaaattaaatggccataactatttacagtggtcacaatctgtgttgctgttcatttgcggtaaaggaaaggatgagtacctcactggagaagcagccatgccagaaactacagaaccgggtttcaggaagtggaagattgaaaacagcatgatcatgtcatggcttatcaattccatgaacaatgacataggagaaaatttcttgctgtttgggactgcaaaggacatatgggatgcagccaaagaaacttactcaaggtctgaaaatacttcagaactttttcaggtggaatcagccctacatgacttccgccaaggagagcagtcagttactcagtattacaacacactcacaaggtattggcagcaacttgacttattcgagactcattcatggaaatgttcggatgatgcagcaacatacaggcaaattgtggaacaaaagagactgttcaagttcttcttaggactaaacagggaattggatgatgttagaggccgaatcataggcattaaaccccttccaagtctcagggaggctttttcagaggttaggcgtgaagaaagtagaaagaaagtgatgatgggatccaaagagcaacctgccccaacattggatgactctgcccttgctgctcggtcatttaatagtagtggtggagatcgtcagaaacgagataggccttggtgtgattattgtaagaaaccaggccattataaggaggcttgctggaagcttcatggcaaaccggctgattggaaaccaaagccacggtctgacagagatggcagagcacacgtggctgccaactctgagagcacatctattcccgagccgagtccattcaacaaagagcagatggagatgctacagaaactattgagccaagttggcagtggcagtactaccgggatagccctcactgctagtcgaggaggaatgaagccgtggatagtggacacaggtgcttctgatcacatgacaggagatgctgccattcttcaaaattacaagccaagtaatggtcattcatccgtccatattgctgatggttcaaagtcaaaaattgccgggacaggttctataaaacttactaaagacttatatcttgactctgtcctccatgttccaaacttggattgtaatcttttgtccattagcaaattggctcgtgatctccaatgtgttactaaattctatccaaactcgtgtgtttttcaggacttgaaatcggggaagatgattggcagtgctgaactgtgttccgggctctacctcctctcatgtggccaattctcaaaccaagtctctcaagcaagttgcgtacagtctcagagtatgttagagtctttcaattctgtgtcaaattctaaggtcaataaagatagtgagattataatgttacactatcgccttggtcatcctagctttgtttaccttgcaaaattgtttcccaaattatttatcaataaaaatccagcatcttatcactgtgaaatttgtcagtttgcaaagcatactcgaacagtatatcctcaaatcccatacaaaccttcgactgttttctctctagttcatagtgatgtgtggggtccctcccggataaaaaatatttctggcacttgatggtttgtgacattcgttgatgatcatactcgggtaacatgggttttccttatgaaagaaaagtcagaggtcaggcacatttttcaaaccttcaatcttatggttcaaaaccaattcaattccaaaattcaagtcctcaagtcagataatgcaaaggaatactttactagtagtctcagtacttatcttcaaaatcatggcattatccacataagttcttgcgttgacaccccacaacaaaatggggtggctgaacgcaagaatagacatctcttggaggttgcccggtgccttatgttttcctctaatgttccaaactatttctggggggaagctattctcacagctacctatttgattaaccgtatgctatccagagtgcttacctttcaatccccacgtcaacttttcttaaaacaatttcctcacacccgtgtcgcctcttctgatttaccactcaaagtatttggttgcacggcattcgttcatgtgtatcctctaaatcgtagcaaatttgctcctcgagcaaataagtgcattttcctagggtattctccaacccaaaaagggtacaaatgctattctccaaccaacaaaagattttacaccaccatggacgtctctttctttgaacatgtcttcttctatcccaaatttcatgttcagggggagagcatgaatgaacatcaagtttgggagtctcgtcttgagggtgtaccttcttttcactcagagtcaccaaatccttcccaattcgcgcccactgagttgtccacacccatgccgtcatcagtccagccagcccaacacacaaatgttccttctcccgtgaccatccagtctcccatgcctattcaacctacagcctcacaatttgctaatgagaacttacaagtttacatcaggaggaggaaaagacaggaattagagcacggatcacagtcaacatgtggccaatatattgactccaattcaagtcttcctgaagagaacataggtgaggatagggctggagatgtgttaattcccagtattgatgattctactctaccgattgcattgaggaagggtgttaggagatgtacagatcatccaattggaaattatgttacgtatgaagggctatcaccatcttatagagcatttgctacttctcttgatgatactcaggttcccaacacaatacaagaggcattaaaaatttcagaatggaagaaggcagtacaagatgagattgatgcacttgagaagaatgagacgtggactatcacagatttgccggttgggaagaggcttgtggggtgcaagtggattttcaccataaaatacaaagcagatggatcagtcgagagattcaaggctcgtttggtagctagagggtttacacaatcctatgggatagactatcaggagacttttgctcctgttgcaaaactgaacactatcaggattcttctctcattggctgtcaatcaagattggtgcttgcaacaactggacataaaaaatgcgtttctaaatggtgacctagaagaggaagtctacatggaaataccacctggtttcgaagaaagtatggcaaagaatcaggtttgcaaactctaaaaatccttgtacggccttaaacaatctccccgagcctggtttgatagattcacaaaagcagtcctgaagctgggctacaaacaaggtcaggctgatcataccctatttgtcaagaagtctcataccgggaaaatggccatattgatagtctatgtcgatgatattattctatctgggaatgatatggaggaattacagaatttgaagaagtatttgtcagaagagtttgaagttaaagaccttggaaatttgaaatatttccttggtatggaagtggctagatcaaggaagggaattgtagtctctcaaagaaaatacatactcgatcttcttaaggagaccggtatgcttggatgcaaaccaattgatactcctatggatagtcagaagaaacttggtatcgagaaagaaagtacaccggtagacagggggagatatcagcggcttgtcgggcgcttgatttatctctcacatactcggccagatattggctttgcagtgagtgctgtaagtcaattcatgcatagccccactgaggaacacatggaagcagtctacaggattcttagatatttaaaaatgacaccagggaaggtctattcttcagaaagacagagaaccgtgacactgaagtatactcagatgcggattgggcaggaaacatcattgacaggcggtccacttctggatattgttcttttgtctggggaaatcttgttacctggaggagtaagaagcaatcagttgtagccagaagtagtgcagaagctgagtacatagctcttgcacagggaatctgtgaagggatttggataaaaagggttcttagtgaactgggacaaacgagttcatctccaattctgatgatgtgtgataatcaggcagctataagcatagcaaagaaccccgtgcatcatgacaggaccaagcatgttgagattgacagacacttcatcacagagaaggtgactagtgagacggttaaattgaactatgttcctaccaagtaccaaaccgcggacatcctcaccaaagctttacctaggcctaacttcgaagacttaacttgcaagctgggattatatgatatatattctccagcttgagggggagtgttgaaataatgccaaagttaggtttttaatttaggaaagtattttaggaataaaaaaggagagatcatttaggatatttccttatgattcagtttcctaattttaggagagaattaagctagattgattttttcttattcagtcattggtgtatatatatgtgtatggtgtgtaccgaatagtatcaaaaaaaaaaaaaaaaggagttcagaaattcttcaactttcattaaaagtaacaagaaaccttttggtaaaaacatgaatcaagaaaccttttggccctaaaaagatatgtttttggtagtttggtaggtcctttagttgttttattatgcgtttattacttttagaatttaatttattagttgtttactagttttttattttttttatttttttttatttttaaagttgaaaaaagtttatgtagccaatccgaaatagttgagatgtaagggtttttctattggttttcttttcccattattgtattttcatgtcaacttctttcccatggaatgctttcttctttccttcttcaattttaacattaatagaaaaaaacaaacattaatatatttgggctttaaagcaattgtttcgagacaaatactttcaatgaaatattggtagatacactgaattagtaatccataagatgcactatggtttatcatcttggtattaggattcaaagtgtcggtcgagtcctatccacctcggttaggtctgagacaattttgatacctgagttacaatttacaacattaaacactaacttggtgttaacttgccttgaatcctctaaattgatcgattttttgaaaaaaactcgttgactcgaccaagtttcggatttgactccaatattcaaagttaggtcacaaatccctctctttctttttcatccacaaaattgtccttctctattgcttgctagtgctattgtggtgactgaaagttgaaaaacaatgatttgatgtcgatgttctcccttcattatcatcttcaaatccttattactattggtgacatttccaacggtgatgttgattttttgcaagcgatgacatcttcgtggtgcttggcttttcttgcatagacatctccgattgtactttatgatgatgaatttaaaagcttgagaacaagattcatccttagttggagaagaagattcaaatttgggaaaagaatgggtattgggtattttattttttcatatcaataatatatatgacaatatactatactattatatggcattatggattagatgtatgagctgaggatggaatttcaaaaatacatatggaagataaatggggatatttatatggctatgggcataaaggtaagaacatgaaatatagttacaaatataaatagttaataaaataactaatatataattgagtttattatacttacaaattgaaaaaaatattaaaaaaaaacaataaagttcatataaaagaatatcatttaatatattttaataatttattaacaaaaatataattgttttatcatatttattaattatattatactttgaattttttgagctattaaattaatatattttgcgtatctcctgataccaatctgagttaccgagactgatcagtacctttagagttgatgactgatgttgcgactttgaaccatgcttggtattgtcatgttgcaatgtatttgtggcttccattttcattgatcaattgtggtaaccccatactttgagtatctcacaaagggtatcaagtgacctcacatgacttaaggttggaaaagagttggaggtgatttttctgagttgtctgacttcagtcccagttgatagtctttgtgtaaaaccaacgggaaatggatataaaaattgcaatataaatcatcatggaaaaggaaaagaggacataattttgaatcccacaacgatgaacaaaactgaagagtggacattttagtgcaaaatagtaaatattcatattaatatggatttacattttgtacttcttattttgtctatatgaaatttatacttcaataaatctttttgtttaaattttggttgtgaatttgtgtttgaataatctttcacccgcatttagaagtttcttttggttgatattcttgatggtaagatttttgctaatttatttagaatgttttcaattgatctctctagtgatgtttcttgtttctacttatgacgtggctattcatttttttcaggcttgaccattcaagctaat

SEQ ID NO: 13035 - DNA, 650 bp, Vitis vinifera
  Intron number 8 from transcript GSVIVT01024517001 (locus G SVIVG01024517001) derived from phytozome v7.0 (chr-ID chr6 ; pos 9374464 to 9375113 reverse strand)
aggttagtggatgctgttccttggttaattgtatgacaatcaatcacatattggattctaaattcggtcattttttcttcaatattgaaaccttttggaattttgacctacaaaattttattatatctcaatatgatttggagtcgatattgacagtttcatgattgatgtcaaaaatcaaagaatatccagtgacattcatatacaagtggattccaaatccacaaaatccttcaactttgtttcagttttggcagtgagcaaactgaaatggcaaactggatagtgtttggctatggcatcaaagggctacttttcgtactaaaatgtagccacctattgcagaatgctacatgtcctaacatggtctcatgaccctgtacctaccttgcaaatgatctcattccttggtcacattgctttgtatcttggtccatatctccgtgttttaatttcatttgtttgtaccttcattcaatgatctagattttatcatacatttgaacagtttagatgacatgtttggtgtgatacctaattggtaccatagcatattccaaactggatattgtggctcaactcaaatgatctcaatccctcgctctttctcatcaggtgaagaaaatatttcccttggggttctacagctt

SEQ ID NO: 13036 - DNA, 7425 bp, Vitis vinifera
  Intron number 3 from transcript GSVIVT01010856001 (locus G SVIVG01010856001) derived from phytozome v7.0 (chr-ID chr1 1; pos 16853695 to 16861119 reverse strand)
aagcttgcgttggacagccttgaagtgcctgtggggtaagttttttgttaatgttttttattatttcctatcatggaacttgctatttttttaaagccattattgaattttgggttttattcaacaatttaggtccacctcaaaattttcttttaacacattttattaggagactgaataataatttaatttcgatttcccatcaaacattttcctagttttttcaatatgcttttcccttgaatttgtttacatgtctcttgttagaaatcaacacaattctttaattctagggatacaaatgttattttgttaccttgtatgttcccagttattagccatcggattagtcaactattattcattataagatagttttattatagctagaaatagttgtagaatctcggcctgaattggtaacaagtctatatatatgtgtatgattcttattcaaagaataacaatgcaaaattgcttctgaccattatggtatcggagtagcattaagtttttgagctctctgttctttttgcatcttctacaaaatcactttgatgtcttcatcttttttttgttcttaaagtcttctatgtttgcatttggcaaatatggcttgtaaaccgtcttctcaaaatccctcaaattttgtcaatacacaaaaagactcaaccaatcttgacaatccatcccttcaaatcactatagaaaaactcaatggctataatttcctggagtggtctctatttgtcaagttgttcttaaagagtcaacataaaatgggatatgtgggaggaacagtaaaagaaccaaaaatccactaatctcagttatgagacgtgggaggctgagaactctatggtaacgtcctagctattgaattcaataatgccagagattgggaagcttttcctatttattttcattgtgaaggaagtttggaatgttgtttcccaaaagcactcaacggaaggatgcactgcccaaatatatgagttgaagaccaaaatccaaagaaatctcaacgtgacttcatttcatagtactcttgaagtattatggtaggaatttgacttgtattagcatattgaaatggaatttgttgcggatgccgctaaacttgctaacctgcttgaatgagaacttgtattcgaattccttgttagtctgaactccaagttggattaggtaagaagtcatgtccttggaaaagatatatttccttctttgcatcaagttttttcccttgtttgtcttgaggaatccaggttaggagtcatgatgaaaagaccaattgcaccatcaactgaaatctccgctctaaatatcacggatgagaaaggaactatgggaggagaaaaggatccaaggtagtgcaactaccataagcaatcaaagcacacctgaggaacatgttggcgattgaatggaaggcctcaacaatgaaacaaaggatgaagatactctaaaaagttacaaatggttgatcattgaggctatacctattgcaagtacaacatccattgatgctaacatgaatccttcacctactaagaacatgccattcactaagaaacaaattgatcttttctactggatcatgggaaaatctaaagtgccttcatcttccccttgcatgtggacaatttggataacatggtaaggcttagtaaacttggttagtttctatttctaacccttggattatcgattttggagctagtgaccatgtggccaaagaatctaattcttttgtatcctatggtacttgttttggaaaaatgtttcaggttgctaatggttgttttattcatgtagaaggaaaaggaaatttgttgctctcaccaataagttcatttttacatgtccctaatatgacttgcaatcttttgtcatcgagtaaacttacaaaaactagtaatttcccggtcatcttgtgtcctaatcattgtattctttaggatttgtctttagggatgattagcaatgctaaggaaaaggatgaactttatttattagaacttgaggaaagaaagaaggcctcaggcctatcaaataaagggaactgtacaaagaaccatggaagaatattgattgctacaagaaagattagttcatattagtttctttatttaaaaaatttgtttccaaaaatatgtagtagcctagatttttctgaacttagatgtgaagtgtgtgagttagcaaagaatcaccatgtttcctaccctttttgggtaataaaagaagtgatattccttttgttcactttgatgtttggggaaccttttgagttcattgttcgtccagtgctaagtggtttgtaagttttatgaatgattgcagcaagacaatgtagatttatctcttgaaagaaaaagctgatgataagtatactaagagtccatttgacagtgattctaggaagcgcttttagcttaaaaagtgtttttgaaaaaaattaggtgtttcacaaaatttaggaaacacttttaaaaatttgaaagatcacttgtagtgttggaaaatcacttatggcgttttttagagaaacacttgataggtgattttcctagaaacacttccagagaaaacacttccaataaaaacactttgagtataaacactatcaaacgcactaaagcttttttacaaaatgattcaaacacaattttatgcacaagttattagatccaataaaggaggagaacattttaatgaaaacttggagaatgttttgcacaaaatggttttgttcaccaatctagttgtgttggaacacttacataaaacgaagtggtagaaagaaaatattgacacttaggtggtgtttgtttttttggctttttgcttaaagcaatttgttttcagaatttaggttgtttgtttttctactttttcatgacttattataaactttttactaaatagaaaaagtcaaaatatgtagctttttctaaatagaaaaaataacatattgatttttctttactttttaatacttaatagaaataaaatactacaaaaacaaacaacctaatatttaacactattaagcattaaagttctatttagaattaaataaaaaaacaaacaccacctaacttgaggtggcttggccatttggtttgcaagaaatgtacctaaacattttttggggtgatgctaccctcacgattgcttccttgatagacacaatgccctccaaaactctcaactttcatactctaatagtaatcttaaagagccattttccccatattacaggtcttggttttctttctcccaaagtttttggttgtagtgtgtatgttcatgttcctagtaaggatagatctaaatttgatcttagagctatcaaatgcattttcattggaaactcacccacaaaaaagggataaaaatgttttcaccctccagctaggaaggaatttgttaccatcgatctgaatttttttgagatcaaccatactatcataaaactacctttcagagggagaaaacacaagatcaagatcaatcacaatcatgtactattctgcgtcctatgcctcctttggagaatgaaagaaagggagagaatcaaacaatccaaaaaggagaaagagatattgaaagagatgttgaaccacttgtttactccaaaagatctcgagaatctagattggtacaagagtccattccttctaaccatggcccatcatccactttagtagaaggtacaacttccaactctaatctttcaaattttagtctctgtccttctaattccacttttgtttttttacactgactaggacattcctatagcaatatgaaagggtgtaagaagctataccaaacacctattgtccaattttatgtcttatgataagataaacgacaaatataaagcttttgcaaatcaattgggtatgaattcaattatgaaggatatggaggaagcctttgtagatcgtagatggaaaaatgctataaatgaagaaataaagatagtaaacaagaatcaaacctaggagattttttatttgcctcctaggaaatgttcaattgcatgtaagtgggtgttcaccattaagtacaaggtagatgacattgtgtaaaggtataaggtatggtttgtagctacaggatgcacccagacttttggaattgactatagagagatgtttgcaccagtgatgatgatgaatttcattcgaatcctaccatctctatcagcaaaccatgattggccactccaactattcaacatgaaaaatgtttctacatgacaacttaggagtctttatggatcttccacccggttttaaagaccaattcaacagagtgaaagtatgtagacttaaaaaaactttctatggattaaaatagtctccaagggcatggttgggagattcactcaaactcttctcaagtttggttatcagcaaagtcaaagtgattggattgtgcagtcccttgagaaaagattaactgtactcattgtctatgttgatggtattattgtgataggtgatggctttgaagagattcaccaattgaagagcaggttggccaaggcatttgaaataaaagatttgggagatctcatatactttcttggcattgaagtagctagatcaaagaacatggtctacatatcttaaaggaaatatatacttgactgacttgatgaaatgggtatgttaggatgtaaacctggggatgctcttgctgatctaaaccaaaaattagtagccaaagaaggtagtgttcccatagataaatggagatatcataggcttgtgggaagattgatttatctatctcatacttggtcagacatggtatactttgttgaagttgtaaccagttcctgaatgcttcccttgaagcacatggatgctgtgatgaggatcctaaggtatctaaaagctaccccagggaaaggacttttattttcaaagaataatcatttgcatattgaaggttatacagatgtggactggttggttcattgactgacaaaatatcaactagcagctactgcacctttgttggaggtaatttggtaacttggaggggtaaaaggcaactagtagggctgaggttgagttccatgcaatggccctaggaatttgtgaacttatgtgagttaagactctattaaaggagcttcgagtggagattgtggaacctactaaacttcaactggtagatttgttttctaaaggaattgcaggaccaagtttcaagtctatggcaagcaagctgagcatgcaagaaatcttcgaaccagcttgagggggggtgttagatcacaattacttaattctaaggatatgattgattgttattttcttaccttgtatgttcctagtaattagctgttagatgtggttgtagaatctcagcctgatttggtaactattctgtatatatatgtgtgtgtgattatgcagaattgattctggccattacctcttactcattttagtggaagaaactagagtcaccatggttctgaaattttgaatgctcagcttttccagaaaataattctacattaaaagcggccaaagttctgactgaagttaaagttcaaaactctgtatgtctagattgaagttttggttttaatctgcagtgaaagaattgactcacttcattaattgtctaaagctgaaatcaaactgggagttagaagccttgaaagtaggttgttgaggattcaaatgtagttagtttttttacactgttttttccaatcatgtatcttaattctttttatttttatttttatttttttatcagaagcaatgaattcatggttataaattatagttacaaaaaggacaagaaatccttccaaaacctgatcaagaaaaaggaaaataagtgaaacttactccaaatcataactaaataaactgcagatcaaaactaggagaaaaaccaatgaatgctcccaaaattccatataacttaggagggtaaaaagctcctacaaaagaaaccaggtgcttgactgcttcttggctaaaagattagagaccaagataaatagcatctcaattttatttatttatttattttctttctgataggcaacaaaaatagcatctgaaatgtctagtgatatcccaaaatagtatttttttattactactgttgttgtgattatttattgttaagtttatttctattattttattgttttattatttttgttttgttggggaatgggggtttgtatggcttccttttgttttaccaatatctgaacaaaagcctgttagtgagactagccagttccctagaatgtgatcatgagcttagtcataatgtagataagctgtgtctgagcttcaaacaaagcttgattgcacttagcctggttttggtattgggatggactttgcttgaataaagcatggcccttttctttactattatagttataggtaatagtttttggaatctgcatattatttgcagaggaagtatgtgctcttattttcactactatatgtgttataatttagtcttatattttatgggatttgtttttagttatcaacttaaagatgtatggccttggggtcctattctgtccaatgatggcactattatgggcagcaagcttaaaaaggatctaaaccaagcctggggttcataaactatgatgagttgagctgagtcaatcttatgcctacctatggtatagaaagcctgagttgagactgagcctgagtccatattgcaattccaagcctagctactgggctaagtgtcacgatctgctcaaatgaccctccccatgggctgagcttaggaaaagacagtccgtgacataaggctgacttaaactactacttaaaaggttttgtcacccaatgccaggtcatttatctgtgtatttgttggtggtgaatggaaagttgtaatgtgacaaggtttgtcattattgtaccactattatgccaatctatcaaaaaaaaagttgtaatgcaggctctattgtgagggttggtgggtggttttgttatgaacttgaacttttacttaaatctaagcttaaattgttataaatcctttcatctcacatggtaagttatagtgaagctctatcagtctgttgttagagctggtgggtggtttacttgagtttacactttgagaagctttacaaattgtaacatatagtttatcctcatatcttgtggtcagacacatgtagctaggttcaagactctgttcaaagtgggtgttgagccaactgataattgtcttgtatttttgtttttcttttcttttctttttttcctttggaagattttgtttcttgcttagtattggagtatggtgttgtatttctcctcattcaatccttcattcaattgaccagctgtgtgattgttgaggacgggaagctcattgcca

SEQ ID NO: 13037 - DNA, 6297 bp, Vitis vinifera
  Intron number 1 from transcript GSVIVT01026352001 (locus G SVIVG01026352001) derived from phytozome v7.0 (chr-ID chr4 ; pos 14698694 to 14704990 reverse strand)
gaaagacggtcacggttaaccaatttcaggtaaacttttattaattgaagattgtttgtgttaattgttgtacatatgttttgtatggagccttatactgcttaacaatttttcatgatgactagtttactgcaataatatatcaattgtttgataacaagatttaatgttgaaaatttcagtgttgatataatctagaagtgtgaatttgaactataaaatcaaagatgcaaattcaggtttcttttttattatctgttgaaatttggcattcaaagttaggattttaatttaggaaagtattttaggaataaaaaaggagagatcatttaggatgattcagtttcctaattttaggagagaatcaagctagattgatatttttttattcagtcatttgtgtatatatatgtgtatggtgtgtacctaaaaaatcaataaaaggaattcagaaattcttcatggtatcagaaccagttttttgaaaccctaatcccttctggccacctcttattcaggccatcattcattccggccaaatctctctggccatctctcaatccgaccatctctctctctggccatctctcattccggtcatcagtccctgttctcagagccaagggagaaaacgctttccggtcggtcgaatcgtcgtcagaaaacattcaccgccggcgaacttttccgacgacggttttttctacactgcaaggaccgcctggaggagatctccaatttttcccaaagcaccggagtcagaaaaccatccacgcgctggccacgcgcgtttttccggctggcgactgcatctcacgcgccgacgcgtgagggtgcgtgagccaattttcggcgacgcgcttcctcttccaggctcgcctgacgccgaccaaccacccttcttacctgtttctgccatccgagccctgcacgtgcctcttttggggttcttttgcctccgcgggcccttcgatcagtttttccggcgtcctccggctattttttctcaactccaatccctgcacgtgccttgggaagtgttcttctacctttccggtccatgacaaaatacggaatgacatcatcacaagtatccagcgtcacgtcaccagaatcagggggcagatctgaaattccaaaccttggtggcagtgattcctctcctattctcattacaggacacaaattaaatggccataactatttacaatggtcacaatctgtgttgctgttcatttgcggtaaaggaaaggatgagtacctcactggagaagcagccatgccagaaactacagaaccgggtttcaggaagtgaaagattgaaaacagcatgatcatgtcatggcttatcaattccatgaacaatgacataggtgaaaattttttgctatttaggactgcaaaggacatctgggatgcagccaaagaaacttactcaagttctgaaaatacttcagaactttttcaggttgaatcagccttacatgacttccgccaaggagaacagtcagttactcagtattacaacacactcacaaggtattggcagcaacttgacttattcgagactcactcatggaaatgttcggatgatgcagcaacatacaggaaaattgtggaacaaaagagactgttcaagtttttcctaggactaaacagggaattggatgatgttagaggccgaatcatgggcattaaaccccttccaagtctcagggaggttttttcagatgttaggcgtgaagaaagtagaaagaaagtgatgatgggatccaaagagcaacctgccccaacattggatgcctctgcccttgctgctcggtcatttaatagtagtgatggagatcgtcagaaacgggataggccttggtgtgattattgtaagaaaccaggccattataaggaggcttgctggaagcttcatggcaaaccgactgattggaaaccaaagccacggtctgacagagatggcagagcacacgtggctgccaactctgagagcacatctgttcccgagccgagtccattcaacaaagagcagatggagatgctacaaaaactattaagccaagttggcagtggcagtactactgggatagccttcactgctaatcgaggaggaatgaagccgtggatagtggacacaggtgcttctgatcacatgacaggagatgctgccattcttcaaaattacaagccaagtaatggtcattcatccgtccatattgctgatggttcaaagtcaaaaattgccgggacaggttctataaaacttactaaagacttatatcttgactctgtcctccatgttccaaacttggattgtaatcttttgtccattagcaaattggcccgtgatctccaatgtgttactaaattctatccaaactcgtgtgtttttcaggacttgaaatcgggaaagatgattggcagtgctgaattgtgttctgggctctacctcctctcatgtggccaattctcaaaccaagtctctcaagcaagttgcgtacagtctcagagtatgttagagtctttcaattctgtgtcaaattctaaggtcaataaaaatagtgagattataatgttacactatcgccttggtcatcctagctttgtttaccttgcaaaattgtttcccaaattatttatcaataaaaatccagcatcttatcactgtgaaatttgtcagtttgcaaagcatacttgaacagtatatcctcaaatcccatacaaaccttcgactgttttctctctagtacatagtgatgtgtggggtccctcctggataaaaaatatttctggcaatcgatggtttgtgacattcgttgatgatcatacacgggtaacatgggttttccttatgaaagaaaagtcagaggtcggacacatttttcaaaccttcaatcttatggttcaaaatcaattcaattccaaaattcaagtcctcaagtcagataatgcaaaggaatactttactagtagtctcagtacttatcttcaaaatcacggcattatccacataagttcttgcgttgacaccccacaacaaaatggggtggctgaacgcaagaatagacatctcttggaggttgcccggtgccttatgttttcctctaatgttccaaactatttctggggggaagctattctcacagctacctatttgattaaccgtatgccatccagagtgcttacctttcaatccccacgtcaacttttcttaaaacaatttcctcacacccgtgcagcctcttttgatttaccactcaaagtatttggatgcacggcatttgttcatgtgtatcctcaaaatcgtagcaaatttgctcctcgagccaataagtgcattttcctagggtattctccaacccaaaaagggtacaaatgctattctccaaccaacaaaagattttacaccaccatggacgtctctttctttgaacatgtcttcttctatcccaaatctcatgttcagggggagagcatgaatgaacatcaagtttgggagtctcttcttgaggatgtaccttcttgtcactcagagtcaccaaatccttcccaattcgcgcccactgagttgtccacacccatgccatcatcagtccagccagcccagcacacaaatgttctttctcccgtgaccatccagtctcccatgcctattcaacctatagccccacaacttgctaatgagaacttacaagtttatatcaggaggagaaaaagacaggaattagagcacggatcacagtcaacatgtggccaatatattgactccaattcaagtcttcctgaagagaacataggtgaggatagggctggagaggtgttaattccaagcattgatgattctactctgccgattgcattgaggaagggtgttaggagatgtacagatcatccaattgggaattatgttacgtatgaagggctatcaccattttatagagcatttgctacttctcttgatgatactcaggttcccaacacaatacaagaggcattaaaaatttcagaatggaagaaggcagtacaagatgagattgatgcacttgagaagaatgggacgtggactatcacagatttgccggttgggaagaggcccgtggggtgcaagtggattttcaccataaaatacaaagcagatggatcagtcgagagattcaaggctcgtttggtagctagagggtttacacaatcctatgggatagactatcaggagacttttgctcctgttgcaaaactgaacactatcaagattcttctctcattggctgtcaatcaagattggtgcttgcaacaactggacataaaaaatgcgtttctaaatggtgacctagaagaggaagtctacatggaaataccacctggtttcgaagaaagtatggcaaagaatcaggtttgcaaactccaaaaatccttgtacggccttaaacaatctccccgagcctggtttgatagattcacaaaagcaatcctgaagctgggctacaaacaaggtcaggctgatcatactctatttgtcaagaagtctcatgtcgggaaaatggccatattgatagtctatgtcgatgatattattctatctgggaatgatatggaggaattacagaagttgaagaagtatttgtcagaagagtttgaagttaaagaccttggaaatttgaaatatttccttggtatggaagtggctagatcaaggaagggaattgtagtctctcaaagaaaatacatactcgatcttcttaaggagactggtatgcttggatgcaaaccaattgatactcctatggatagccagaagaaacttggtatcgagaaagaaagtacaccggtagacagggggagatattagcggcttgtcgggcgcttgatttatctctcacacactcggccagatattggctttgcagtgagtgctgtaagtcaattcatgcacagccccactgaggaacacatggaagcagtctacaggattcttagatatttaaaaatgacaccagggaaaggtctattcttcagaaagacagagaaccgtgacactaaagtatactcagatgcggattgggcaggaaacatcattgacaggcggtccacttctggatattgttcttttgtctagggaaatcttgttacctggaggagtaagaagcaatcagttgtagccagaagtagtgcataagctaagtacagagctcttgcacagggaatctgtgaagggatttggataaaaagggttcttagtgaactgggacaaacgagttcatctccaattctgatgatgtgtgataatcaggcagctataagcatagcaaagaaccccgtgcatcatgacagaaccaagcatgttgagattgacagacacttcatcacagagaaggtgattagtgagacggttaaattgaactatgttcctaccaagcaccaaaccgcagacatcctcaccaaagctttacctaggcctaacttcgaagacttaacttgcaagctgggattatatgatatatattctccagcttgagggggagtgttgaaatttggcattcaaagttaggattttaatttaggaaagtattttaggaataaaaaaggagagatcatttaggatgattcagtttcctaattttaggagagaatcaagctagattgatatttttttattcagtcatttgtgtatatatatgtgtatggtgtgtacctaaaaaatcaataaaaggaattcagaaattcttcattatccttatcatatttatttcttttagctgcttgaagttttaagtactacaaattcaacattaaaaaattttcgtatgctaaactttcagttttatcaaactctgtcttagtttgtggtacttaggttcctttgtagaaatttgttggttgaagatttagttattttttctacttaattttgagcaaatgttaattaatttgtgaagattgggtcttctgggaatcatttatcactctaattgggtggtttatagctgttgattgagattatattgcagaagattgatatacaagaccctgatgattaatggttctgttagcttgtttttaattttagttttttgtcactattgtctgtgttattgtttcaatctgtgcatatgtatttacattgttgattgggtaattgtaaccccctttaaatcatttatcattgtcgccatcctcattttatatgcagtttcattcctatccgatattttgcttaatgttgtacacatctttgtaacttctaatcaacttggtgttctatccacctgtggatacaattgtaggttaagg

SEQ ID NO: 13038 - DNA, 8656 bp, Vitis vinifera
  Intron number 3 from transcript GSVIVT01023486001 (locus G SVIVG01023486001) derived from phytozome v7.0 (chr-ID chr1 4; pos 11066533 to 11075188)
ccattgttccgaaggagaatacaaggatccacaaggtgagctctttaattgggatatattttttaatttttaatatttatttattttttatgtaaaaccaaatgacttatttttgggaagctactgatgcaatttcatctcaatatcaactagaaagttaatgtccttgtagtgtcagattattacatttgttcatttgtgatatttgtttattataatagatatgggtgattgccatatatttttaaaaagacactgattttcagaaaggactgctggtgtttaatttgatttgacaatcaacctgcacagaaacataaatgattcacctttacaaatttgtgaggttttcccctttcatttcattggaaacccgtcaaggggtttaatttgctttcaatgaatcacaatgataaccaatccaaataagaacccaaattagtacagttgtaacatacaactttataatcttttcacattactttctactagtgcagaatgtcaaagtatgatggtgtaggtttaacctaagtaatcggaataagccttcaagtaattagaggtttgccttagaaaaggaatctccatggaaacaggtcacattaggaagcttacaaaagaaataagtggttaatttcacgagggattggtttagggtagggttgtggaaggtcataagaagagggttggatggctttcaaagtagaacttgctttttagtggataatggcaagagagtgaagttttggaaggatgttttgctgtggtgattcaattttgactataaactttccatcccctcttggtattgcctctattaaggatgcttgggttgtgggcatgtgggaggatgtgggtgttggagggcattggagatagtgttgtcaaaggtgatcacttggttcatctaggccattaggcaaggtgagaaaaataaaaattgcctcttgaagacccaagtgaggtgacttcaaagaggaaacacttaagcatccaccttaggatagagtttaaggtgtaacaatgattgccttctttcataaggctggaaatttaggaaaaaaaaaaaagaagtaaaatattaaaaataaaatttagaaagctgaggtatggagaatttgaaaggttgaaaaacaaagccttgataaaggaaaaacaaaaatgaataggaagatttaatcttaagaaaaagacgaggtagagggacgaagaaaagaaagtttttgacaattacctttgggcaagaagtaaaggaggtggagagaagaagatttcagtagtagtgtggttaactttggtcgcatggttaactttggtagcgtggttcattttggcaagcttttctcctctttctctgttactctcttacgctttttctttttcttttcttcatagtttgaatccaacttttaaaaaaaaaaaatttattctttgcttgtgttgtgactactgttattggtgcccttttttatttttattttattctctgtttgtgtagttactgacacactgcaaagtactcccccttaacttatctgtgacccatccattcaatgggtcccaccactgccccctacttctttcacttgtttctcatctaaagtttatctgacatcaataaaaaattgaatttttattattgataagggtcatatacaatttgtttaacataccactgtgcttatgctatcttgcatgccccacttagcccctcatggttgaaaaaaaaaaccaagatagtattcacatcctctctcatagttgaaaaaaaaaaaaaccaatatagtattcacatcctctcccatctagtatctccaattctccactagaccgtgggtcccatggtcctctttcctaatttcaagtgcggtaggtatcatttagcaatagtcctctccttgttgaccttatttgtatacattttttattttaacttcttttattcgtactcaaactctcaaaagtttttttttttatattttttttttaaactttttttacattcttgctttgtctcccttatattttaattatttctttttcttctttaattaaattttagattttgtgaatgacatcaaaaggtggcaccttatcaaagggtttaaacaaagaagattcggcttagaaatataattatttaaaagaccttagggatacgaagttagtaacataattattttgtgggaacaagacaaaaggtggaatctttagagtaaagcaacatgaaatagggacatgctgtaaggtgtttaaaatgtttggaggaagtaagagaagagcttaagaagtacatgactaataaaaagaataaaaagataactatagttcttttcctgaattttgagacttagaaaactttgttgatattaatgaagaaaaggaacttgaagaagtcaatttgagtggaaaaaaagtgattggtaatagaagaagtgaagtgggaagtaataagaagatggagtcaacaacataatgccttattgatgcttttgtgtctcaaaatccaaaaaaagcagttcgactttggaaagagggaaaaatgaagcaaagttctatagatgatgtatttgataaaaaggaaagggaaagtgtatgctagtacattggctgattcttctatctagcaaggatatcatttaattgtgcaaatttgtatagttttaaattgatgtttgaagctttcgggctatatggcccaaatatgaaatctcctagttatcatgaattaagagttctgattcttgagaaagaagtggagtacataaaaaatttattaaaaaatcataatgttgcatggatgaagtatggagtttctatcgtctgatggacagatagatagaagaaatcgaactttgatgattttttttggtaaattgcctagttggaacaatgtttatcaagtccatttatgctagttcattcatgaaaactggggaaagacatttgaatttctagacaagtttatgaagtgcattggggaagtaataactgacaatgaatctatctattagcaggtaagatttcatttgataaagttctttaggtttatttgtgtcatttaaattgaaacattatgttgtgacattatttgccttttgggcacacttttttcttattcaatactatcttgtttttacccatcaaaaaaagaaaaaaaaatgatattatttatcatttttatttattatcatagttgttaactcaaaacgtatcgtgtatcgtttttctattttttcatatcatgtatcgtaagttttttatatagtaaaaaataaatagaaacatatgtatatgtgtgaatatctggtgaaagtatgaagtataaagtattatatatccaattttatggaagatagtaggatctaaagagttaatttttatcctattatatgaaaacattgaatgttaatgttttaacaagttcaaattaacaaaatataactttaatatatagattcatcacataatccagaaaatagacttcttcaatttttagctatgatttttagttccaaattctaactaggtatatgcatttattgtgttgatattaatatatatatgtgtgtgtgtgtgtttgttcgttcatatgtgttatcttcaaagttccaacttttcaggtttatcgtcatttcttttccaccaaaaaagaaataaaaaaaaaactaattgatcaagtaaaaatttttcttcaatgatcaccatcattttcattgttaacattcaaactagttaaatgaaaattctccattatttattgtaaaaataaacttacttgacttctaatataacatttgaaaatatgaatgcaacttttcatataagattattttacttatttctcctttttatgattaatttttaattttttagtatatgttaaatagttaatataataaattcttttaataaaaaaagaattaatttaatttttttcaaaaaattatggaaaatagttgaagatgtatgtatctttgtatcctaatatcatgtatcatacatgtatcgtaagatgcactttaaaataagatacaaattatgatacatattgattttcataaaaaatgtatcatatcgttgtattgtattgtgtattgcaagtttttaacaactatgcttattatgttttttatgctaaaaatttaaataggaaagttcttagaagcaaaacaattgcatttgtgttggacgacttgtgcgactcattgcataaaccccattttagaagatattgggaaacttcctacatttaagaggattttgacaagagccatttcattgaatggtttcatctataattatgtgggggtgttaaatatattgagagagttcaccaagtaaagagaattggttaggctggacataactcaattcgcaacatgttttcttaacctacaaagtatccatatgcaaaagcgcaatttgaaattgatgttcacttttgaaaagtggttagctagtaaatggacaaaggaggtggtagaggaaaaacaagtcttaaaaattgtttggatgcctttattttggaatcatgttgtctatattcttaaggtgatgggtcctcttgttaaagttcaacttgttgacaatgaaagaaaaccaactatagggttcatatatgatgaagttatggatagatgttgggttaggttgttacttttatagatgattgcaccacaacaacttgggtttatctcatgaaatcaaaatctcaagtagcctaaatattcctcattttccatgggttgatcaatactcaatttggccaaaaaattctcacccttagatcagataatgttaaggagtagttcaatcaggaccatatctcatattttgaaagagagggcattttacatcactatcaagtgttgataccccataacaaaatggaatagttgagagaaagaataagcaccttcttgatttgctagatccctacactttcaaatgaatgttccaaaaacctattagggagaagccattcttatagccgtccacttgattagtagaatgccctctaaggttcttgaccataactctcctgttgggaaactctccaccttatttcctaatttccaacaattagggtccttacctccaaaaatattttggtgtagttgtcatgttcatgtccatagctacctgagagggaaatttaatcctagagcaatcaagtgtattttctttggttattattctatacaaaaagggttcaagtgctatcaccgggtacaaagaagagatatgtgaccatttatgttgcctttgttgagagtcatccttaccttggggataactatcttcacagggagggcaattttagaaatgaagataattggtggttattgaatcttgaggaaactgatcagacttctaaatctactcctcattttctactacaatcctcatctacttcagataatgatccttcccaactccaattcccaagttctaaccaatctctaaatgtcgatccttgtttgcgtgttgatccacaaccatgtgatgattctacaaagaaacaatagttaggacctgtccccagaaaagcctccaaaagccacacatgagaggtctaaaactccattcatcaaggtatattcaaggaggcaaaggcccacacttgattcacatgccctaatcttcaacttcaaaacaagtaatgaaaataaaaacaaaatttcctagaaggataaagatttgaatttacctattgctattagaaaaggagtgatgtgctatttcataatctctcactctaactgcgagcattgtcacctagttatcttcacaaatggtttgggcaattgtctaagaggcattaaagatgaagccttggagagaagccataaatgaggaaatcaaggcacttgagaagaataagacttgagaaaacatgaacctagtaaaaggaaagaaaacaataggctgcaagtggatttttactaccaagaacagacccgatggttctttaaaaagatacaaggcacatcttgtacctaaagaggttactcaggtatacaacataaactatcaagagcctctgctctagtggcaaagacgaatacaatttgcgttcttctctcacttgcatcaaattttgatcatccgtcacaccaattttgatgtaaaatatgcattcttggagattttggagaagaagtgtgcatggatattccactttggtatgaaaatggacttcctacattcaaggtgtgcaaattaaagaagtatatactggctcaagcaatcacctcgagcgtggtttggaaagttcacaaggtcaatgattaagagaggatatagccaaagtcaagatgagacactctgtttaaacactattccaaagggaaggtaacgacactaattgtgtatgtggatgatgatgttgtcactgaaaataacctagaagaaattatggagctgaaatcacatatttggctagagagtttgaaatcaaagacttgggaaagttgagatatttccttggaatcaaaggggctaagtccaaataaggagtgttcatttcaaaatagaagaatattcaagatctgtcgaaagaaatagggatgttgggctggaccactcctgtagaacttaatcacaatttaggaaatcttgaagaaaagcagcctattgatcgaggcatttaccaaagattggttgggaaacttatctacttatcacgcacatatcctgacattgcctatgctgtgtctatgttaagccagctcatgcatgcccactgaaaccatatcttgatgtcatgtataggattctaaggtatttcaaggcagcaccctagaaaatgcaagcttatattgacacagattaggcgggttccattgtagatgggagatcaaccacaggttatcataccttcccaggagggaatctaattatgtggaggagtaagaatcaagctgtagtagcttgctcacgtgcagaagcaaagttcagagctatgactcatgcaatttgtgaactattgtggatcaaaagcattttggcagattttacaattgaagttaggaagcatgtcctatggtattgttataacaaagttgccataaacattgcaccaatcccatccattatgattaaactaaacactggaagttgacaaacactttattaaggagaacctagacgatggattagtttgtattccctacatgcctacaacacacaacttgctgaaatccttatgagggggagtgttgtcggatttgatgttatttctgcagtttttagttttgtcatagctgtatagaatatttcttccttttttctatttgtgtaaataggtagtttctatacttgggctggtgaagacttctatcctatatagctctatacatttcctgagaatgaatgattcattattccattcaaaatacctagaagaatcatacaagggtaatggtagatttagccattgaattaggggtttggagggcgggcagggtggttttgtttcaagtagtctcaaacctgccaataagccatccattacatttattactgttagactaagagaggcaatctggtgtttgtttattagtttcaatcagattttctatctatggttttttgtttggtcatttatttcagttttgctatgactaggaagagacttgagatagccaaaaggattgggaggaaaaaaaaaagaagcaaatatcaaagcaacctaattatatgtggatgtgttagccagtgactcagtctgtttttaaagcccatcttttcacaagaaatcagctttcatagttcccatgtctaagctgccaatgttaactctcctgcctataggaatcagccacctttttatttttttttcatctaattatgtttttaggctaacttgctactttcataagcttccctggattgatttgagtgctgaagtgacccaagtttgcataaaagacaatgacctattggtccactagcatgagataggcattgagagatctctttatgaagaggttagcagtttgaaaatttttatgtaatttaatgatgccactcagaggctcagctggaacaaggtttgtgtgggacaagggtttcctctgttgtacttaaattttaaattatttcaatttttctagttgacattgttgactgaaaatattacctaaggagattatttatttatttttgcgaagtgaagaattcgtactatgatataaagtcaaattttgttatttggcattgtatgaagaaagatatagtagtagcccttttttctagttttacaccaaccttgtggtacactttgatacaaaaagataggagtcttttgtgtgacaatgcatgaaaggagtactatattttatggatatcttcctaattgctacttcaaatttcaaaaaccaagttcttttgaccaagagcttctcaaatcaaacttaaggtgaaccaagatagaatttttagcgcctctttgcaatacaattatatacttattgatcaaaaaaaaaaaaaaaaaagatagaatttttataagatgaaagctttccatcaacagctgtttttttgtgaaaggagctctcgatattcgctagaacagttgaatgtattcattgcatattttcactttctgatggttttttgattgcataggcatcaaaacctcagctataga

SEQ ID NO: 13039 - DNA, 7207 bp, Vitis vinifera
  Intron number 6 from transcript GSVIVT01013976001 (locus G SVIVG01013976001) derived from phytozome v7.0 (chr-ID chr1 6; pos 8276574 to 8283780)
gccttaatcaaccttgtacaggtattaccagttaaagttgttattgtcttatcatttacatttttgtaaatagtggtcaaggtttttgctctctttcttcactgtctctgagatgttgctaattttcttcaattttttttgcgtttgcattttcttgtttgtgtagtgttttttgttttgcatttgatagaatctgtcttattttgcttctgataatatatgctctatcaaaaagtggctggatgtggcagtataataaaaatcatctacaaggtggggatatgccctagagtactgtaaaacaagttaagaaaaagggaaaaaaaaaattactataactaatcaatgaagttggagtctagttcccatgaaaattataaatttggctttctattgaaacccaagaagccacattagatgtcatgagcctctcagtattgtaaatattatatgatccctatccttctggataatttggagaggtcatggtcattttccaaagctttctaagttctatcgttatttttaaagcttgtggaatagtatgagagaggtcaatccgaatcaatgaatggattttttatctgttgttcactcacaaaagttatacagctatgacactgttgcttgccccagtttttttggatgggtaaaagcaattctattagaagcgccaaaaagtgtatacgatgtataccaggccaaaaaagggagggatacacaaaaaaccaactgacaacccaactaatcaatgaagtcaaataaagacaataagttggagccaaaatgcaccctgacctactccaagaacatgtatatagaagatcctaaaatagcttggtctgtcaaatcaaaagcttaaaagggtatttggtttctctcctttcatagggtctaaaataagtataaaagagctgctttccacgtcttcttcacgtcttcttccttttcttctctacaaaagcaccttgccagctaaggagagcattcttgattgagaaaggctttacccactgtgtattaaaaagatgaaagataagatgctacaacatgattgcctttggacaatgaaggaagatacgatttgctgattccttttcacctttacacaaataacatctacttggtaggcatcgacccctcctttttggctgatctagagttggaaaattttctcaaacctacccctcctttttggctctcattgggacctaaggattccacacaatacctgtggggaatccctttagaaagtggcctgctaaggagagagtaaaatgatttaactgtaaaggtgttttgctttgataaccacaaaccatgacatcctcagtgccccttttgatcacttgcccttgcaaccttctaagcaactctttcacctctcccaattcttaataatttatttgtcttgtgaacattggattccaacaaccctcttccctcacctgctcccaaaattggtctacctagacttccttatcagaggccaatgaaaacaactttgggaaagcctcagctagggaatcctccccacaccacctatccttccaaaacctcactctcctaccatttccgaccctaaaaccaactatattgttaaattcctaccacccgctttgaatcgccttcaaagggtccatgttataaccttcctttgaagctttagaacaccattccctctcttccactccgtacttccctacaatcacatgtttccaaagtgacttgctcttagaagcaaatctacaacaccattttcctagaagggccttatttagagtagacaactttctaatatccaagcttccatcctttttatccaagccaactattgaccaggtcactaggtgaggcctgctttggaactctcccccctcccaaagtaagtccctttgaagcttctctaatgtgaggctcaccttacgaggaattacaaataaagacatgtagtagattgacggactagataaagtgtattttactacaatcaatctccctccttttgataagtattgcctcttacacaaagcaagccattttgaaatctttcgtccattgcatcccacatctgtaaagacttaaaggaagctcctaaatggaggtccaaataagtagaagggagagaacccactttacaccccaccaccctagtcaaatcctctatattagaaacctcccccattgggatcaactcacttttatccaaattaacttttaggctagaaatcgcctcaaaccacatgaatgctcaactcaaaggctttgattttttgtgacacttcagaacactagaaagcgcctccattgccacaatgaaaagataaggggatagaggatctccctgtctcaagtctttagaactttggaagaaacttgtaaggggtcccattaatcaaaaccagaaagcaaactgaggagatgcattgcctcatccactttaccaacttagctccaaagcccattttttctatggttgctaataagaaccctcagttcacatggtcataaatatcatgactacaatcatgaccctacacataagaaacatgtttggaattgcctagtttgatattgagaagatccgtagtcaaaatttgcagtatttaggggaagaatgcaactacaatgagaatgcaagatttttggatcattttggttaggaagctctctcatttttcccatcttgaattgaaagaaaaaccaaagggagaaactcaaaattttagaataatgaaattaaaataagaggttaggtaatttttttaacttttatttttcatttcttttgttaaaagcctagagtgatctagtcattttccagatttctgttggttttaggtgtacataattattagtaattttagttaaaaggactttggaattatgtatatggatatttcacaaattaatcttatccataatttgtagatcatttgagtttgaaaatttttcattttgatatttactgttctattggcttatttttaaacggtggatcatttcaaatttaagtatgtaggttatggtaatttgctctaacttctgttaaagtcttcacattgctcctgtccccaaggtgtttatgccaactttaaccaatttcattaatgccatctggaataaattttgctctccttaaaattatattggaatacaatatatgtattttatttatacacaattggggattagattcccctaaaatctcacctataaatcagagatcttatgcacatgttagctgtgatttggaggatagacatggacaaatgacacaaccaaaaactttgggaggaagtttattgaagctattgaaatgtggaaaaaattttgagtgtgtccaaaaatggagttttattttcaagcacttttgagggtagtcaattaatcaaatgagctaaagttaaggcaatctctcctcaatatgatttaggcatattttaatgaaaaaataaggctcaaatgatttctaatagatgtttatttttccgtttagccacaccaatttgtaacgggaattagtatatgaagattggtttataatcctttctttttcaagaaaagtagataacacctaattaaagtactttttcccattatcagatctaatggattttattttaacttcaaactatgtgctaactattttgtgaaagatagaaaatatagaactaacatttgatttgtttttcaagaggtataatcaattcaccctgataaaatcatcgataaaggacacaagaaggggaatgttgattctgtattacttaaaggaaatggaacatgatgatgcttagctaatcggccaacctcacaatgaaaattatttacatccaatttgttgaataataaaggaagcattttttgtgagcaaaaaaaatgatggatgctctaaacgaagatgatgcaaccatatttgagctttattcaatgagaatttttctgaaaaatgagagagtggcatatgatcaccgttgccaaaactggatctaagcaagtatagaccctcttatttcttagcatgcccaatcgtcctctccgtggctcaatcctggatcacacaatgagatgggaaaaaggtgattgtacaattcaaatctttagtaatttgatgaattgacaagaggttagttgaaagttttggaacatataacacaaaatttaatgtgagagctcacagttgctagtgtgccatcaacaacttcaatttttttatccctaggacatggattgtaagaagaaaattgatttgaagaaaaggtcatatgattagcagcacctaattcaaggacccaagtacttggaaaacagtcctttgaaacaccaagaacatgagaaatggcatacttagctgattgggcgagagaaactcttcttgttcaatctaccatcatttgaatcattagaaactgagattcctggttgggaattctcttaagattgagtaatatgggcttgagcattcctctgtctagattgtgcatatcgatttccattccctttaccaaattttttttgataggtaaagtaaattcattaagagccaaaaggcttgagaaagggtgtacacggagtataccaaatacaaagaagcaaaaagcaaagggacaaacaagcctgaaccttacttggtggctagccagtttacgaaatctatcaaagacaaagtgtgttcctctatatacaccctagcccaattcacaaaagtgtacaaaaaaatggatttaatatcttgattattcctctcaatatcatcgaagaccctcctattcctttctttccagatggtctacatcaggcagaggggggtagctctccaagctttctcccttttcttgcccacaaaagatccatgccaacccaggaggtttcttttcacaaaggagtgcatcacccattgcaccccaaaaagggagaagatcagaagccataacattttgcctttctcgcaaaacagaagaaggtgatctgtggtttcctcctcatatttacacaaaaaaaacctgttggggatgctccaaccaaatctcttcaggcggtcagtggtgagcagcctgctccaagccgcctcccacccaaagaagctagccctaattggaacccaaggcgtccaaatagttcagccaggaaggggggctttgtgccccttgagagtaagctataaaaagacttgacagaaaaggtcccattcttgttctcttttcaccggagcaagtcatccacacctcttctaatggtcaaaggatgagcttaataagctttctacttctcccacctcctaatcattaaggtgtctattaaaacgaagcccctagctacccccaacttcgtcttcctcccaagcctcagcaaccaagccttctttgttgacggagagatttaaacaagatggggaaaacttcttccagatattgatttccacaccacaagtccttccaaaacttcactctagtgccatcccctatgatgaagcgggaatgagaatgaaagttctcccaaccatttctgatgaccttccaaactcccaccccttgtcggtctcttacacctttggagcaccatcccccctcttgacggtcatacttactagagataagttgcttccatagggactcattctcattagtaaatctccacaaccacttcccaagaagggccctgttaaaagtagctagactacgaatgcccaagcctccttcctttttagcggcacaaatagccttccaactcaccaagtgaggtttattctctaaggctccaccgccccataagaaatccctttggatcttttcaagccttgcacacaccctcttggattgcgacttcccatggagtttccaacaagtctcctttgcttgcctcggttttttgcaatagacacaccataagccatctttgttgattggtgatctggacacttcacttcctctgtaattgttgtttgacagtatggagtttggcctaatagtgacaagagctgaatcttctgttgttggagtgtcaagcataacacttcttctttcttcttttgttcttataatggagaagacttcatttaggggagggcgatcttcttttccaaggacttgaaccttgacttgatcatattccacattaagactcaccaagaaatcaaatattcttttcctttcaacaaatttgagcattatggcagcatcttcattgcacttcatcttaatattctgatagtaatctaattctagccacaagcttttcatgatattatagtatttagtgacagaaaaagtaccttgcttggtagcaccaattttggtctttatttcgtagacgtgggcaacatctctcactttggagtatgtttgccgaacaaccttccaaatatctctagccattgtcaagaacatgcacgttcccctgatttctggttgcatttaattccacaaccatgacataatcattgagtcctcttcatcccatgcaataaactttgggctgtctttacttggaacaggtctaattagatgactcagttttccctttcccttaaaaaacgttcgcaccagtggagaccacaccaaataattgcgggcattgagtttgaatgaattttgtagattttgatattctgcagaagggttattgctagtcagattggatgatttctgatccattggacatatgggagcaaatcagaaatagtttttgtaaatctgagagaggggaaaattttacgagactatgcaggccaaaaaatttgaaggaaggagatgggcatcaacaatttctgttgctagcaatgaaggctgtacaagtgcagtgaaattctcagcaattaaggctaagaaaagaaaaacttagggtgcaaaagagagcactagctctgataccatgaaataaattttgttttccttaaaatcgtattagaatacaatatgtatagcctatatacacaattggggattagattcccctaaaaactctcctataagtcagggatcttatttacctatcttctattatcttgtaatctcccacataaatcatattttaccaagggaagaaaaggaaagaaataaatgcaaaattatttagaatctgtcaacaccatcttcttctgcatttgccattttctcaatttcatgtatttgttttatggatgctcaccttagttggatttgatttgctagttgcaatctgtcgaaatattaccaaagaaggctgt

SEQ ID NO: 13040 - DNA, 11268 bp, Vitis vinifera
  Intron number 1 from transcript GSVIVT01034499001 (locus G SVIVG01034499001) derived from phytozome v7.0 (chr-ID chr1 8; pos 20287509 to 20298776 reverse strand)
tccaacaagtcagcctcagtgaccctgttattgctgtaagctctttctatccatctatgtttctctcttttttttattgactggaaacatgagattggcaaatccctttagttgttaatagccgaagaaatttgtgctctacctggacctcaaaattgaagtcgactgtagcaaaatattttggagaattggcaatgggcattccaataattttgttgaatttgcagaaatttgaatgagttggttagaaaattggtgaatttgaatggtttattaaaacaaaagaaagaaagaagaaagaaattcagtggtccgaagtggatagaaaaatttggtggttcgtgaaattatgattcgggccatagtttgtgacttaactggcatttcctagatgcatacatccggtgctcataaccacaattttgtaaatgaatacaagtttctatcttaagaaattaggttgaactagagtgcagattacttcatttgattgttgacctcttttcactctacacaaattttcttacaccattttgttctatataggaccatattctttgggttagatcctgaggagcgaccctttacaccttgttcaatgtgacattgtgatgtgaccatcatttctaagaaaaaaggggaaaaagaaaaccctaccacaattccctttctaggtgtcctattgctgcattagttggcaagtgcagaaaaaaattgtatgctccaacttttctaacactttttgtcatgttttcccttcctcatccttgcattgcctgttgctggaatcatggaatttttttgatgtagtgagtaataggctctagttgtttgctgttcaagaattcttgtttaggcagtttataccatccatagtgttttgatctaagatttcaactcttccatgtttcagcagtagcatattgttccatggagctcaggtccaaaatatggaagaaacaagtgttttcacaactctaccacacaatcaattatgttccacataatccctatttcatggccacatatctttctagctaaggaatgaaaaatctttctcccgttacatgaatccaattttcatttcatctgggaaaaaccatctttttatcaacaatgtctttgtcatttgatccaatagccttgtgttagatagatgttacttcattggacacaacaaattttcctattttgttatctattgggtgcacactttggtaatgcaagtgcactaaatgtctaattctattattacttgtatgtctatatatccttttcagcatccttactgatgcaacatgttgttttaattgcataacattttgcactacaagatacagaaagtcttatagccagcttatagcaatttccttatacaagagacttcatttttatcttgatgaaaagaagtagtgcttttcactaagaactagcgtcaagggttcaagagttgcttctatatagtacatcctctaaattggagtgtaatggagtccaagtagggtttgaataaagttactttaatagtcatcgcatgtaattagttctaatgcctattgttgggtctcaaccaactactttatcatgatttaatctcatttcttgtgttgttttagttgctataataccttctttttctaaagtaataggttttttgttctgaagaagcgcaagaaccagaaaccccaggaaaatggtaactacaataagaattaacatcttgtagacatgacaagtgttgagtacaatgagaacaaccatcaggaactcgttttctgttgcactgaggttgaaggtccatgctgtggatactttagtgggcagatgtagtttggtggttgagtgagctagctttctaaatagtaggagtacaaggatgtgtttcaatcaccatttaaaggttgtttaatcagtagaactttacaagctactattgatcatagttgttaacttgtaaaacatatcgtctattgtttcctaatttttgtattatgtatcataagtttatatatatatatatatatatatatatatatagtgaaaataaatagaaaaatatgcagtggctatatattggaagcatgaagtgtagagtaatttatgattctataaccaattttatgaaatatagtcaggtttaaaaagttaaactatatcataccatatagaaacattaaatggtagtgttttgaaaagttcaattttaaaaaatatgagtttatgtataggcttatcacaaaatccaaaaaaaaaaaaaaaaaactttagaaaattttagatatgacttttagtcctaaactctaataagcatatgttcttatatgagttgatttatgtctttatgtttcatttttaaagttccaacttttcatggtcatcatctttcctttcccattgaaaaataaatccaatgtatatatatataatttttattcattatcgccatcatttttagtgtcaacattcaaactatgtaaatgaaaattctccaatattcattgtaaaaataaatttacttaactttctgtatggtccttagtataacttttatataagattattttacctctctcttgcttacatgatcaatttttatttatttatttatttttgtacatttaaccaattaatacaataattcttttaacaataaaaaaaaaagaatttttttcctaaaaattatgagaaatggttatgtatcattgttttttgttttttttttttttttcataggtaagaaaagatctattaaaaagaggcatcaaaagagcaactcaaggtatacaatacctatatacccatcgtcaaaccgaccaaaaaagtacaaataaacaagcacctagttgggcaaaaaaacaaccttagctagaggctaaccaatcaataaaactaactaaagttagagggcgatcagttataaacaacttggcctctgaccaaagggaaaaaacaaaaaagtatttgagtctctggattgacaacacatcatcattgaaggccaatctatttctcaccttccaaaccgtccaaaatatgtaaagaggagctgctctccatacctttttgcgccttttgcccacgaatgaaccatgccaactaaggagagtatctctaactgaggaaggcagcacccatgacaccctaaacaaagtaaagagcaaatcccatatgacccttgtttttgtacaatgaagaagaagacggtctatagtctcttccttctcatggcagaaaaaacatctatttgcgaaggtccatcctcttttttgaattaaattcaatgttgaagaaggtgtatgtatcatcgtattgtacacatatcataatatacatttaagataagatacaaattgcgatatgtattgatttccataaaaaattatattgtattgttgtacagtatcgttttgtatatcataagtttttaacaactatgtgactaataataagaatcaataaagctttactagaaactactagtggtaagaatttagtgcttctattctcctttctgatccatagagttcttgatttctgcttccacaagatctcttccaaaatggcccaatgagaatactttagtaaacaagctgaaccagaagctacctccttttgaagagcctccttttctttggtatcctattggcaaatatcatccaatgcacaagtgatgtaggacaaccctaggatggttgtctacactcaagggtaggtgggctagggttttatttttagggtgtaaggagaggaaaaaggaataaactttatggtagagaaaattataagataagaaatagagagaaagaagaaacaatgaagaaaagatggaaaaccttagagtctcactaagaccttctaggagtctcacctagaagaaaatcaatggagtctcaccattgagggttgcaaccttgcaatgaaagaaagtataatattattcatcaaaattccttcctttgatttacattgattagcctatttatagacttctctaagaaatccaaagtctactaggactctaataacctattctactaagactctaataacctagtctactaagactctaataacctattctactaggactttaataacctatcatgactcaaattctaattatattaatcctacttaaagtttacttaggtcttccctttcttccttgaataaactttaaaaggcttttccccatcaattctccccggcttgaaagaactcggctccgacgagttagatgcttgatacaattcatagagatcggggttaatcttctgaaaatccgttgtcgtaatccatgtattctcggaatgtggtttgcctcgccatttcaccaaatatttttggtatccaccttgtcgagtagacacaagttgatcatcaagaacatactcgatctcaggacgtgggctaagagtaggtggtaattgaagatccaactcttcacttacatcgttgtgatggccatggtagatatgtaaatcttccacattaaatattggactaaaatgcaagtttgaagggagctctaacaaataagcattctcacccaaccgctttagtacccgaaatggacccgctttcttagcttgaagcttttgatatgtgctcggatgaaatctttctggtcgtaaacgaaccatcactaaatcaccttcttgaaactgaatatatcttcgatgtgcatctgctgcctctttatagttctcattgctgattttgattttttctcgtaccttttcatgtatatctcgtatatgacgtgcaaatgcatcaccatcttggctggtgcggacagaagtaggtaatggtataagatcaacaggttgcttaggttttagcccatatgccacttcaaaaggtgagtacccagtagtacgattagtggagctattgaaagcaaattcggcttgtggtaagacattatcccactttctcaactgatctctcacaatgcatctcaacagattaccaagactgcgattgacaacttctgtttgtccatcagtttgaggatggaaagaacttaaaaattttaatcgagtacctagcttggcccacaaggttttccaaaaatagctcataaacttgacatcgcgatcagagacaatggattgtggtaatccatgcaatcgaactacttctttaaagaataaggcagcaacataagaagcatccgaagccttcttacatgggataaaatgtgccattttggaaaatctatcaaccacaacaaatatagaatcaaagccccgttgtgtccttggtaatccaagtacaaaatccatgctcaagtcttcctaaggtttggaaggaattggtaatggcgtatataaccctgtattttgctttgaaccttttcctacttgacatgctcgacattgtttgataaccttccaaacatccttctttaaactaggccaaaagaagcgatcttccaccaaagcaatggtcttatctcgtccaaaatgtccgcccattccgcctccatgaagttcccatatgacatgatcacgtagagaagtccttggtaagcataaacgatttttataaaacaagtacccttctaaaatctggaaatcaatacatgttacttttgaaccactcaaaagagaggaataaacatctccaaaatcagcatcattgtcatagcaatgctttaattcttcaaatccatttgtagtggttgacatgtttactaagagaagggtcttcctgctaagggcatcagctactttattttcaatccctgcacaatgccttaaattaaaggtaaatagttgaagaaaactactccattttgcatgtcgagagttaagcttcttttgagaattaagatatcacaaggcttcatgatctgaatacaaaacaaattccttgtaactgagataatgttgccaatgcctaattgtttgcactactgcatagaattcaagatcatatgtggagtattttttctttgccccattgagcttctcactaaagaaagccacaggatgtccctcttggctaaggactgctccaattcccacatgggaagcatcacaggccacctcaaatactttctcaaagtctggtaggcgtaggataggagggttcaccatcttggatttgatttcttcaaatgccttgttggccgccttggtccaaataaataaaccaggtttcatgcattcagtaattggggccataatagagctgaaatttcgaataaatcgtcgatagaatgtagccattccatggaagcttcgcacctcatggatatttgttggtactggccaatcaacaatagctttgatcttctccggatctgtttcgacacccttagaagacacaacaaagccaagaaatacaacactagggctcatgaaagtacattttttcaaattaatgtaaaacttttcagccctaagagtgcgcattacttgcttcaagtgttcctcatgatcttcacaagatcgactatagataagaatatcatcaaaatagacaacaacaaaccgtccaataaaaggttttaatacctgcgtcataatccgcatgaaggtacttggagcattgcttagtccaaacggcatgactaaccactcatacaatccatccttagttttgaaagatgtcttccattcatcccctggtctaatacgtatttgatgatatccacttcttagatcaatctttgagaagattactaatccaaccatcatatctagcatgtcatcaagtcttggaattggaaatcgatacttgattgtgattttgttgattgcacgactatccacacacatccgccatgatccatccttctttggtgttagtagggcaggaactccacaaggacttaggctttcacgaataaagcctttagtaagtaattcatcaacttgccttttcaattcagcatgctctgttggattcattctgtaggctggtaaatttggtaatgatgcaccgggaatcaaatcaatggcatgttgtatgtcacgcataggagggagttcattaggtaactctgcaggccataagtcagaaaagtcatcaaggattttacgtgcgtttgctggatattccttatcttgttctttaaattcttccactttccaagccattaaagcaaaaataactttagtttccttgctctcattttcaaattgacacatagtaagtaccttttttggttgtgcattctcatccgacttcttaattggagggacttctttcattggacgaaggatcttcttacgtccgttgtgtatgagagcatatgtattttcatagccgtcatgttgaacttttctatcaaagagccaaggtcttccaagtaaaatatgacttactttaatgggtaagacctcacaccatacagactcttcaaagtccttaccaaaaaggaatgttactaaacaacgaaaacttaccgggatagaggtgtcattaacccatgctactctgaatggatttggatgtctctctgttttaaggtttagcttctcaacaagttcttgtgaagctatgttcaaactgctacctccatcaatgatcatggtgcataatctcccttggcaagaaatacgtgtttggaaaatgctagtacgtcgtcaatcttcttctccttttacttttggaacggttaataaaggtcgtactacaagactatatccttccgtcataccatcatagtagtcacattcttcactaacttcatcttcattgtaggtctcttcttcctttgggtaactttccaattcagattctggttcttcaacacaaaagtgtaaacttttggttgggcatacaacagcataatgaccatgcccaccacacttaaagcataaaggagtcacatctacttttctatctccattactcattgaatttttacccttattaccattcttataagtcacattcgaagtttgttgagtgttgcccccaccattcacatgattaggagttctgaagtttgacgtgcttaaaggtttgcttgctgtcctgttggagaaagtgctcccaatttgtgaacttggacgcctgaaaacccagaatttgaggccttcttctattttgagggctagttgataaacgtcatctacggtataagtgtgtgcagctatcatctcaagttgaatctccattcgaagtccagctttgtagcgggctgcaagttgagcatcactttcccgcacttgatttcgaatgctcaataattcatggaattcttctgtatattcttcaacggacttggtgccttgtttaagggaaaacaattttgtatacataagttgttcataatcagttggaagaaagtgctccttcatcttcaacttcatctcgtcccatgtgtcaataggcggttggccagttctatgagcttgattctcgatattatgccaccatagacgtgctgctcctttcaactttgccttcacaaaacgaacttttctattttcgggcattgcataccaatcaaagtaatcttccattgacataatccaatcaagaaaagctgttggatttagttttccataaaattcagcaacttcaagacgtaccttttttgtcacatcatcatctagctcaaaaagtttggcccttctttgattccccatcataaaattgtcttgttcttcgcgtgatcgatttggcgattgtctaaattgatgacttgcgatctcctcttcaattggtcgtttttcttggctcttttctaataacttcatgatctcatcaagtttgctatttagttgtactatagcatcttgatgggattgttgtgtggctgaaatttcctccaagcgtattgtagcggcatcttgattgctagaagtttttttggaactcatacttgcataagttgctccgctccttaattgcatatgccttcaagccaagaattttggctctgatgccaaaattgatgtaggacaaccctaggatggttgtctacactcaagggtaggtgggctagggttttatttttagggtgtaaggagaggaaaaaggaataaactttatggtagagaaaattataagataagaaatagagagaaagaagaaacaatgaagaaaagatggaaaaccttagagtctcactaaggccttctaggagtctcacctagaagaaaatcaatggagtctcaccattgagggttgcaaccttgcaatgaaagaaagtataatattattcatcaaaattccttcctttgatttacattgattagcctatttataggcttctctaagaaatccaaagtctactaggactctaataacctattctactaggactctaataacctagtctactaagactctaataacctattctactaggactttaataacctatcatgactcaaattctaattatattaatcctacttaaagtttacttaggtcttccctttcttccttgaataaactttaaaaggcttttccccatcaacaaggcttgttgatgaccatattaccaaacacttctctattccacctttttaaatcttcctcaggggttggtcaggatgaaactaaaagaaccctaaactaatagctaaacatcaactttccaatactacctactttgaaccacatgttcttaacatgaaaagacaactagtactcatcaccccccacaatcaagaagggtaggggaattatcagagataggcctaggactaggaacaatattttgagaaacactagggaaatgctaaatgctccttcctatctggggaaactaagaatgatctagatgtgacaatgattaactgtcttgaccaccacactatgtaaaagacctttccacccatggaagacccaccaaactaccaaaacccaccccctcattgttgaagtcctgaggcaaaaacgatgctctcaagggaaaggaatcaaattaaattctctatcaatatgccatgggtcttccgatggtcttctgactgcaccctacttgttctagaagtctctatgcttgggcctaacctctggactgtacacctcaaaagaattcatatgaaggcaatgggtcatgaaattctgttcttacatatgatttcttaatttattaagaagtaatttgtgggataatggacctttcttttgttgttataaaagaaacaaattacagaaagttggaaaatcctcacagtttataaactgacatgacaatttgaaggaaccctcctccatttctaactattctacaacacaattgtcccaaaacattatcaagccaccagccctgtactgagcattaacagcttgttattccagaaactgacttacctccacaatcctcaccgctttcagagacattgactccagtttaaattctttgaggcaaaccaggtcagccttatgatcctttaaaaaggatttaacagttttcacatttttccaagtcatttagccctctgacatgtcagataatatttctgagctgcattagtccactttaataagagatcaatccttcacactgctgactcttctacccttgttatcgtaagtagccaaaaactccagcttgcacaattgccatccagtgcatgtattccccctgctcctgttcttaaccgaacagccagaaccttgtatccaccttgcttacattttcatctccaaatccagttatttcttcttcaaaaccatccatcgccacacctgctcatttacagattccacaattgtattttgttttttcgctcccttagaagacagactcttcccttctaaagggaatattgactgagcatgctcaaggttggcaggtgtcaacaaatgtcactggctccaggaccacaggagaatcaaagaccgaaaggatcccaagcactccacaaagaaggcccagctggagatctcactaaattcaggggaactcaaccaacctccccccccttaaaaataatgagctgggtggcctattatacagataaaaaaatccatgacatgagtatagaatcctctgtatcccacttaaaataagacagatttgaaacatacacgcacaaataactatgtgtctgccttctaaacagtaatgcttgtattcatatttattcagtagggataaaactgtcatgttgtcataagattcagatcaaactatttatttctgaggtgattttttcttttccagcttcttaatgtggttgaagttgctgcatctgtcttttcatgtactgaattggttctgtttttgatttcgatgaagacttatgcttttgtttatttttggactgaaatgctgggcgcaggttattg

SEQ ID NO: 13041 - DNA, 5310 bp, Vitis vinifera
  Intron number 1 from transcript GSVIVT01009918001 (locus G SVIVG01009918001) derived from phytozome v7.0 (chr-ID chr1 8; pos 12371570 to 12376879 reverse strand)
ttcggctgttaaaaggtattatgggaagaaaaaaataataataatgaaaactatttttttatagttaaataaatataaattttttggtacgaaaaaaataattaataaatataatttaattattttcattattttttcaatgtaaatgcaataaatgaaaactattgttataaaatgtttttcaaaattgtgttgtacttaattagactttatatcattcaattctcgatcatgaattaatttgaattataactcatatattattatttatgatattattgtataatattttttactatttttatttatttttatttttacttttacatctttttatttcacttgacttaatatattttcatatattattaatgtaacgatgaaataaaaaacgaaactaatatcttatactattttcaaagttgtgttatcctttattagactttataccattcaattctcgaccataaatcaatttgacttataactcagatactattatttatgatattaatatataatattttttactatttttatttatttttatttttatttttatatctatttttccactcctagcttatttttatatattaataatgaaacgttgaaatataaagtgaaactaatatcttatactattttagtattttgatttatttttatcttcttattaattttgtttttttagttgattgtcattgatatttaattgagtttatgtaatgtttaaatatcaagaaataagaaaattaaatattttaataatgaatattagattattagataagaaagattttcatgtgaggtgatcgtttccctttatttttcatttttaaaaccattcgacggatccatgttatgtgctctaatttatttatgattttagatgttacagttgtgctaatgatttcattggatgctactgttgacctgattgattcgagttagctgtatctgacggtccacgtatctaaatttattttctaaaatgttttattttattttaaattatccctttatttttatatttgtagtctttacatttatttttatatttgtagtctttacatttttttttttatattttttttaaatttataaatatttttagccacttattttatgagttatggtttaagatacttttagaacttttggtttttaatttatcatttttataattgaatatgattaaagtatgttttttttatttttagtattttaattaaagaattcaagataagaatgattatttgtttttattttaatatttggtaataataagaatgataatggaaaataaataaattgacaataatactcttacacatagtttttttttttcattttaaaaaataaactttgaaaggttttttgttactaaataataagattaaaaaaatggacttgttatgagatgatgagacatccaatgaataaaatcgaagggtaaaatagtcattttatattattttatattttcttatgaaacaaaatatcaccaacttgcgaaaaattgaagtgctactcataagtgtgatttgatttatatcggcataatttgtgggaaaaatgaattttgattcactaatatgaaaatatatgaaaaaaaataaccccaagttttttaaattattgttattttcatctatttaaaaataatttgaaatacattatttaataagtcaaataattatttcctaaaatgcccattttacttataaattataatgtcatcgacaccaattgacaaattttagatacttaaatatttttcttcattttagatatgttttattattattatttgaaactttttttttcataaacaaacatcacatagcaaaagtgaggtagtttgaagagtgttgacattagaagtagtgaatcttggtaaactgtagatgaatttaagttttattgagaataatgtctatggtttttctcattgatctctttagaattttttccactatagcaagttgaggttaatttcaaggattctagttatttgaacattttatttgtttttaaactttaccttcaattcaaaagatttatatacgaataaaaggtaatatattgttgtttttaaaaaaatttcatgtaaaattcttgatgtgattattggtagccaagaatgtttgaaaagaaagaaaaaaaaaattgtcttagcatgttatgtaacattccccttttgtttataactctaataatttgttgtcactttagtagtttgtgcaaattgtttccaattcctgtcttgcgtttgcactttttctatgttcacattttctcatggttactaaaaataaaaaaccaagatatcaggtcatccataattccatatggattaaaaatggagttaagacgattactaataataataataataataataataaacatatctaaaatgaataaaaatatttacttgaaggagtttagttgtcaatttttattgataacatgataagtaaaataatattttggggaataattatatgacttattaaaaaatgcatgtattttaaataaatgaagacaataataatttaaaaaagttgaagttttttttaaactatattttcatattagtgaatcaaaatccactttttccataattttttttatactatttatactttcataaaatttgttaaacatgagaatgaaggtgggaaggaatgagacgtctattctcattacccgttatcataccaaacaccccctaaaataatttaatttggataagaaattaataaaaaaaaataaatccaacaaaagtaaaacaaattaccacctatctcaaattcaaggaaataccgacttattatgatgtcacttattagatcaagtttaagaatttaatctaaaaatcaatcagtagagtaactgattttactatcatttggtaacctataatatcttaacaaattaatgattatcattttttttatcataaaaataaattttgatattttaggatatttgaaaatatgttaaattattattattttaggattaataattttaaaatcaaaaatcaatataataattataacataggtaaaaacaacaatccacgtttaaatatgaataaaaataaataacttaacatttaataacatttagacaccaataaaaataaattaatttagaaatttaagagatatttgataaaattaatatttattattttaaattattaaattgatttatcaaacacttacttaatgacatttaattttatttaactttaagtcaaattaaattatattaaaattttaaagtcagaatgaaaatatcatattttattaaattaaaaaaaatgcatttatagaaatataagacatgtttcttaaaaacaattaatagtaattttctcctaatttaaaaaatatatttactgttatgaaatacgagaagattattctcgaacactgttttgcgataactaaacagaaatcgcatccatgagacatacacttgccctgcataaaattcttaagcaacttcctgcttctttcgaatttatatcactgttggacgtcaaattcgatattgagtgatatccagcggtctgccattacgctaatggcgcctttaactcggccattatcatggcccacaccgcaactcctgcgtcggctatccctctcctctctatatggacggcctttgcactgcccaaacttaaacggcccaatactgggctttgcataatatgggcccagctaaaaacttaagcctgaatacgaggcccactacgatgattcctcatttttacaactagactagtagtggacaacgatgaagaaaaggtgctattgctgtggcgtgtagagactagagggtggaaggctggaagcttgattcttggtgaaatcctatggtactttgacaaattcaaatgcagcttgaagttattttgtcatagctactagaaaatacgtatatattcttagttgagaacgacattttgtcctaaataagcattaagaacaaagagaaaaggacaatttcgaggtagtaggaatgactctgtggatatatatatatatatataatcttggcgtggtgagatctgctacatagatttgactagacggctgcttttatatttactcaaaatggaacgtagatattttgattaaaataattaagaggtaaaaaaaacgtgaggtttaagtaaaacttaatatttattatttaagaaattaaattgattttaagttaaattataattaaattattaatttaaaatttattacttaattattattataagtaaagtaacaaaggagatcgtaaaggcaattaagataaataaaagtaaaaagataaaataaaaatatgaggttaaaaataatttaattgattttatttattatttaaaattattttttattttaagtcatattattaagttattttatgaaatatattaatttatgtaagttattaaattattttttaaagtattaatttgtttatcaaacatttaggtggtatttgtttttttggttttttactgaaagtaatttgttttcaggattaaagttgtttgtttttctatttttttttataatttattataaattttttattaagtataaaaaactaaaatatgttgttgttttttaatagaaaaaataatatattaatttttttttactttttaatacttaatagaaataaaatactacaaacatcaccttaatttgttaaaaaaaaaaaaaaaaaaacaattttaccggtaaaggtacgtgaatttatttattacataatatatatatatatatatatatatatatatatatatatatatatatagaaacactaaggaagggggtgcccaacaatgggatgtagtaatgacgggtatgcttcccgccaaatgaaagtgaaggcaaggcgaaggaaggtggaaaattggtcatttttgaattttaaccgatgtgatttgtttggagttgaaacaattgagaagacttggccaaaaaagcgcaatgctcctccctccgttattaatggattattcaaatgagggagggagtattaaaaaatttattttcagtccacggtttgcttggacatggcaacatccaaagccggccatgctccttcaatccaaaaccaaaagccgtcctctctctctacaattcaattcaaaaagagagttcactctccattttgaatctcaatggagtattctggagagactgatgagtaggtggctgattgatcatccatctcccattacgagattacagtaagcatcgttctccgctctttcagtca

SEQ ID NO: 13042 - DNA, 12236 bp, Vitis vinifera
  Intron number 2 from transcript GSVIVT01013666001 (locus G SVIVG01013666001) derived from phytozome v7.0 (chr-ID chr1 8_random; pos 2186192 to 2198427)
cagagcttcggaagatattggtagaactaggccctgtatgtctttcttctcaatcttaatgtgttttcaaacattttttggatttatttatttatttttatatatctgtacgtattttcattattgttcttatgaagttcccttttctttttatttttaaattttgtgtgcattcacctgcgggttctctggagtatgtttctgtgaacttttttgaacctggatcaatgtgattggattatattttaaggtattttaaacttcgttagtgtctcttaatccacatgtcttctggtagtgttttttgaataagacatgcattcacattaggatcatttaactttggtcctctttcttgtgggtcaatattttcttatttaggctgaatgactatatggagctctcaaaactagttgtaactgtggaaatcctgaaggtacagctgtatgcacagctgtaccacatagctgtaccgccatctgtatcgcatatagttgtttccgcttctaattttatttcctgattttatgagaggcttcctctaaaatcaaggattagatttcttttttagggtagatgacctcaatcattcaggtatacatatcgatgcaataataagtttgaatagtgtgaaaaaataaaaagtttctttttcttcctcaaatttcttcatggtatcaaagctaattctgaaccattcaatccgtccatgatcaaatacggaatggccaccaaggactcctcaatctcataagtcacctccactgaagaagctcctattccaagcaacaatggaggattagatggtgttgctcttctcattattggacacaaactaaatgggcaaaattatcttcaatggtcctatgcagtcatgatgttcatgtgtggtaaagggaaggatggctaccttactggtgcagtgccttgacctacgaaagaagaactgaaattccaaggatggaagactgagaataatatggttatgtcttggttaattaactcgatgaacaatgacataggagagaatttcatactgcatgaaatgacacaagaaatttgggaggcaacaaaggagacttatttcaatacaaaagacacaacagagacatttgagataaaagggatcctcaatgatttacgccaaggtgagttgtttgtcactcaatatttcagttttttaactcgttattggtaacaactggacatgtttgaaaccaccaaatgggactgcccaatggatgcaatcaaatacaaaaagaatgttgagaagaaactaatctacaaatttttgttagaacggaacaaaaatctagatgtagttcgaggtagaatattgggaattaaacctttacctaacatctgagaagttacatcagaagtgcgccgagaagaaagtagagagaaagtcatgttggggtcacaaaccaatcaacctgtcactgagggttcagcccttgtggctcaaggtcctcccaatccttctaacgacaattgactaggaaaaggaagaccttggtgtaatcactgccaaaaaccaggtcataccaaagacacatgctggaaaatccatgggaaaccagaggattggaagtcgtcacatcctcaaaatgatagagaaaattgaggacaccatgtcaccgtagaggacaactctaattccagtctgttcagcaaagagcaattggaattgttgcaaaaaatgttcaaccagtcctaataggtggtaaattccttcaattccatcatcgggcctggatccttagctcaaaaaggtaattttgttactaccttgaaaggaaaaatggaaaagttgagtccttggattgttgactcaggagcttctgatcacatgactggagatgccacaatttttcaaattatacacctgattctaaggattatatggttcatatagctgatggttctctctcaaaggtggttggtacaagtcttgttgtcatctctaaggacctaactcttgactctgtttttttagttccaaacttggattccaatttgttgcccattaggaaactcacttaagaaaagaactgtgttactaaatttttcccaaaccattgtgtttattaggatttgaattcagggaagacgattggcaatgttgaggtgtgttcaagactctatatctttgaagtgactgattatattaaaagacaacctcaatcgacagttggtgaaaaggggtctttttctgtctttagttttaataaagatagtaatgttatgttatgacattatcgtctagtacatcctaatttagttagtttttagtgtgaaatttgttaattattatccaagcatgttggcaagccttatccaatttaaccatacaaaccatctcatcctttttctatgagacatagtgatgcttagagattatctaagataaagaacataattgaaactagatgatttatgtcctttgttgatgatcatactagaatttcttagatattactaatgaaagaaaaattagaagtgggtcaaatcttcaaaaaattttataatatgatccaaactaaattccatgccaaaatgcaagtattgaaaactgacaatgcaagtgattatttcaattttatccttggggaagttttattaaaagaaggtatagttcatcaaagttcctgcattgatattcctcagcaaaatgagatagcctagaggaagaatagacacttgttagaagttgcaatggtcctattgtcaaaggatgcttcaaatgaccctccccatgggcttatatagagcccaagaaacttctggaaactcctacacttagccattagtgggaagagtgtggaaggttctacaaaagcttagagaaatccacacatctctacactatggtggaagacatgagaggagtccaaggctttatagagaattctaggaatctcttgtatattcttgcacataggtttgtacataaaattatgtagggtgttctacaatcttcttgatttgtaaggaaccctccaaggttccagagagttccattggtgcctataaataggcgagggcctcatttggccaaggcaccacccaagaacctaaccaaccaaggaagtgagtccctaaaagcacttgtaaagctttctttgagcaataaaagcttccattctttaagtgtcgcctactatatcttctaaagcttccaagtcgtgagcatcttagcctaacaagctaagcattgggagtaaggctgacttagcaagatcaagtgtcttgacttgtctaagtgccgcacgagcttaggaaaagactaagtccgtgacaagtggtatcagagcgcgactacgaagcgggcatagtaaaggaagcatgtcgggccctaacgtgaaggagattagcaagcaaacccgtaggagggagaccgagcctgctgcacggggcaggggtaagaaggataaatctcgtgatgccgttgccaatatggaggcaaggttagctaaggtggagctagccatggcggacactcgggaggggttagacttgatcgagcaaggcatagagaaaggcttagaggatctaagggagtagatcgaagatcttcgtgagggggtgctagtctcataggttcaaccagtgtcacacgaggagtttgtgtccttccaagaaaaggtcttgagcatgcttgctagcatggagtcaaggatagagaccttggccactcgaatggagtctcgagactaggaggttaggcaggagttggccatctacaaggctgctgtgtcggcatgggtcatggccacataggaggcatctagggtggaggtgtcgaagccacaagggtttagtggcaagcgggatgccaaggagttggacaacttcttatggcatatggagcgatacttcaaggctatcacactgactgatgaggcggataaggtaagaactacaaccctttaccttactgacacagctactctatggtggcatcggaggcttgccgatatggagaaagacatttgcaccatagagacgtgggaggacttcaagaaggagatcaagaggtagttctaccccaaggacgtggcttacctagctaggaaaaacatgaggcgtctcaagtacataggctcgatatgcgactatgtcaaggaattctcttcgctcatgcttgagattcttaacatgattgaggaggagttgctattcaacttcatggataacttgcaagggtgggccgagtaggaattaaggcgccgaggtgttcaagacttagccattgctatggcaatagcaaagtctttaacagattacaagaggggagactcctccaaggttgagtctttggaagatagctacgccatgggtgggggaaacaaggtttcaagggattacaatgcttctagaatgggatcaggcaagacacctaacgttcgggaaggaaggggtaaggcagaaaggaagaagtttacgcctaaaatcaaatgcttcatgtgtgatggtccacattgggcacgagattgtccaaagaggaagatgctcaatgccatgatcgaggagagggagtaggaacacgaagcacatatgagctcaatgtagctgctaggtgccctctaagtcaacccaaagcctagtacgcctaagacctccttactatcaggggtgcaagtaaatgaggcaaaaggggagcgagctgaggtagcccgcacacacatggacaaggtcaccaaggaaaaggtgaactcaatgggtaagaggaagcaacactccaagcatcgaaagtgcaggtgtctgcatccatccaaagcctcacgagaaaagaaggtgaaaaatatcctggctgaacgggtcacaaggagacaaggggtcctttttgtgatagagtatctagtccgatggaaagaactacctaagaggcaggtaagctgggaacatgcggatgccttgagaaggttctggaagcacatcgagaggtttcaagaagaggcaacaacggggatgtcgacggcataggtgggggagagtgtcaaaggatgcttcaaatgaccctccccatggacttatatagagcccaggaagtttctggaaactcctacacttagccattagtgggaagagtgtggaaggttctacaaaagcttagagaaatccacacctctacactatggtggaaggcatgagaggagtccaaggctttctagagaattttaggaatctcttgtatattcttgtatataggtttgtacataaaattatgtagagtgttctagaatcttcttgatttgtaaggaaccctccaaagttccagagagttccattggtgcctataaataggtgaggctctcatttggccaaggcaccacccaagaacctaaccaaccaagcaagtgagtccccaaaagcacttgtaaagcttcctttgagcaataaaagcttccattctttaagcgtcgcctactacgccttctaaagtttttgagtcgtgagcatcttagcctagcaagctaaacattgggagtaaggttgacttagcaatatcaagtgtcttaatttgtctaagtgtcacacgagcttaggaaaagactaagtccgtgatactatgctctcctcccatgtcctgaagaatttttggggagaagctgtacttactacaacctatcttattaatagaatgtcttcttatgccttgagtttccaaacactatgcaaagtctttctcaaatcatgccctaggacttggctcatttcctcatttccattgaaggtatttggttactcagcctttgttcacaatccttaacaacattgaagtaagcttgatcctagggccactaagtgtattttcctaggatactctccaagctagaagggttataagtgttactctcccatcacaaaaaggttctacacctctatgcatgtgacattctttgaaaatcaatcctattactctaaaaccgatattcaaggggagaatagaatttgggaataccaattttaggaccgtaaccgaacctcaaacacttgagtttgttattgctcacaactccaaccctatttctcctgcttcaagtctctcactccaaactactgaatttgtagacatcgagccaagtactcctcatccaaaccaatctcagactgtcaatagaagtgagttcattgtctactcaaggaaaaagaagaaatctcaagaagatatagagcaatgaactcattgtgaactagtacatgaaattgaaccaaattcagtcccaaaagggacatacttaagtaacattgattcttatcttaatgagttagaagatgatgagctcaatttgccaattgccaaaaggaaaggagtaagatcttgcacaaatcatccgatttataacttcatctcctataagagtttgtgaccaaaaaatcgggcttttgttaccaatcttacggatattcggattcccaataatatccaagaagctctacatatacttgaatggaagacattgattgaggaagagatccgagctcttgaaaagaatgggacatgggagtttgctaaactttcgaaagaaaagaatccagtcgggagtaagtggatctttatagtcaagtacaaagcagatgggagtgttggtaggtacaaagctagactagttgctaagggatttatacggtcgtacaaaattggctaccaataaacctttgctctagttgccaaattaaacacaattcttgttctattgtcgttagccattaattgagatttgcctcttcatcaactggacatcaagaatgtcttcttcaatggtgacttagaagaagaagtatacatggaaattcctttaggtcttgagattgaggcaaacattagcaaagtttgcaaactaaaaaaatccctatatggtctcaagcaatctcctcgagcttggtttgatcgtttcaccaaggccgtaaagaggtttggttactctcagtgttagtctgaccacactctattcgtaaaacttaatgttgagggaagaatttccattatcattgtttatgtggatgatattatcctaactgaagatcatgtagaagaaatatgcaagcttaagagttttcttgcccatgagtttgaaattaaagacctagggaatcttaaatattttcctaagatggaaattgttggataaaaaatgggtattgcagtctcctaacataagtatgtcttagacttgctaaaggagactaggatgcttggttgtaaacctacaaacacacctatgaactacactactaaactaggaacagttaaaggaagtgctttagtggataaagggagatatcaaagacttgtggggaaactcatctctctcacacacacaagaccagacattggtttttcagcatggttggttaattcatgaacaatccaaccaaagaacatatgaaagttgtaaacctacaaacacacctatgaactacactactaaactaggaacagttaaaggaagtgctttagtggataaagggagatatcaaagacttgtggggaaactcatctctctcacacacacaagaccagacattggtttttcagcatggttggttaattcatgaacaatccaaccaaagaacatatgaaagctttgtatcatattccaagatatttcaaaataactccaggaaagggactttatttcaaaagaacacaaaagagaaacattgaaattttttcaaatgcagattaggctgattccataattgaccgaagatcaacctcaagatattacacctatatatgagggaatctggttacttggcgaagtgagaaacaatccgttgtagctcgaagcaatgcatgagcgaaatttagagttatggttcatggaatttgtgaaggaatgtggttaaagagactcttaaatgaactgaaaattctaggagaagattctatgaagatgttctgtgacaatcaagctgccataagcatcgctaagaacctagttcatcatgatcggatcggacaaagcatgtggaaatagatcgtcattttatgaagacggagatagaaaatgggacgatttcattggtttacactcctccaactctctagacagtagacattcttactaaggcgctttctagaaccaactttgaagacttgagttccaagctggaaataatcaacatttacaactcagcttgagggggagtgaaaatccagaaggtatagctgtgcatacaactataccgcatagctgaaccaccaactataccgcgagttgtatctcatatagttgtttcctattctaattttatttcttgattttataagagactctcctaaaatcaaggattagatttctttttaaaggtaaatgacctcaactattcatgtataaatatcgatgcaataatcagtttgaatagtatgagaaaaataaaaagtttttttttttttttattcctcaaatttcttcagtaactatagaattgtacttttagagatgccttaaaatggaattaagacacaacatccatttattttacattgaaatgtttcttgattcagcaagtaaggtgtcacaggcattacattaagttaccataagcaaccattttatcctcaattttgcatttttggaattgcaagtttgagaggaaatttttgctcactgtagttctcaagaagttctagaaatatgtgaaaaacatgtaaatattaatatttattggaaatattgaaagagacttgatttacatgatcacccgatataatatcgctggaaaaacaatcattcaggacactggttgaagcctaaaatgcgaatattaatactttgaatgtcccttatacggtccaagtttaaatccacaattacagtggaatactacatgagaaactctaatagccattacatgctatgctgtttaagtactatacacttatttttatgtacttaatgttaagagataagtttattccatttatcatggatgtaaaattaatgtacatgcagatacgaaaatccctttgttttattttagtatttcccaagaggcttattcaaaaactaagaaggatagttgcttcaagaatttagcctcaaatattattttagtatcttaaatcagtctctctaattaaaaattcctggacttgctctaagaattttataagatgactacttcagttataaattttgttttttcttgctaaatggtattaaaacttttagaattataaaacggtactgatgtaattattaatgtggtcacattccttgtttttatttttattttttggttcattacgaaagtgtagaaatttaactcaaagaatattatttaatttgatatataagggtggttatttggattgacaattatgggtacacaggacggacagatgtgaaatatcacagattcaattgtttagcatgtatgatataggctaggggcctcctatctcttggtggaggttgtatttagtgatggttctttcttgagtggtaaatagacagggatctcatcgttgtccttggaaggctattgcacaagtctttcaggagttttctaagtttactcggtttgtggtaggagatgggaaaagaattcggttctaggaagatttgtggtggggggaccaacctttgggatcccaatatccaagactatttagagtagtctcggataaaaatatttctatttcttcaattctcggttctactcgtcctttctcttggaactttaatttccgtcgtaacctttccgattctgagatagaagatttaaaaggcctcatgcgattacttgatggtttgcatctatcaccttcggtttcagatgtgagatcctagcctatatcttctttagggctttttcagtcaaatctttatttctagccttatcccaattttctggttctcttccagcttttcctactaagttcgtttgaaattctcaagtccctttcaaagtcaagtcctttgtttagttagtggcacacaagaaggtaaatactaatgacttgctacaattgagaagaccctacaaagctcttagtcttgatatttgtaatatgtgtatgaaacatggagaatcaacagatcattttttcctacattgctctttgacgatggggttgtggcacagattatttcagttagccaagatggattgggttcccccaaggagcatcttcgacatgctatccatcaattataatggttttggtttatctaagagagggatagttttgtggcaagctgcgagcatcgttttaatttgggttttgtggcgagaaaaaaatgcgaggattttttaggataaagcaaagaattcagagtatctttgggattctattcgtttccttgcttctctttgggctttctgttccaaggtttttaaggggactccccttaatgtgttacaacttgactggttagcggtgtgcaattccaaagggttggtctaatctagagagtttgtttgttttttttgtgtattttcttgtttttgtattcttgtagtttagttttctttggtgggaggattcctcatccttctcttgtactccttttctctatcgatatatccctttgtcgtttcttatcaaaaaaaaaaaaaaatagacagggatctcatggctggttttttggtttctttttttttttcttggaagtctttaagttgcaaatcaggaagctaatattgacattgttggggatttcatgcagctgtaagttggggatccattctttaatctttggttctgagttgggacgcgagagtggctgtttgtagggagctatgttttttctctagtcttgtagtgaccaccctgcatatttatgcttccttttctgaagggaaccccttgcccttcatttatatcttctatttaacatggttacaagtatgctttctttttaaaaaattatggaggtcaattagaaaaattaccttaatatgatgttggtatgattccccactgtattttttattttttctttcttgaaaaaaaaaaaatccttctgggcagcctgaaagtttcctttttgtttgccctcaagacctagctcaagtggtaaagggttggggagggtttgtgggaggttttaagttcaagtcccaatggggacaaaaaatttacctatccaaaaaaaaaaaaggcaaaagtttcctttttgttttctttttatctttacttttgaaataagggaatcttttccttcatttttctttccccctctctttttctaatatgagcccaccactctaccttacagcactgaaatgctgggaaggctcaaaatcgggaactttggttcaattctagttggcattaccattaaactacatcctgggggcaaaaccatatccttcatttttacactttctttattagtagtattctatgtttcctataagtataaatgaggaaagtatgaaatttcccaaccctatacccagttatctgcacaatgtggcagtacaattgagtggaaccttcttggcttttatatttatcatgtgcctgaaatgattggagagcctaaaaataatctaaaaaaggccaatggaagttgtttcaatgacactgccgctacatttaattttaacataagatttataacttgcctatccgaaaaaataaaattatagaaaagaaaagaaaaaaattcaataatgacacaagtaattaaactggatagaacattttttattgaaagacgggaaacagaaccagtgtaggtcgtctctaaacaggaaaaggcaggtttgctgctggatgttatcagtagttttataatgagttatgaacctcggcatgcttgatcaaataattttacttatacagtgacctaagcttaataaactctacatgtcattctgcccattgtgataatcaaggccccttctacaatgcctacattttgttttgggatggttactttactggaaaaacaaaagaaacattactacccaaatctctttgggaggctttcaacatcatggattctcttcctagaaaaaggtgtcagtagagatgtgttttgtacattcaagaatattctaacaagtttttgactttattttcttcattcattgtcgtccttttctttactggttcagaactcaactttcacccatctttgaagtctaaaatgtgaccatctactcatgtatccaaagccaggtaattgggattactacttggttgagtttttatttttacttgttttgcaggcatatatcaaaattgctcaagctatctcatctcg

SEQ ID NO: 13043 - DNA, 5705 bp, Vitis vinifera
  Intron number 1 from transcript GSVIVT01034461001 (locus G SVIVG01034461001) derived from phytozome v7.0 (chr-ID chr1 8; pos 20965148 to 20970852 reverse strand)
gtagccaatctggccggatacgagctacaaactgagtaagtacactcttccttgacttccatataattttccttcacttccatatatatgcgtgtgcgtgtgcttgtgcggggggaaggggggagggattaggccatgccataacctgctcagaacagaaactgtgtgaattatcttcatggtgtggatgagggcctacaccaaatcttcactccacagtttctctctctaggctattgtggaatacttcgataaacaaggttactggtgagggaatattcgggaaaagaaaaataggagatgattaaccacctgaaatttaagccaaaaaattgtttgatgatactcacaatatttttcatccggctgctagtttttgcttatatattcttctttctttaggttatatttcattgctagaaagtattaaaggaaagaaaaaagatattaaaataattttatatatttgtttttcttataaataatataaaaaaacaaaatatagttaaaattagttagaaacttatgtatttttaaaattatttaatttttatatataacttaaaataattaaaatgagttggaagtaatatataaaataatttattgactttaaatttattctttctttccctttatttttttttctttccttttacttttctttttattttctctcaaatttcacaagaacccaaaaataaccttaaaaattattagtgtctttgtttatttacaattttgaaaaataaagaaatattaaatatgaagcaatattaattttatttttaatttttggtattcataataaacatgatgaataagaggaggtaaagggttatttttttaaaaaaaaaagttaaatcaaataatgtaaaatttaattattttgagactaataaaatatctattctcttttttaaaaaaagctttttcattgatttttaaaacttttcctaataaaaaaaataaatgtaaaacataatatgttaattcttaattttaaaacattaatgagtaaaacaataaatttttaaataatcttttcaagaaaagatttaaaattaagctaaaaatgaatttttaatgtgtggttatttaatttagtataaaagtaatatttatttatatatttaaatttaatctatatttcttaattaaacaataaataataaaatatgataaatgtaagagtctttgtgtattggcactcccatgtcaaaattctcattgtgtttcacctaactcaattgcttaaaatcctccctcagactcgttttttccaaattgttcatgattaaagattgctaaaggagacggtaagtgttttttaggtgatggatgatatcaaacattgatcaaccaagttctaattttttaatcttctattaaaaattgtagttgaagctcaaaggtgtcaaactttgtgcttaaaacatttggatcatttactaatcaatcaaactaaagggtaatagtttctattgtacccaaaatttaatagtctcgtttgatcaatcaagattcaaccacatttgtgaaatttgtttgttggtttgctttttattttttattttaaacaaatctcaatcgtttgatgggttttaaaaccctagtatttaagtcatatctccaaagaagggagacatagttatgagagctaggtggcttcccttgagcttcaagctctttacctattttgtgtgtgtttagtttaaaagaaaataaaagaaaattttataggtgttaagctgaaaatcatattttgagtgagaattttttttttttttttaaatgagttgatttagtgtaggttacatccgtcctctcatattcatcatatttggggtaaaacccaaatttcttcttatatggattcaagaagaggttgagatcaagcttggtataaactacaagtatgcttcggaagaagaaagtgggtagttaaagtttgaagattttaggcaagtggttccagagaggataggataggtaaatctgtactcagttaattttctttatagaagatgttttttactacttgtaggtgcatggttttttttatatctttgaaggttttgcatattagatgatgttattgtctacctttatctcatcttttcatttgtttattttagcttatgaaatttccattaatttaatatattggttgattgaggtaatgagctcaatttgaatcatttaatctttagaataatgtgaaaaaatgtctaacttggtttttatgttaatggatatgagaaaatttaatttaaatagttgaactgctttgtatatcttaatatttgtaaaactttttaatatattagaaaatttaacataataaaaaaatatattcaagtaaggcaattaaaaaatatattcaggatgaactgttagaataggcggacgtcttctatttaaatcaataaacatatattccagcaattaaaatataattgttagaataaaaaaatgataagtttgataattgaaaaagtaattaccaagtcttatcaaagacaaccaaatgtagtctttcacatctccttaaatatttttctttttttaattgaagaataatatttcaaagggttaacattatcaaatatgaaccttcaaattagtctaaaaattaattttaattaaggaataatattgttaaggggtcagataagttagaagaaagtctcaagaactcttcaaaccttgtgtttgatattcaaatacaatattaaaagattctttaatatcaaatttaaagtttctaggacatgtcaatggaacaaagttgaagagattgctttataacttcaagagctcttcaagcctagtgtttgatcttcaaatataagattcaaatattcttcaaattcaaatttaaagattcaaaaattctttaagaatgagtttgaaatttgaagaacaagttctaagatacaaaaacaagttgaaagatttgaaaatcatatttgaatatttgaagatcaatttcaaattgaaatattaagttttaggcatcttcaacattagattggtccaagccaggcctaagaaagaccaaagtccaagccaagcccaagactcatcaagatctaagattgacctaagacacgttaagttcaagatacaccaagatctaaagtaagttatggcccaattcaagttctttttcataagaatcataggatcaaaataaagattgtatctcattccttatgttaatcaaattttagtttcactatatctttttcgataaaataaatttgtgtgtataaaaaagagtgcataaaattaaaataatttcttcattagttaattttttaaagaccatagggaagcctatataaactcccttaggggtttggagttttagtttttgtcatgtatctttccgagagtgagagcgaaacctgatcactctcaagagaaatatagacaaacccatccttcttttatgctaagttccatgaagggagagattaggtggaaaaatgttaggtagatgagatatacaacgactatcatggattcgacatcttctctagattggatttgatcagggtatatcaagatcacaagtatgtaactttagtctctagatctagaacatattatgatttttattaatactattttgctaagttagatctagagagcctaggatgagattgcatgcaccctataaaatctagggttagggaatagagtaatccaaaattcctaataatattataatatctctactgagaatacatattgtcacttaccctaatcaataatgacccattctttagggaatatatgtctaccttagggtttcatttataggtcaaagtcactaaggattttaggactagctcaatactctctcaaggttgaaagtccatacaatatggtagctaggtgaaatcatgactacttgatagacaatgtcatgattaatcgtaggtcttattgaatgtataatcatatgcactggtatactcaccataagaaaatcatcttaatgtccaagacaagtcatcccttcaattaaaaggtaatctaccataacctcaaatggattgcttaattccatgaatcggttgtgaacaattcatcaacttccaaggagcccatgacttggatcttccataactcctagtacacccaaatcatgtataatgcaagtgatgtatgtctaaatgcttaaataaatattaatataaacatggatagaatagtagaaactaaaatctcatttgctaaatcaagtcatgctttttagggctttatcccatcacaatagaatggaaggcttaattgaccacttaataatacacttcttgcaacttataacccttaggcaatgtttaaatctttaccttcagtttgtaggggttgactttagtttgaattcatgactttcctagtgaatccatgcattcctttttagaattgtgtttagtgttttcctaatacttgtgtttttctaggcaacaatgagatatgaattcattacctaatgtataaatattaggcgaggagacatgttaggaatatgtttagtgctttagtgtaaaactagttcaaattgaatgctacaatgatgcaacaacacagatagcctttaaaagggggtaattggtaacctcaagcctttacaaatcttttcattcaaagaagtcaattagtatgaaagaagttgttaccaaggcttacaaatatgctagtcttaaggaggatgttgctacaacaactacaaaggtacaaacaaagaatgaaagaaaggatagagaagtgaagaagactattattaataagataacctgacaagataggggaactattgcatgatggagaacattagagtaaggaaaggacttcaaagcaacatttataaaattggaaagcatactgcacatacttgagaaaaatttgcttaagacttttaaatctcatccataagagactagaaattgtatttggactacttatccaagtatccttttatcctataattatcaaccttaggaattaaatttttaaatcttatttcaccttcttttcttctcaaacatgcacaacctatctgatactataaaacattacaaaaatattaatacacaaatattatggaaatcatggaatcaacttaatgatttttttaacacaaggagttccccatcaaaaagacattctaatcaaggaagacattacttgatttttcaatacaatctatttttggggttccttatattttcttgagaattcaaaaacctttttctttatagattcaagggttatctcttaattcactcatccttcattaaatgtattacattgaattgatatcttgcatatttaactctcttaaaagaatctagtttaagaatacattataagactacttatttctctcttcaaatgatggttttaagttgtcatgtgtgtaacattcctaacaaaattgatatcatttcctttggtttcaaaatttccattgtctagtataactaataaatgaaaatttaatgtatttaactaggtaattaattaactccatccccttacttgccaattttgtttactcataatttagttgtcattattagaactaaacacattacttatagttttttacacatttttacttgtcatatgttttattatgcttacattttttaggtacgagtctgagattgttacaagaattgttcaag

SEQ ID NO: 13044 - DNA, 13809 bp, Vitis vinifera
  Intron number 2 from transcript GSVIVT01018546001 (locus G SVIVG01018546001) derived from phytozome v7.0 (chr-ID chr1 6; pos 13560861 to 13574669 reverse strand)
ggaggataagggttgattttgaggagacgttttgaagaaaaatgagccacttctcgccataccaactgcgagattgtccaacttaggccattatgatccaattgaatgaatattttaactacgtttggtcatatgtaatgtacttcagaatttccctaataaaagtttgttttttctctgagatctataacttagaaaccatcatgatgattgatgttacttagaaagttagacttcagttttttaagatacaaacttttgaaagaaccctatgatatgaaattacacctttttggcattactggttgaaattacctgcttgcaagttcgagtaaatggataggaatattttagaaagaaataattagaataattttggaagttgaatggttttgatttaatatcaataattgtaataaataattagaagaatttatattatgatattttagaataatttaatgacaaatataaatcaaagagtggaaattgaatgattttatggtattaaataaatggttaggggtatttagtaaaaaaattataaaacacctttttcttttacatactactagttaaaaaagatgtgcaatatatataagatagggcaatataattttttaaatatttgataaattataatatagaaaaatgttaaacaaaagagtttatatttaagaaatttaaataaaatataataaattcatatttatgtatccttaataataaataaattaataataaattcttattcaatggttaaaaaaatataagttccatttcaaatttataactctatttgttcatatgatattaatacttaatcttattatatttgttttttttataatgaataattctttttattctctcatttatttatataatataattaatacttgttatcttattatcttatattaatgaatcttattattttcaattgatgactaaatacttgtttgatataaatgaaattatacccaatgtatatcatgactattgcctcacaattattttacaatacaatataatggcacttggatttgttgtgcctataagatggatatgatttcagaagtttatctgcagggaaaaaaagtgtgtgaaatcataggaacatttttttatatatacaaatagaagaaaaaccaagagatgaatgaagtacgaatttgcatagaaccctccatttttactctaagcttgtccttcaaagaatgacaaataaatgggtttgagggtttttcttaatatatatagaaggccaattggaaaaagggtttccaaaaggcaacatatatagaataatgataataatgagaggaaatgaaaaggtatgaattgggaaggcatggattgaaaagacaatatcgacatacgataaggtttaactatttgtttaatataaaaggaaattaatgttttataaggactttttgggtagaaaagttttatttataaagtctttttggatagaaaagtttcagccgttatgaggaataaattgttgtaaactgaatcaatggtagaaactcaaaaagaccatatagtaattgaagggtttttgttggagcattaattgaaaagacatcaccaatttatgggcaaggtgtcaattggaaagttttttgggatttataggataataaaaaaatttgaagggatttttaggtattaaaaaccttaaaggaaaaaaatttaagagatgactttcgtgttctttttttttttttttaagagagattagaaagaagaatcatattttttttgattttttgcttggagatagagatcaacactttttttatattttatagtggcaatttctagacaattttaaaactctcagaaattgctccccttatttttttatttatttgttgggttgggtcaggtcatcccgtttaaacagccaaacccaactccaacatctcccatttgcacaaaatgggctaaaatagcttgatcaataatatataagtccattcctttcacttttgaaggtcattcatacaagcgaataggtcatacaaccatgagagcagacctacaatttaggagttataaacttattcacctattagggatatatagtagttcaaccctaaaatttatgagtaaataataataataataatcataatcatgcctcgttgtatcctagacttatttagttacatttttaatatatagacttaatccctcgaagttgtatactatctaatattataagtatattcacaattatattagttataaaagtaatataattgatcaaccatgacctcatctttgtcgatgtagcttaaaaagtcttcattttaagcttatgtcttttagattcaaattaactgcttgcccaatatctctcataaagacaaattatttgatttccatcagaaacataccaaagtagcaacattaatttttcatcttaaaatatagtcaaaagtacaaagagtacgataatggactattataaaataagctttaaggatctcatatagtgaggatgtagggattaatcattcactttccttattagtcacattcaaatacaagtagtatgaaatacatgctatggtagtctctctttactttaagagtgtatgtcaagcttccaccatacgaaccttaatcaaaagctctatatcatatcttacttgagttttgcatctatagtttttctaaagcttcttatgttagaagtcaagtttgattaaaataggtaaatgtaattgtgggcgattacattcggttaagatatcacttattataaaactcatcttgatgcttaatcaaagcaacacatattatttttgtatactttttactcatttatcattattagtatattgtatctcatccagcacataaacacattagttgtagcagttgcttgtgtgagagagtcaatctctacctcataacatacatttaagagtatatatatatatataagtaccaattatatattcaatgatataaataacaactactcaactcattttatcatgtatagagtatcttatatctagacaataatgattcatgatatatgatcaatataaattataactcacgtagtcctaatgactttatatgtacaaaaaacatgtttcttggaatggattttgtgaatagatcagcaaccattcacatgtaggtaaatatttcaagatcactttcttttgtgctataatatctcttataaaattattcttagtatctatatgtttagttcttccatgatatttcgaatcttttacataagcgatcgtaacttaactgtgactatagactgtcattggcttaaaaacatccttgactactcttaagcgccataaaaatcttctcaaccatacaacttcctataccacagttgaacatgcaataaattcagcttccatggttgacaaagttatataagtttgtttctagcttctccatgagatgacaccattattaagtaagaatgtatatccgtatgttgatttacactcatctagattgtagggaattaaaccgaattatcaacctgtgagaaacaaaaaatagagaaaacacacgccaaagaaaaacaatcacatgcataagacagtatttacgtgattcggcaatttgcctacgtccacggagttgcagggatatcactattatcagggaagaatacagagtacaaccacggcggctataatattttctctctatatataacacgacaaccacaccacactaaaaaaccctaattacaaaaggtggttccacaatgggctaaacaggcccaacaagcctcagtaaatctcccattaaaaaggtcatgcaatattattcgggttgggtcgccaaaccggatcaaacaaaactagattccacaaagcccgacaaatctcccacttgaagactagttcaatcaccaacatcaaaccgctatcctccaagaaacaatccctcatccttgcaactcatcctcctgtcctcaagctagaagaccaattgaagctacgcacagcttcaacttctcaatagtgacacccttagtcaacatgtctgccaggttcttagatccacaaatcttctgaagtattaccaatttatcttcaacaaggtaacatataaagtggtattttgtttgtatatgctttgactttgaatgaaaaactgaatttttggcaagaaaaattgcactctaactgtcactgtgtaaaatgtccatctcctgcttcttacccaattcatctaagaaaccatgtagccaaatcatctcttttccagctttagttgctacaacatactcagcttctatagtagacaaagtaataatcttctgtagatttgaagcccatgatatagttgtgccacctagagtaaaaacaaacccagtagtactctttctactatcaatatcaccagcaaaatcagcatctacataaccctacagtttcaaacttgcacctgtgaagcaaagacatgtatctaatgaaccttttagatatcttagaatccaattgactgcctcacaatgctgctttccaggcctactcatgaatctgctcacaactcccactacatatgcaatgtctggccttgtacacaccatagcatacatcaagctgccaatagctgaggcatagggcaccttgctcatatggtcccttgcttcttttgtcttcggtgactgttctttacttagtttgaaatgactccccaagggtgtgctcactggtttagtttcattcatgttgaacctaatgagaactttcttcacataatctaactgtgaaggcttcaatgtaccattagccttgtctctaatgattctcataccaaggatttgctttgcagctcccaaatccttcattgcaaactgtttggacaattgcttcttcagattataaatctcctcaatgccagaccctgtaataagcatatcatccacatacaatagtaatatggtgtaagaattgtcaaaaaaacttaacatagcaacagtgatcagcttcacatctcttgaacccaattctatgcataaaactatcaaacttcttgtaccactgtctaggagcttgtttaaggtcatacaatatctttctcagtttgcagactagattctcttgtccctgaacaatgaaccattctggctgaatcatgtaaaggtcttcctctaagtcaccatgaaggaatgctgtcttcacatctaactgctcaagatgtaagttatctgcagccaccattcctagtacaagtctgattgttgacatcttcacaactagagaaaatatgtctgtgtagtcaatgccctccttctgttggaaccctttaacaactaatctggtcttgtaacatttactaccatcatgctcattctttattttgtatacccacttgttgtgcaaaaccttctttcctattgggaattcagtcaattcccatgtctgattccccaacaaggaattcatctcatcctttatggctaactcccacttgcttgaattctcatcttgcaaggcttcatcataacactctggctcaccaccatcagtcaacaggagataatttaaaacatgtgaataatgctacagaggtctaatgttcttggaagatctgcgaacttcaactataggtgtactcagatctacttgtgaatttacattctccttatcttcttcaccctttttttggacagtactttcagtcaattcatctaagttgacaaactcagatttcttttgatctatctctataacatctgacactataattgacctgtccttgtacataacctgttcattaaatatcatatttctacttatgatgattttcctgttttgttcatcccaaaacctatagccaaatttctcatcaccatagccaatgaaaaaatatatttttgactttgcatcaagtttactacgagcatcagaatcaatatgaacataagaaacacaacaaaaaacttttaaatgtgaaaacttcacctctttaccgctccaaacctcctcaggaagtctgaactccatgggaactgatggtcctcggtttatcaggtaagctgtagtgctaacagcatcaacccaaaaagtttttggtagtctagcatgcaacctcatacttctagcacgctcattgagagttctgttcatgcgctcaatcaaaccattctgctgtggtgtcctaggaatagtcttctccatcctaaatccctatgcagcacgatactcactgaactctccatctatgtactcttctccattatttgacctcaaacgttttactttcaaacctgtttttgtctcaaccatgaccttccacttcttaaaagtttcaaatacattagatttatttttcaggaaatgaactcatacatttctgcttgaatcatcaataaaagtgatgtaataccttgaacctccaaggaatgcaaccggagaaggcccccacaaattagtgtgtactagttccaatttttcagctttcggtgtcctgccagttttcaagaagctcacctttttttgctttcctaagatgcaacttttacacatgtcaaaatcaatggacttcaattttgatagttttccttttgacaacagcatcttcatccctttctcactcatgtgaccaagtctgcagtaccataggcttgtattagtacttgcatcaacaactgcaattgtgtctcttggacatgaggtcatatacagagtaccagtcttctttccacgagccaataccctagttccctttgtaactttccaagtaccaccaacaaatagtattgcatgtccttcatcatcaagttgtttaacaaaaatcagattcctcatcaggtcaggaatatgtcgaaccttctccaataaccaaacagacccattgggcaatgatatccagacgtctcccagacccacaacatccaaggctgaaccatcagccaaatacaccttaccacaatcacctgtaacataattctgcatgatttctcggtgtggagtgatatgaaacgaagctcctaaatccaaaacccaatcatcaagtggactgtctactgcaagaagtaatgcatcttgtacctcttctgttacagcattagcagaatcatcttcattcttcttcttaggacttttgcattgccttctaaagtgacctgttttcccatagttctagcattgtacttgttggcctgatctagatttgcttctatttcgattagaatttctagattttgatctaccccggtttgaatttctgtcattacatctgcctcttgtctcaaggtttaaggtagaaccagatcttgaggtttcgtctgcatctcttcggcgaatctcctcatgcatgattaaatctcgtatatcattgtacttgatcttttcctttcccgtagaattgcttactgtctcctcattacctcccaactgtttggcaaagaagccaagacgatcagagcatgaatctcatcatcaaaatcaatttctacaaacgacaattgatttgtgattatattaaattcatgtagatgttgtgctactgatgcactctctgtcatattcaaattgaaaaatttcttcatcagatgcaccttattgtttgcggacgacttttcatacataccggacaaagccttcatcagatctactgtggtcttctcctttacaacattgtgtgcaacagacctagacaaagttaacctaataactcctagaacctgtctgtcaagaagcgcccatttctcagccttcatactctcaggttttgtccccaaaagaggcagatgcaatttcctcccatagatataatcttcaatctgcatcctccaatatgcaaagtttgtgtcatcgaacttttctattcccgacgtctttcctacttcctctgccattgctcccactcaaacctaaccctaggctctgataccaattgtagggaattaaaccgaattcccaacctgtgagaaacaaaaaatagagaaaacacacgccaaagaaaaacaatcacacgcacaagacagtatttacatggttcgacaatttacttacgtccgcggagttgcagggatatcactattatcagggaagaatacagagtacaaccacggcgactacaatattttctctctatatataatacggcaaccacaccacactaaaaaaccgtaattacaaaaggtggttccacaataggctaaacgggcctaacaagcctcagtaaatctcccattaaaaaagccatgcaatattattcgggttgagtcgccaaaccggatcaaacaaagctagactccacaaagcccgacatagatcacctgcccgatgacatataaataactcactaagcacaattctcgctgtgttgggtcattcctaagagcaaaagaccatctaaaactaggcaaaccgctcataattggaagtaattgtccataagtcaaaccgagcaggttccaccgcttgggtggtctttagtcctcttcattcccacgcaacttcttgccttgtgagggtttcccgaggccctagcgtttatttcatacatcttttcttgcttgtgctgcttgtgttgataccaagacaaggttggttacaacttgcaaactttttttcaacataacatacttattggctctcctaaacaaatcattaattgtctccggtggctttttggagatagattcgaagaaaggggtccccgacccaatgctacatttgaagggttgtagcagagcgtccatactgcacgtttctacctggagcattgcttgggtgaacttgtgcatgaactggcataaagtctcactctctatcttcttcatattttgaaggctgcttatattgaacttctatcttgttgagcacaaatagtaagctacaaagacttctgacattttcctaaatgaatgaatacaattagggggaagtcggtggatccaagctagggcgatgccttggagacttgctaggaagaccttacaaaggagctcatcattgtcgatatcaagcatcatcatttgccaataatgcatcaaatgattgaatggatcatatgtactatcatacatgacgaactcatgaatggtgtaccctcttgggggttcatacatcaaaatatattaggcgaatggcattgtcatcatgtcattcaaatgatgagttgcggctcccaagggcaactcattcaaacactcatgagggagctaaactaccaagaacaagggtcgaaccatccctcctatgacctcaatgtggggcaacctcatctgttgtcggctaccagggttcgaatatactggggattggggtccctgtcgagaggtacagtctgcctcgtcgatgcctttactgaccagaattctcgggaacctggggtcaaatgggcgacgtccctcatgggagtttaaaatggtgtggggaggttgaccaagaggaactacatgatttaaaggctccaccacgttgtcattgtcttgttggcgtaaatgattaagattgcttgcagattgatgaacatttgaatgcgagcacgctaatctttgagttgtgtcaacaacaaggcattttcttgccttagcaactcagtctgagcaatgatggattctattcttctttcctgctccgcttgttgcctttcaaaatcctcacggagagtttctgaagcggtagccctctaagaagctgttgtactaattgaataccacgactgactatttcccattccgaagcttccaattccaaacaaaaagggggtctatgtttggttcaaagtgaaagtgatactttgatgtagaactctttccacagacaacaccatttgttggagttgaaaatttcttgagcagtagtcttcttctcacgacgcgttcttttttatctgccacacaaggttcacctggttttaccttgagataaacttctccgatggttaagttagttggggtttttctaaaaaagagtaatttttttggtactgttgtctcttaccacctatggcctagctagttgcactcatatatacttcacctaccgataggcatggagattctagggacactttctttgtcatttcaagcagttacaacctcaagcgctaaccgtctccactattcctcgtggatagctcttcaatgttctactttgccacttttcttgttgggccattcaagctagtagggctttaatcctggcccgagctagcccaactcatatgatagtcttagataggcccattacctctatttatgggggtacccacagtaaggggatggtatggccagttgtagctatgtcgctaggattatgggtttgattgatgggagaaacttgtggatacatggttggtatgggcatgggactgttgggtgatggccaactacaagggattggacgactaacgaaggctgagttgagatgtcttgggcaactaaaactgagctatagcaaggggaatgggacatattgatgggttagaggaatgggtgcaattggttgatggcttatgggagataatgataaacgattggtgcatggaatatttgagatgtatttggtaagtcttaaattatgtaaaggttatgtaaaaatatttacaaaaacatatgacatatatatttttttgttattgattagaaatattaatttcatgttttaaaatacaaatttttatgtaatgtcataaaaaaatctttgtttatgactccatgggatattaatagaaatattggtttagaattctttttatattctaaagtatggaattaataactacggtaaactcgaatttttatttaaatttatggatcatgtaatgttaaaagaaaaaaaatattttagcatgatttaaaatcttgaaatgtatatttaacagtaataatgtattaatcttcgatgtactcatttaataaaattggttaatatctcgatttctataatttataaagcgataattaacaaaaaaaatgattaaatcatgttaaaacatagttatagaagagcttgtcttatttattatcaaacccttattatgttttatattttaaagaaataaaaccaattattaattaatttaaaatcatgaattcgtcttctaaaaacaaaatttcctttttacaattctaattacacttaaaagaaataataagttcaagcaacaaggaattctaaactaaaaatcataaatttatgtgatcacatcaaaatttcataatcgtcctcctagaagttcccaaggaagaatcaaagactataagtcaatgaattatgataatttagttggatagtaacttgtacaggtcaatggcagaatgaggggtgtacacttatcttcacatttattttttttcttggtatttaaaaacataaattttttttatatttcttatttacattactcattacaaatggaagtaaaaatcaagcattagttatcattaaatcaagactctcttgttagcaattgttgtgccagcggaagttttaatgcaaacaatgttaatttaagaatactaggataaaataatcaacacaaaaggtgcatgaggttttaacgtggttcgagcaaccatgcctatattcacggatgagaaataaccattccactatacaatagagaatattactgaagattgaaccagatgcaactattaggttcctgaaacatcccatgtttccccactcctatctgtaccttactataagctccctcgctccattgggtatcttctattatctctcacatttctatccacctggtatattctctataagcccaactccatttcatgactttttcccctcataacctaaaatatttataaaaaaattcctaataactttccttattcaataaggaaatctaatattactatatcaaaatattctatacaatattcttaacataaaaatgaatatacactaattgggaatttgggatactatccaacaacaattttttatcacgcaatgcattatggacataagtataattttatgcgatattacctttgttttataagcaattctcgtttaggtgaacaatgtcatatattagtatattaccatttggctggcacggtttcacaataaaccggggatagaataaatgtgataaaacacatggacagatagacagacaagcattacctaaacccaactattcgggatagacagataagcattacctaaacccaaatattcgggagattaaataaataagatcttgattttcatcgagattccacaaaagctgtctgctcataaaggattgtttattggcgtcaacaagcccaatcaagctaagctcttattaattaatcctaatacttgtaagaacaaactagttgagtatacttaatttcagtccacccacagcatgctccacgcttctatattcaattattcatcaccgtccaagcaattaatcacaaagaagaataatccgacttccatattatatggtgcctctatttcacatctcttggcaaatctttagtttcaagtcattcgctcataagcttagcgggtgtttgtaaactaacttaataaattaaagtaatttaatagcttaattcaagttattaaataagtaaagtatatttagtgaaataatttaataacctaacttgaagtctaaaataactttaagtaataaataaaaataattaacttattcttaaatttatattttctttttacattttttccttatttatcttaattatcttaaggaccttttttaccactgcatgaccttcattgttaattgatctcctttgtcctaattttaatttatatggacaaatatgtcaattcaattatttaaaataaattttatcaaataattttaatacttaaaagtacaaattaaataataaattttaaattaataacttaaacataattcaactttaaatcaatattttaaatcattaaataaataataagtattaagtttgaagaaataacctcttttttatttatttgtatcgaattctcctaagtacgcgagttgcttgtgtttatataataattgtccttgttaagccatcaacttacaagaatcgcaaaaaggaataatccaagctcgatgatatatagagcctctattttacttcttcccaagctctattcttcagcaaacatgattgcagttcttctcaggaaccttgtgaacttagtctctgaaggctggtcgtggtggtgggatggactcactgaaaacaccatttttcgagtagtggccgcccttttgactgcagcaattgccatttcttggtatgcctggctcatcaagaaagcaaatagaggcctcccacccttgccacccggcccaagaggcttaccgttgctgggaaaccttctcttcattgagcctgatcttcatcggtacttctccaagttgtcccaactctatggtcccattttcaagcttcagctaggcagcaagacttgcattgtgataaactcgtcttccgtggccaaagaaattctcaaagatcacgatgtgatttttgctaaccgtgatgtacctatttctgtattagccttcacatatggggggcaggacatagtctggagtcattatagccccgaatggcgtaaactacgcaaagtttttgtgcaagaaatgatgagcagtgcaagccttgatgcttgttctgcacttagaagaagagaggtgcaagaaatggtgagggacgtgtatggaaaggtggggacaacaattaatatgggggatcaaatgtttctaactgtattaaatgttgtaacaagcatgttatggggtggaacacttcatggtgaggataggagtcgaattgga

SEQ ID NO: 13045 - DNA, 1865 bp, Vitis vinifera
  Intron number 6 from transcript GSVIVT01032802001 (locus G SVIVG01032802001) derived from phytozome v7.0 (chr-ID chr1 3; pos 629604 to 631468 reverse strand)
ctgttgctggtaatggctttgttgcttggtaactactagtaaatgtcacccacatggagttaacccatactctgctaaagcttcccttgtatcatttgcttctttagttttataaattcctcagttaagtaattgcatttctacagtctcagattagtttaaggtaccatttgggattgatcctagaccccacagaatcacttttataataattttttataactattaaaatatataaaaagttattgtcaaagaatctaacctactttggcagcaattttgagaaattaaaggttgctttttgtaagtgattttttaagaatttgcttattatgtcatcaaatcattttctttcgtgatttctctatgtatatttctcttctcagtgtcttctacttttgaagcttgtccctttcactctcctcctttcttccacttcaatatttcattcaaactaaccaaatggagatatgctgaatacttctatatgtgtgtgtgtgcatgtagtatcaataaattttttcaaaaaattctcttttctttgttttggttcatttcaaatcaaataatgtgtaaatattacttacaaaattttcaagtctttcatcatcaagcaatgtcacaattgatgtgaggttcaaaattttagaacttggtactagatagtgaaaagacaacttagttaaagatacactttcatctaatctagctctatcacttggatagccaataaaatcatgctaaaggcttgtcaaaatgacatttagattaattgaatggctgctatgactaattctcctctggaatttataggagaaatttatttttaaaatttaggaataaaaaattgtttatccctttttttaaaaaaaaaattgtcatcatattcaaaaaatgtaaaaacatgtttcaaacatggtcttaaaaaatattttcaaaattttagttaaaaattttgaaaacaaaaaaatgtaactagacataccctaaatgatataaaaatttgtttaattaaaggcgattcatattgaattagagaaagttgactaaattgttaacatccctattttttgtcattacacatgtctgtagtagttcttattttccagtttaccgaacactccaactgttgcttttagaaccatagcacaacacttttgaaattatagtttaccaaatgctcaattgctttttgctaaattgatttttctttcagcaaaattaatagtgattttcttaaaagttacgacaataccaaatttttagttaccctcaagatgactatcggtaagtagaggcacaatatgctaataatctatatacagttctttgaagctgaatcctgttttaaattgtttccatgccttcttgttcatttctctcatctattctattgctctcccaaagtaatccctttgagaatttctcttagctacccctctgtcaatttgaaattgctcttggttaattattgttccttgtatgtgtgtgtgtatcaggcaaatataattgaattgttacttgaaatgcttttgattaactagtcataaatgagacattcttgttttatattagaatgttgtttgagctcatgtgtctaatagctggccttttgccaagctactctaaaaacttattctcagcagccagcatctcatgcatgagtagtttttaatgccaatctggaacgtatgaaaatgtaattcttgattgcattacctattaactctgaatattggtgatttatgttggatctacttttgggagaactatgtagctctgtaatgtttcaatatctaattaatcctacaattttgctcacttttgcagaagttgcggggatttcagtgcctattcatcattcc

SEQ ID NO: 13046 - DNA, 13116 bp, Vitis vinifera
  Intron number 1 from transcript GSVIVT01015962001 (locus G SVIVG01015962001) derived from phytozome v7.0 (chr-ID chr9 ; pos 16334669 to 16347784 reverse strand)
ggtggccatattttcgactaggtctattgaaggtattttgttttatgagtcatttatctttcttcttggtagataagaataaaaaatttgcagcttatgcttccatcatttagctacaatactaatttgattctgctattatgttatgctttttatttctcaatttttatgaagtgaattgattctagacacctaaaattctttttgtttgttagttaatcataattggtattccctttgtattttgctcatttctggaaattgttggttgtgttaaactcctcaacgagtattacttgagtgatgcaggcatacatcagctatatttgcctctacttatgtcctgatgttataggacacataatcaccaactttttggaactagaaaaattgtacgtgtagaaacttattgggtgaatcatttcagttaaaaaatattagcttgactagcatgtactagtcgagtgcatgatttgcattgtgggtccaaatcctataaattcaagcttgaaagtttagagaaaaaaaaaattgttcctctttatctttgaagtttaggattacaacataggactcttgagtgcatgcaaaaggaagaaaataaaaagatacaattgtgcaaataatcactaccctgaaaatagaaaaaaataaaaactgaattagaaacattgactcatttgattctatcccctaatttactgcactaaatcaaatcaaaacatctcatttatagcactaaatcaaatctcccacatattttatgattttccacacttcccctcaagtttgtttgaagatgtgtaacattgctagcttgtttactagaacttcaaacgactgcttttgatagttttgatatctgctagttgtttttctgaaggaacatatggcatataggctaggcccccctcaagtttttctttaatgtaatgacgatccacttcaacatgcttagttctatcatgttgaactggattgtgggctatgttaagcattgctttattgatatagtataatttcataggtttcccatgaggaatcctcaattattctaatatcctcttcaaccaaatgagttcacaaattccatcagcaacaacccgaaactcaaattctgcactactttgagcaacaacattttgtttcttgcttcttcaagttaccatgttccctccaaccaaggtgcgataacctgaagttgatcttttatccttgatttctcctgctcaataagcatcaagatacgccttaatctgcatatgcccctttttctcaaacaataatcctttccttgggcttcctttcagatactttagaacttgatacacgacttcaaaacattcttcaataggtgagtgcataaactgactaaccatactaactgcaaacgctatattaggacgtgtatgttataagtatatcagtttacccaccaaacgttgataacatcctttatccacacttgagcttaactccgtttgccctaatttcctattaggatcatttggtgtattagatggcttacaaccgaacattcttgtttctttaagcaagcctagagtatattttcgttgagaaacaaatataccacctcgagaccttgcaacttccataccaaggaagtatctcaactaagatttttaatttcaaattttttagcaagtaccccctttaatttctccaattccataatgttatcagttgccaagatgaaatcatctacatatactatcaaggtgacaatcttattgtcactagaatgtttgtagaacatggtgtgatcaacttgactttacatatacccaagatttcaaatggactttgtgaaaagatcaaaccatgctctaggggattacttcagctcatagagagatctcttcaatttacatattttcagttccaaatgattgctaaaaaaccagggggcaaattcatatacacttcctccaattctccatttagaaaagcattcacatctagttgttgtaatggccaatttagattgattggaagtgacaatgagatttggattgtgttcatcctggcgattgacataaacgtctcttgatagtcaatatcgtaggttttcgcaaaacctttggctaccaacttagctttatacctctccacctctccactgaaccatcaggcttatacttgacagtaaatacccacttgcatcctattggtgtcttccctattggctaacttaccaaatccaaagctccattcatttcaagaaccctcatttcttccatgactgtctctttcctcttaggaacaactaaagcgtcttgtatagattttgggatctccacaaaagacatgttagatgtaaaggctttaaaggaattagacaacctatgatatgacacaaatttagaaataggatgcatggtgtaagatctggttcctttcctaagggcaacgggaatatcaaagtcatcagaagcattagactctatatttgaagagagaataggtaaaactataccttcttgggtccctatgaccggttctgactcttggatacttgcaaagtatgactttctggattaccttgatgatttctttttcttgtgtagtcatgaagcttagtttgagattttgttagtagtgattctctttttataaacaatttttcattgtttggcacaataaaacttagttaaggcgttgaacttgaacctatgttttttaacccaataggacccaaaccagaagaatgtgaaagactaagactcacattgttgtcaaatgttggcaacagtaaagacatttcccaaaaacaatcttccttaaccacattctcccctttaggagtgtttttggtaaagtagggttgattttcaaagaaggttacattcatgctaacaaaaattttcctagagataagatcataacacttataccccttttgtgtaggtgaatatcccataaaaacacgctttagtgcatgaggatcaagcttagttctatgttctttattaatatgaacaaatgttgtacatccaaaaattttcagaggaattgaggaaaatatttttttatgaggataaaccttaaaaaaatgattaagaggagtttcaaaaccaagaattttagttggcattcaaatccataaaaattagtcacaccttgatcttcttgctttatttcatcgatctttgatttcaactcaaagatttgtgctgaattcccaagatcagagtaattttccataattgcttcccaaagctcttttgttgttggtaaaaacatgtaagtttggcctatttctggctccatataattaactaactaggccatgatcatggagttttccgagtcccatgtttgaaagcatggatcatcctcttttggggcctttgttgtactggttagatatcttagtttccttttcccacgaataaacaatttaacagattgagaccatctaagaaaattcaatccatttagtttatgagtggtgatgtatagtgaaggattatcaccgatggcatgaggtgagacttgaaatggaggcattgatacatgctgtgaataatctccaaaattctcctccttgttgattcttgacatcaaatcctcttaccaatagcctaatagttccataaaaaaaaaaaaaaaaaaaattggtacttgaaactcttaccaacgacctaatagtgtgagatttgcgaaaataaagaagaagaagaagaagaagaaaaaggaaaactaaggtttcattaacgaaagacttaagaaagagattacataaaaagctttatataagctaacgagaagagtaaaagactattctacccttattgataatatgaaataactaagctaaaatactatctaacaaatagttctaggaaaaaaaattctggttgttaaaaccaaaaataaatgtatcacttctaataggaaattgattctgataccatgaaagtttagagaaaataattgttcctgtatatcttctaagtataggattacaatataggactacttgtgggtacatgcaaaaggaaaagaataaaaagatacaactgtgcaaataatcattaccctgaaaacagaaaaaaataaaaactaaattagaaacattgactcaactaattctattacctaatttactctactaaatcagatcacgtcatcccatttacagtactagatcaaatctcccacatattttccacaaagcttttaggaaaattggtacttcaatatggtattagtgcctcgtttagtgggaggtcatgtgtttgagtctcaccttctatttattttcccatttttttgtgcaagcctaaaagaggtgaagtggcttcgtgcaaaccttcctttgatgaagacaaagaaggatatttgggccgagtgaggtctgatcttcgtggcttagcagtcacagttttgccttttacatcagaaatcagaggtaaaggactcagctttatgggtaattgtggattgttggtagcggaaaacgtggacgtaaactcgtcttcacctactcagtcacccttgtcttctttacccccttcttgtggtttggcatcttcatttctgagtccttccgttcctgatcttcctagttcagcctttctatctcagtttcctatggaaaatgtaacctctgaatttttttccaaaaaagacaatgttggtattgtaggtcaaatatctgttggtattcctaaccttgttgtggaggagatccagtctgcttatccaaactagctgaccgagagttttaacccaaatatgtctaaacccattttgcttaataaggtctccaacctggttacagttagccagggtgatactgcgggctccctatcgggtgagttccaaatagaaggcttgcccctcaggaaaatggctaaagtgcgagaggttttaagttctctggatattaaggtgtattccaggaggaagagcagatgctccataggtagctgagacctgttagaactggattggaggattagggtctgtgaggtttttccatgaaaataattagttggaataccaggggtttgggttcaaggaaaaagcgaagggtggttaaagattttctgaggtcagagaatccggatgttgtaatgatttaggaaacaaaaaaggcggagtgtgatagaaggtttgtgggtagtgtttggacagtcagaaataaggaatgtgtaactcttccgatgtactgggcttcaggtgggattttgattatttgggactctaaaaaactgcgcagtgaggaggtggtaataggatctttttcggtctcagtcatgtttgcattggatggatgcggaccgttatggttgtccgcagtttatggcccaaatagcccattacttaggcaggatttttgggcggaacttttagacatttttggactttttttcccattttggtgtgtgggcagcgattttaatgtcataaagagaaattcagaaaaattgggaggttctagtttaaccccaagcatgaaggactttgatgattttataggagaatgtgaattgctagatccacctttacggagcacaccattgacttggtcaaacatgcaagagtctcctgtgtgtaagagattggattgatttctttactcaaatgagtgagaacaattatttcctcaaagcctttaagaagttcttcctagatggacatcggatcattggccgataattttggaaaccaattcgttcaagtggggcccaacaccttttaggtttgagaatatgtggttgcaacatcctagttttaaggagtgctttagaagttggtggagtgattttcaaggaaatgggtgagaaggtcacaagttcatgaggaaattacaatttgttatggcctaattgaaagagtggaataaagcttcttttggagagctaaacgaaaggaaaaaaagtatcatgttcgaattagctaactttgataccattgagcaagaagggggtcttacctctgaacttttagtttagagagctttaagaaaaggggagctagaggaattgattttgagggaagaaattcattggagacaaaaagctagggttaaatgggttaaggaaggggactgtaactcaaagttttttcataaagtggctaatggcaggcaaaataggaaatatatcaaggtgttggagaatgaaagaggcccaatgttgaataattcagagagcatcaaagaggagattttaatgtactttgaaaagctatactcgagcccttctagagagtcttggggagttgaaggcttagattggtctcctatatttggagagagtgcgtctaggttggactccccttttattgaagaagagatatctaagatcatttttcagttggatagggataaggcaccgggacctgatggctttaccattgcggtgtttcaagattgttgggatgtgatcaaggaggatttagtgagagtgtttgcagagtttcacagaagtgggattatcaatcaaagcactaatgcctccttcatagttctattacacaaaaaaagcatgtcaaagaaaatcttagactttaaacctattagcttgatcactagtctttacaagataatagccaaagtgctataagggcttctaagaggggtactatatgaaactatccattctactcaagacgtttttgttcaagggagacaaatattggatgcagttctcatagccaatgagataatggatgagaaaagacgatcagaggaggaaggaattgtcttcaaaattgactttgaaaaggcttacgaccatgtgagttgggattttttggatcatgtgttggagaagaaggggtttagtcctagatggaggaaatggataaaaggttgtttgtcaacggtatcttttgcagtcttagtgaatggaaacactaaagggtgggttaaggcatctagaggtttaagacaaggagaccctttatccttttttttgttcactttagtcacagatgtattgagcaagatgttattgagagcagaggaaagaaattcattggaggctttcagggtgggtaggaacagaacaagggtgtcccatttgcaatttgtagatgataccattttcttttctagcactcgtaaggaggatctgtagaccctcaagagtttattgctagtgtttgggcatatttctgggctgaaggttaaccttgactaaagtaatatttatgacattattcttgaacagaatcatctttctaggttggccgagttgcttgattgcaaggcctctggttggcctatactctacctgggtcttcctctgggagggaatcccaaggcttgtggcttttgggatccagtgattgagaggatctcgagaagattagatggatgacaaaagggttatttatcttttggaggtaggataactctcatccaatcttgcctcacccacatgccttgctacttcctctcattgtttaagatacccatttcagtggcagcaaaaattgagagattgaaaagagattttttatggtcaggggttggggaatttcgctctcttagggaaatggttgtggaggtaccctagggagggttcaacttcgtggcatcaggttattttaagcatttatggatcacattccaatggttgggatgccaacactatagtcagatggtgacatcgttgtccttggaaggctattgcacaagtctcccaggagttttccaagtttagtcagtttgtggtaggagatggggaaagaattcggttctgggaagacttgtggtgggggtaccaacctttgggagtccaatatccaagactatttagagtagtcatggataaaaatattcctatttcttcaattctcggttctactcgtcccttctcttagaactttaattttcgccgtaacctttctgatcctgagatagaagatttagaacgcctcatgcggtcacttgatcttctgcatttatcaccatcggtttcagatatgagatcctggtctttatcttcttcaggactttttacaatcaaatctttctttcttaccttgtcccaattttctggttttcctccagttttccctattaagttcgtttggaattctcaagtcccttttaaagtcaagtcctttgtatggttagtggcacacaagaaggtaaatactaatgacttgctacagttgagaagaccttacaaagctcttagtcctgatatttgtaagttgtgcatgaaacatggagaatcagtagatcatctttttctacattgctctttgacgatggggttgtggcacagattatttcagttagccaagacggattgggttcccccgaggagcatctctgacatgctgtccaccaattttaacggttttggtttttctaagagagggattgttttgtggtaagctgcaaacattgcttcatttgggttgtgtggcgggaaagaaatgcaagaattttttaggataaagcaaggaattcaaagtatctttgggattctattcatttccttgcttctctttgggctttttgttccaaggtttttaaggggactccccttaacgtgttacagttgattggttagcggtgtgtaattccaatgggttggtcttacctagagagtttgcttgttttactttgtattttgttgtatttgtttccttgtagttaagtttttctttggtgggaggattcctcatccttctcttgtacttctttttttatcaatatatcgctttgtcattcctatgaaaaaaaaaaaaaaaaatttaacaaatggtgcctatcaaatgtaggcattttggaggaagatgcaatatttgatggatgttgtgtacttagattaaagaaacaaagaacatgtactaggagattttagcattttatattaacaaatttatttgggggtttgaaaatagttgagaaaggattgttccttgtagacagacatgtgaacattttttgataagctaagaaatttgaaataattccaacaaaaagatgctttagaaattccaataaaaaaaaagatgctttagaaattactttatggccttttttccatacaaggaatattggggtcatgagcatttgtaactctaagccttagagtttgtttgaaaccatcaaattcttgattctcttttgattagtgataaaatttttcatgagaagtgttggaaaatctaagttttctgaatcttagaatatttgtgtgcaattgtaaatttaaaatagattagttttccattcaaaacagaataatccctgatttatggggattgatagggatttatatagattgataaaatagttgaagtttcctaagttaacccatttaacctgtacataaaggttgtaccaattattctctttgaatataagaattatcatattttctcacaaggtatcggagccatactttctctggaaaatttatcaaattatactgcagccgtcattgctgatatacctcatattattctatagccttcattgctgaaattcctatacagccttcataccgaaccttctttgccttatcattcaaatatgtatgatacatctaaaatcaatctccctactccaatcactgaaactaggtagaatcaagaatcaattaatgagagaactccaaaatcttcaagccacgtatcaattgaatggtaggaactacctgcaatggtcacaactattgaagtcttttctgaaaggaatggggaagctgagtcatctgattgggactggacaaaacctagatgatccaaagtttagtgtacgggataaggaagattcaatgatcatgtctgggctttgaatttccctgaagcgtgaaattagtggaagttgcatgtttcttatgactatgaaggagattttggaggcagttcaacaaacctacttcaaggtgcaagatgtagcccatatttatgaaaattaagactaaaatattagccactaaacaaggtacattcttagttattaagtattacaacattatggaaggattatggcttgaattggactattatcaaaattttaaaatagagtgtagcaaggatgctacaatgttacaaaagttcgtagaaagggaaatgatttttgaatttcttataggactcaatgtggagtttgatcaagtttgagtgtcagttctgggaaaggagtcttcgcctattctaaatgaagtgttctccataatttgagcagagaaaggttgaagaattgttgtgcttgctcttggtctgcagatggctccactatggtttccacaaagttgaatgatagggattcaaaattaatagtgagggacagagtagtaatagagaaggtgggaagaatgaattttccaaaccatccaaccatgatggagtgtggtgtacataccataagaaaccttgctgtatgaaagagactagttggaaacttcatgggaatattggttggaatggtggctttaagagtttctagcaacaaagtcaagcacacatgacaaatgtggaagatcactctcacaagaactctcataagaaaccaagtctcaatggtacaaaaattgggggcctaacaaagacgagatcgaaagcctaagaaatctccttatcactcttgagaaaccaacaagaccatgctcattagcctagataggtaatttctttgttaggacattttttgtactgacaattttgttccttttcattttggcataggaacctttttagatgtgacttactctccattggagaattgaggttgctgatcattcaaatggactgccacaagtaagtttgaaaaggtgtgcttgagacaaatttagggtatgaaagcttatggattggattgatcgtttaaaattggtgtaaaaatgtttttattattatttttggtaaaataggaccgcttaaacattggtttaagcactcaagcattggaatcactcaagtgctagaaccactcaagcgcttgtgctcgagtgctgatgctcgagtggtggtaaattccgctcaagtggtcgtaccatttttggtatattttggcaatgcttctttttggaaattcatgattatttttaattaaaaaaaatccgattatgatcctttaggttttagaacgtatatatacattttctaaatccgttttatggtttaatgcttttgaaggaaaaaaaaaaaccctagcttgctccatcattcctaaaactctcagtgttcattgattcaacattcaggttgttgcaaggacttgcatccttttaaaggctgaggtgaatccacaagagcattggagatgttacagcctggacgtggatcttgatataggtattggagaataagcctttaggataagcaattaggtaattctgtgtatcttaatcttatatagtaagttctagaccctatggttttttatctccatagttggtgtggaggttttccacataaaatcttgtgtctcgtgtgaatgtctttattgacctattctttcatcctacaagactaatttgggtcaatatagttcaattctttctgtcaagtttattttgggctaagtttagtcaatccttttagtataatctttaaaattcatccattgaccccgctctgggtgttaccgtactagacttagttttttcacttttgtatgttatgctcttagtagcttacaacatgtcatgttttagttcctaggccatcgaattagggacgactgatcatataacccactcctcacatcaatttgttacatagaatctatgtagattaaagttgttggtggttctctagcaactattgctagtcaaggggtagtcactctaactcctctttcattaaagaatgtgttccatgttcctaaactattcatcaatcttttttctattcatcaaattaccaaagacttgaattgtagtgtaactttcttccctacgtattgtatatgttaggattaggataagaggaggataattggatgtgctaaggcgaaggaagggctctattttcttgaaacaatgagtagcagttgtgaccagtttttgtgttctatctatcacaaaattccgcaccaaacaaaaatgaaatctagcttcatcacttttgtcttggagatccaccttttagtttacttaagaatatgtttcgtctgctgtttaaaagtgttggtattgatagtttacccgatgccgttttgaaaactcataaacatcatcgggtttcatttcctttgaataatacaagatcatctactttgtttgcattagctcatttagatatttagggtccacatacggttcctaatatttttggtgctaaatgtttttttttcattcattgatgattgcactatagtaaattggatctctctcttaaaacaaagattggaagtgaacaacatttttcctatcttctacagaatgatgaggaaccaatttagggtttgcattagaagcattagatttgacaatcatcttgtgtggataccccacaacaaaatgggatattagaatgtaaaaacaagtatttttggaatttcatttagaagaaaatcaatggagtctcattattgagaattgcaataattaaaagaaaaactaatattatttattcgctctcccttggtttacatcaattaaccttattggtaggcttttctaaaaaatccaatttctactagaattctaataacctattatgactctaattctaattctcctaaacctattatgactctaataattagctactcataatttaactccaataaatactaatcctaatttaatacaaactaatgctaatctatttaaaattaatttatttcttttcttctctttcttgagtagattttggagatccatcctcctagtcacatggtagttcttggaaaatgatttcccaatgttctctctctttctctctctctctctctctctctctctctctctctctctctctctctttcttccttttttatggccttgtgtgggaggttcattctctaatgttctgtctttttcattttgtggtgggattccttatcctcctttgtcggttttggcttctgtttttcccctttgttcttctttataaatgatattgcttgtttcttatgaaaaaaatattttaaccttttgcaggtggtta

SEQ ID NO: 13047 - DNA, 1511 bp, Vitis vinifera
  Intron number 4 from transcript GSVIVT01013788001 (locus G SVIVG01013788001) derived from phytozome v7.0 (chr-ID chr1 ; pos 7573526 to 7575036 reverse strand)
gttttcttcagaggatattcaatcacccatttcaagtaaggaacactctgaatcgactctcttgtgaaaaaccctctactctcaagttattattgctgtttgcttcaatttctgtgtcctatcatcttaatgattctaaatgatcagcatggaacttaactttacatcacctattctcgtacaaaatataagattgggtagacctggttttggtctttctgagatgcttgcttgctaatgaaaagaaaatattgaataatttttacatatagtactgattgtagaaatggtgtgggcttgtggtaaaagctctagattcaggagagagggataattgagaagcatacaatgttggtaaaatttatgaagcaagtcaacaaacaaatttaatgatggatttcaacagggaatacacgaggcatgctatgatgagagttttgcattgtgaattctatttttctttggaatgatttggtagtctagtcaagtatacttttctgttcttgatatgttcttaaataactgaattctgaagtgtactttatgccttggtgatatggttattggctgttaagagaagagtgtgtatttcagcattttatataatcatggaaatgttgccaccttggtgacacatgaagcaaaattaataaaatgcctcaagttcagcttacagtagcttaattagattcatagctctgaggcttgcttaaagctgttactgttggcttaaacctaaaaatgtctagcctcatctgtggcctcctcctgaacattagttcagaaaaattaaggaataagcaagtgggaaggtctgaacccaaaacatagagaaatcaaggctttaacactttattaagctatcattttaacccaaaagcttaggttattaggtaataggtcaacgatctatatcaagttagctaacaaataaggctaataatcttaactgtgttttcaaccaatactgacttggcttttctattttgaaccaacctaacccccacccctctcctcttcacgtgaccttttcttgcaaatctaactacaagagaatatttacaaatagctttgactttgtttggaattttttagttatacatttgactctaccaaatccacagttgtaaacttcaaatatattagcaaatgcaaaagcaagtgatatagatcagtacaatgcgtggaactcatatattgtggaaaatcagagttgtgaaacctgttttaaatactgtagtgattagcactgactgtaacatctgggaaggaagtgtaaagtaataatttgagccatttaatgctggtttacaaccataggctaaaaacttgtccaaaaatttgttcttcattctttggattttataggccctgtaatatgatggatgatatgtggattatggatatgtaaatggctcagttaaaaagggaaagaaattcatatctgtaccatgtgactagctgtggaaaaagggtttcttacatgtttgatgtggttgcagaggaggcca

SEQ ID NO: 13048 - DNA, 14460 bp, Vitis vinifera
  Intron number 3 from transcript GSVIVT01020206001 (locus G SVIVG01020206001) derived from phytozome v7.0 (chr-ID chr1 ; pos 9041277 to 9055736)
aattgtgcattgggccctgtaccacaagaggagaggtatgttataagcatgtttagttttggaagctaatctgattaccatttttttcatgttgttttaaatattaattttttgtttaattaatttcaccttcttgtcacttttatttagtatttgaattttggtatagtggtaaatatatgcaccttggtcagttctatttgaattgggtgttgggtttagtgtatgtttggttcttttctctccaatgttgcattccgtgatcatgattgatcgaccatttctgcttaatttgagtggtatatgacaatagtcattagtcaccttacacttcttatacacttacgttatttcatttgatttggtgtgtctttcctatatatctttgttaatcctgctgtgtaatatttgggtttgtagttagtaatatatggggattggatcaattttatgtgatggggcattgaagttttaggttttggtttactcatcaatgttcttccccattatagcatgtttgagttggtagccatcatgaaagttcctgattgatttgattggtatttgttgacaatcacactacacttgaaatgcaggaatcaagatttctaaactattattaggaatttcctcttccaatcttccctttttcatagatatattttttgataagcaaagataatattttataatataaataaacaagcaccaagaaactgtgctccatcatatataggatgcatacagtgagtgttaaaggatgaacaaaaacaccctgccttagctggagtccagccaatcaacaaaatctattaaagacatggtattagaactatgtgcatctttacccacaacaaaagattactaagaaccttcattatagatatcactctaggatagcaaaaaggtcactttttggatctatattggccttcaatttgctattgaagaaagcctctattgttaggttttgatagagaagcctctattattaggtgttgatagagaaagttgtttttcctaaatagaaggttgcttcacaaacagaaggttgtttgacaaacatggaaaacctggatttttttttaatatttaaactttaattttcaaacttttttggtgcccatgtgggtaaattttttttgatatctgaactatttgtgtatgttgtttaaatttcaagtctaaagtaccctaccaaaaggaatgttgtgatagatgataagtttgcctatggatgttgtaaaagagggaaatgctaaaagccgattactagggttgagaaagaggaaagagacttggtatttatcttacactaggaaataatttggcattgccatcctgttctttaatcatgagctttgatgcatggtaaggcagattaggccattatggggtagggggatttattataagtaagaatcatgtgaacactcctaggttattcttttcctattctatttacagttttttatagggaaattgtgtatgcacacaatatcttagttcctaggaagtgtacaaggatcatttaagaacagaaggagaaagaaagaaacaagggttgataggcacaagaatggccttatcgcatgctgtaaaaaaattctagaaaagacacattcacaaacctggaaggacctctcaattatgcaaatagagacctattagaatgtttaaaactataataggtaattcgatttcacttgtccaaacactgcagacaaacacaatgagctgttctccacacttgccttcaactctttccaacaaaattgtcatgccaatttggtaattcacttttggaaaaatggtgtaccatccaacatacattaaacaaagataaatgatggagcccaaaaaatgtgcgcatgctcagagggacaagggtatggttaatttgttattctatttatttatagaggaaatgtcaataaacaagagacgtcccatctcactaggtgagtagtgtatgttttctcttgcacttcctttgtcgcaactatccccaactccctaaggacagggatttgtaaaatgacttcatagataaagaatctaaatctttgaggtttgctattaacttattttctctcccctacacaagatagtagtttaaatgacatgtaggtaagactttggaaactctagctttaattatgaaaatcctgtaggaaccttgtattctagtgcccctgaccattcttgtttgctatatattaaccttctgattgtgtttttgattgtagtatgtttagtaggttcagaaaacagtgtttcaaaggaaactccctaccccaaacatggtaccaaatttaattctgagtccatttcccacaaaatgctagtgcaagagtggaaagcaacctaaccatgcttaatgaccttccaaaagcataacatataagcctcccttctcccgttacagcacaagctgtctttctcttagaaatttcccaaactcagctgctacaacaaatattaagtttaataccaacctctaaaatcacattttttggataggcaaattaaagaaaaatataaaaagatgtctaataaaacaagaaggtgcaagctaggtatacaggaaatacacaacgggccaaaagaaagaaagaaagaaagaaagaaagaaagaaaagcatgaactagctggttcaactcaaacaaagcttttatttattatttatttagtttttatttttttaattaacaaatcaaaaacaacaatttatttcaaagcatgaagtgaggataaattgtcctaaaaagtatacaaaaattgatcaaaagatgggaaacaaaattttagtggggttaagaaccataaacaagatcataacaagaaatgtcctcacatttacctattaaaaataaaggaaaaaaaaaagaaaaacaagaaatattctcacattcaccaaaaacccaaaccaaagactaagaaacaagatggttaaggtggcatggatttgccaagaagaatctctaagctagaaatattatgcttagctatagaatctgcctagtggttagaggagcatgaaatctattaaatggagcaattaatctcaatggacaaattagtactttggtgtgctctctttttggtgcttttaatgcattttttgtttacctattaaaaaaataaaaataaaaataaaaaatcccaatggacaaattaagcatcctttgcaaccaaagtttctaaaggtgaaaatgtaaggtgagatgttttagtgcccttaagtcaatgtgtgagctttgaggtgtaagccttttggaactctaattttcacaattaataaatatttaaaataatttaaaacatgcaaaaataaaataaagacaaaataagtgatagacatgataagaagtcaatttaagtggcaaaaaaataattgaattgcatgaatattttgctacatgaaaaaaagaaaaattaaattgcataatttttttgctacatgcaaaaaaatagttggttttttttttttgtaatttttttgctacatgaaaaagaaagagtaattaaattgcataaattttttgctatgtgtaaaaaagaaaacaaagaagtacctatcaaaaaaagaaaaaaaaagaaaaggaaaacaaagaaattggtggactagaaagaatttcatgaatagtatagaagagagtacctaaataaaagcaaactaattaaataaataaaaatctaaatgaaaaaaatgcataaaacctaaatgttggactgagttgtgagtgtgtgagaggaggagttatgtgaatgtgttgagaagaggtgggacttataaatctaaataaaaagttcaattgtttatccggaggagaatgggattagcgaagggatattaaatgcctttagatctttactatccaatccgggggactggtgccctcctttatccaggctgcagtgtgaaacgctgcagaatatggatgctggcgcgttggaggtcccgttcacggaagaggaggtgtatggcgcgctgttgggatgtagtggggacaaagctccagggcttgatggcttttcaatggctttctggtagtttgcttgggactttgtgaaggatgatgtgatgagtttcttcaggaaattctatgaacacagtaaatttgttaaaagtctaaatgcaacttttctagttttaatcccaaaaaaagtgggggctgaagatttaagggacttcatgcccataagcttagtgggaagcttgtacaagtggttggctaaggttttagccaatagactaaaaaaggtggtcggaagggtggtctctaaggctcaaggggcttttgtggagggtagacaaatcctagatgcggtgctgatagttaatgaagccattgacttggttctgaagaataatgagaatggtattatgtgcaaacttgatatagagaagacatatgacaatgtggactggtattttcttctcacagttatgtagaaaatgggttttggggagaaatggatagggtgaattaagtggtgcatatccactgcaagtttctctgtgttggttaatgacacgtctaagggcttctttcaaagctcaaggggattgaggcaaggtgatcttctctcaccttatctttttgtgattgccatggaggtctttagctccttccttaaatgggctatggatggaggttttatgtcgggctgtagggtgaagggtagaagtgaagaaggggtttaaatttcccacttgttgtttgttggtgacatcttggtgttctgccaagcttctcaagaccatctgacttacctaagttggttgcttatgtggttcgaggctgtgtcagggttgagaataaacttggagaagagtgaactcattccagtagggaaggtagagaatattgatgatctcgccttggactttggttgtagagtgggtcgtctcccgtccacttatctaagccttcccttgggtgctccgtttaagtcagtatcagtgtgggatggagtggaagagcgattccgtagaagattggccatgtggaagagacaatacttatccaagggaggaagagcaactctaatccgaagtactttgtcgaatcttcctatttattttatgttcttgttgtgcttaccaagttttgttagacgaagactagagcaaatccaaagggatttcctttggggtggtggtagcttggagcgaaaaccacatttagtaagatgggagttgatgtgcttaagtaaaaaaaaagggggattgagggtcaaaagtctttccatcctcaataaggctcttatttccaaatggaattgacgattcgcaaatgagagagaggctttgtggaatcaagtgattagagggaagtatggggaagatagagggggttggtgctcttgggaagtgagacgggcgcatggcatggggctttggaaaggaataaggatggactgggatggtgggtgctcggatttctttcagtgttggcaatgggaggacggtgagattttggagggatagatggtgtggggattcccctttgtgtgagtcttttccttccctctttgctttgtttgttgacaaggaagcttgggtggcggatttttgggatccatcggttgaggggggttggaatccctgtttctcaagagccttaaatgattggggggtgaaggaggcggaaagatttctagagcgtcttcataagaagagagtgcttggagatgtggatgatatggtggtttggaccgaaacaaagagtggtaagttctcagccaagtgtctctaccttgctttagaagcggactgcccttatttgtttccttctagctgtatttggaatgtgtgggtacaacccaaaattaatttctttgcttgggaggctacatggggtaaagcattaaccctagatcttgttcagaaaagaggatggaccttggcaaatatatgttttatgtgtcttgagaatgaggagaccatagaccatttgcttcttcactgctcaaaaacaaaggtcctatgagagttactctttactttgtttggggtgtcttgggtgttgccctctttagttagagatactctccttagtgggcatggttcttttgtgggcaaaaagcgtaggaaggtgtggagagctgctcctttttatatattttggacggtttggaagacaagaaatagattggctttcaaggatgatgagttgtcaatccaaagattgaaatactcttttgtttattctctttggtctgaggctaagttgtttatagttgaatgcccttaactatggttaattttattgattggttgggatcctattaaggctgttttctgggccagttggattttggtctcctttttctttttctttggcctttttggtggtgggtgtataggtttgtataccttgagtcgcttttttggcgtctctttatatatgaaattctctttacttataaaaaaaaaataaaaaaaattctaatttagtttctccttgtctcttccaaagctaactctctcatgggttcatcaaatagttttcaataccaccatcactattaaaaaaaagaattttatttttgattggaacacacattttattatcacggattaaggaaatataaagaaggatgagaattccttcccccaatttttcaataccaccatcactattaaaaaaaagaattttatttttgattggaacacacattttattatcatggattaaggaaatataaagaaggatgagaattcctttccctaatcaaaatcactacataactttggtcaaaagtgagaaaaatttatctactctagatgatggaaatgtacatctaaaagtagttacaaatacgaactcaaaagccttgttggggaaagagagaggtggggggtagaaaatcccttataagagaaattaattgatttgacttttttttttttgctaaaatatttgccacatggttagctgcctgaggaatctagcaaaatgaacaccttaactttagagtaatatggcacaaccatccatcaaacctccacaagcttctctcctgctcatatacctaggataggactactgcaaaatccccctctactcaaaggttgaatagcaagcttaaggccttccaatagtgctaatatatttgcctcaatggctagacctgctccagcattcttagagaagactttcactaatgtttcatgatgatccataagctctaatttccagctggctagagttaccgaaaaagcatttgtcaaaattcaacttgatgtgcccattggaggaggcatccatatggggagcatttcctcaaccatcctagtagatttgcttactaggttccaatctagcgatataatggtcaaaatggtgcatatggtgctttggttaatgcctaaagagatgagttgctaatagtgccttagcaaagggtgcaccaaagaatagattagagtgcttcaaaggccaaatttgtgtatccaggaaagtggatggcaattgttttttggggcaaaaaatggatatatagtaatagtgcctaagcaagggtgcaccaaagtacacacgatttgtatgataggcatcgatagacaaacaaaaagaagagagtaaatgataaacgcacaagggctagagttcctatcattagaaacacacatgggctaaagttgacataaggagagtaagtttctcaatttcttggtcagaaaggttgtgctggaaattgaaatttgaagacaaaaagagaggggatgaaatcaaattgaagagacacaagaatctcttgacctcactaatttgaatgttggtgttccatctaataaccttgtaccaaagaacattacactctctttggggtcttcacaaccattttttgtgagggctttatttctcaaggaaactccactagagcttcgtctcctttcactttttggcttatagatctgctttcatcctatcaaattatctttcttcccttccttcagctcaactatagaaattcctgttgtattatctcatgatgtctgttagatagtgtacagttatttcagttatttacttttccttttctttccttattgtattgtgggtcccactaacatgtatatatatacccatgtccaatgtgtatttgttaacagtttttcaataacaaaattagggattctcccttttctctcttttcacatggtatcagagcctagggagaaaaacctaattatttccggtttatccgtgaatcaattctaggaaacctttcagtggccgtgtttcattccggtcacctttcccatctcctaaagctttctgatcaaccgtatcaccgtcagaaaaccctcaccgccgatgacttttccggtgacttttttccggccaagtccttttccgacaccgaccataccatcaggtgcgcaaggagaagatcttcaagttttgtcaaagcactggagggagattctcagccacgcgccggccacgtgcgtttcttctctagcgacctgaacctcacgcgccggcgcgtggagcactttccgcccacgcgcttccacctccagccttgcctgacgccgtctagccaccctccatctgtgcttgtcccttccgagccctgcaagtgcattttttggggtttttttgtctccgtcggctctctaaacagcctttccggtgacctccagtgacttcctctccaccccgagccttgcatgtgtcttaggaagtgttcttctacccttctagtagtgccacatttgtttttctttactatttggtctctcacagccgcaggtcctcggtttttcttctttctgccgcgatctgaagccgtattagggctctcttcgatccaaacatatttcgttctccagataagtagatatgactactaaaagttccattttttcctctgtcatatttggatctcgtatgattacttcggagaaattggttggcagtgaaaattatttgtcttggtctgcctctgtggagctttggtttatgggtcaaggttatgaggatcaccttgttacgtagaaggcggatatccctgaggttgacagagtacaatggaggaagatagatgcacaattatgtagtgtgttatgacaatcagttgatcataagattctgcttcatctttgggcctacaaaacatgctttaaattttggaatcaggcaaaagggctatacacgaatgacatccaacgtctttataaggtgacttctgctattgtcaatgtcagacaacaagacatgaatttatctacttatattggccagattacctctcttaaggaggaattcttgaccgtgatgtctcttactattgatgttggggatcaacgaacacatattgacaagttcttcatggttcctacgcttattggcctccgttcagatcttgagaccgttcgcgatcagattcttggcagttcctccgttccatccttggatgatgtgtttgctcgcctcctccgtatctcctccactcagactttgccatctggtgacacttcaagattcttctgtgttagtttctcaaactaactctcgaggatgacgcagtggtaaccaaggtagaggccaacgtcctcattgcacctattgcaataagcttggccacaattgtgatcggtgttatcagttacatgggcggcctccccgtattgcccacatggcccagtcatctgatcctcagccaccttagcctcccagttcctccacatcttagggtacttccctcactaatagtgagtatgatgactatctccgctatcaggccaccaagttagcttctgttgcctagactggtaatgcttctgcttgtcttacctacacatcttctcttagaccttggattctagattctggcgcttttgatcacatatctggtaataaggatcttttctcttctattactactacctctgccttacctactgttactttagctaatggttcccaaactataactaaaggttttggtttagctcatcctctcccttccctacctctccattctgtcctttatgcccctgagtgtccttttaatcttatttccatcagcaaaataactcgcactcttaactgttctattattttctttgataaatttgtaaccttgcagaaccagagtacggggaagacgattgacataggacgtgagtttcaaggcctctacacctcaccttgccttcaactcctgcagtttgcatttccactgatgctcccctcctcatccacagtcgcctgggccaccctagtctatccaagttccagaaaatgatccctcgttttttatctttgtcgtcgcttgcgtgtgagtcctgtcagcttgggaaacatactcgtgtctcgttcccaaagcgtttgaataatcgggcaaagtctccttttgaacttgtccacactgatgtttggggtccttgtcagaccgcgtctactttaggatttcagtattttgtcactttcattgatgactattctcgatgtacttggttatttttaatgaaaaatcgagccgagttattctctattttccagaaattttatgctggaatccaaacccagttcaatatttctattcgtgtgttgcgcagtgacaatgccagggaatatttttctgcaccatttacttcatttatgttccaacatgggatccttcatcagtcttcttgtgctcatacttctcaacaaaatggggtagctgaacgtaagaaccgacatcttgttgagacagctcgtactcttcttctccatagtaatgttcctttcgtttttagggggacgctattcttacaacatgttatttgattaatcatatgccctcatctgtattacacgattagattcctcattcccttcttttccctgaccaaccactttatttccttcctcctcgtgtttttggttgtacttgctttgttcatattctcactcctggacaggacaaactttctgccagagccataaaatgcatcttcttgggatattccagactttaaaagggttatcgttgttattcctttgagactcatcgctactttctctccgctgatgtcactttctttgaggacacaccattcttctccacctctgagtctcttcctgtttctgaagtcttaccccttcctattatctccccacctgatgcagtgccttttcgcccacttcaggtttattatcgccgtcatcgtgtcactgttcttccttttttggccgaggtacctgctgactcacttcctatcccttcggcttctcctgccccggctctgcctccttctgctgacttacccattgctcttcggaaaggtaatcgatctactcgtaatcctcatcccatttacaattttttgagttaccatcgattattttcaccctattctgcatttgtttctgctatatcttctgtttctcttcccaagagcacccttgaggctttttcccattcaggctggccataggcaatggtagatgaaataactgctttacactccaatggcacttgggatcttgttgttttaccctctggtgaatctacagttggttgtcgttgagtctacacagttaaggttgaccctgatggttaggttgatcgccttaaggcctgcttagttgctaaaggctatacttaggtttatggttctgattatggtgacactttctctcctgttgccaagataacttcatttcgtctattgctctccatggttgctatgcgttcttggcctctttatcaattagatattaaaaatgctttccttcatggggatcttgctgaggaagtttatatggagcaaccacttggttttgttgctcagggggagtctggtttagtgtgcaggttacgccgttctctatatgacttgaaacaatctcctcgagcatggtttaaccattttagttctgttattcaggagtttggcatgttccgcagtacagcagactattccgttttctatcatcataactctttggggcagtgtatttatctggtagtttatgtggacgacatcgtcattacaggcagtgatcagaatggtattcagaaactaaagcaacaccttttcacccactttcagactaaagacttggggaaactcaagtatttcttagggattgagataactcaatccagttccggtgtggttatttcccaaaggaagtatgctttagacatcttggaagaaaccgatatgttagactgtaaaccggtaaacactcctatggatccaaatgtcaaacttataacaggacagggggagcctttaggacatcctgggagatattggcgacttgtaggtaaactgaactacctcaccattacttgtccagacatttctttttctgtaagtgttgttagtcaattcctacaatcacaattgtcaattcctacttgtaagtgtgatagccattgggatgctgtaatccgcattctttgatatatcaaaagcacaccaggctaaggtgtgttgtacgagaacagaggttatacccaggttgttggttacacagatgaagattgggctagctcacccatagatagacgttccactttcgggtattgtgtttttattggaggtaacctaatatcctggaagagtaagaaacaggatgtagtggccagatctagtgctgaagccgagtatcgagttatggctctggcaacgtgtgaactcatatggctgaaacatcttcttcgggagttgagatttggaaaggatgaacagatgaagctcatctgtgacaaccaagcggctttgcatattgcatccaatccagtcttccatgaaaggaccaaacacattgaaattaactgtcatttcattagagagaagatcgcatcaggatgtgtggcgactagttttgttaattcaaatgatcaactagcagatatttttactaaatctctcagaggtcctagaattaaatacatttgtaacaagcttggtgtatataatatatatgctccagcttgagggggagtgttagatagtgtatagttatttcagttatttacttttcattttctttctttattgtattgtggttcccactaacatgtatatatatacccaagtccaatgtgtatttgttaacagtttttcaataacaaaaattagggattctcccttttctctcttttcacaatgtctataaaggagagatcaacaaccattactaaaattcttgactacaaaaatatgagtttgaataaatggttttttcacaatcaacattgattggtcaaatgcttcaaaggatctcttgttccttcattacaatattgtccaaagaaaagagaaaggaaccattttccactccactttgcagctcttttcattgaaattgatgtgccaatccagcaaaacatttctagctacctggggaagcatgtgaagcggcttaaaaaggaaaaccaacaaagatcacaaagtagaagcccattgaagatgaattagaatataatatgcctttttcctacttttgattgcatagataataccttctagtcatagttctagaacctcataagtggatcaattgttagggcccaattcagcaacaaaagacttctgatccaatctatcctttgttagtaagatctagaacaaagagtcagccacctaatcacatacgttatatgacctccattttatgttttatctagccattataaaacttgccatcagaagttatgcctgtgaatagctaaacaactgaaattacattgaccaaaagtcaatattgtccaaaaagagggttcttgtaagaaaattttgattttacagatttctaaattgacataaaaatgacatgtaagtttgtgttattcaatagttctagttttgatggagattcctggcactattttttattgcattgtcccatctttgccccttctattctgaaagtattttctcctgttagctattagtccactggagacactcactagaaaacttcttgtgaaaagatcgtggtacatgtggtaaaaggtccttcatttacctattaacttcccacctggaagtgcaccatcaatatataatcactgaactgacaattaggatctgcaaatcttttctttgtttatttatttttctgttttgtatttgtttgtttgtatgcttgtttgtttgtgtttgtgtttttgtgtgtgtgtgtttggcattttgactgtaaatgtaattatctgattaggtacctttgtacttgtatttgaggttgtatacatgttctgccatttttctatctatgcagagatgtttctgaatgattttatcattgtcttctatttggtgcatgtgatatgttgtaatgcaatatctttatttatttgattttttaagcttaacttttgtgatgtaaagaatcgtatgagtttcatttcatctagttctttacttgtatgtatgttattggttatgaagtcaaatttaagttggcatcttgtggtgtagggtttctatt

SEQ ID NO: 13049 - DNA, 5391 bp, Vitis vinifera
  Intron number 1 from transcript GSVIVT01024286001 (locus G SVIVG01024286001) derived from phytozome v7.0 (chr-ID chr1 6; pos 548146 to 553536)
cgtcctttctcttctctcgaggacgcctgcgagaggtttggttttgattttgttttctctgattagggtttctgatttgttaatgatcaagatcgatggtgtgtttgcgatgattcattgatttgggtttctgaaaattttgcatcttgtgggcgtggttttgaatttgtgaagggagtgggtgtttttgttgggtttcatggggatttgtatttagtgatcattgcaatggatatttgtattattaattgccctgtttgatcaattttaaatgtttgaagatgggtttagttctgtttgatgtaagaaagtctcagaaaattagttccttgtttcttcagaagaagaaatgggatcattcaaatattcaatattgtgcaaaggatctgatgggtaatgacgtgtaccttgtgacactgtaagtttacgaaatagtggagctgtggactctgtgaccatggttttccttgcaaatgggaaataagatcagatgcaaaataatgggataacttggcattgggagtcatatgccattgccatgtttcataaaactgtttcgtttaacacatttcatgcccgacagttcagcccatgtgtttagaacacctaagaaatcaaataagagaacaaattttttattgcttgaagtggtaatgtaatattaaaattcattgagatttgagactggtttacatttacatggatgtatatgtatattggtatttatagctaaattgttctattggttaaatatgtggatgtgttctccagtggccatgcttagctggccttggtttgagtttgcttgcttgttggatgcctggcatattggtgaattctatctaatctggaaatgtttgtgatggtgttaaaggatccttggtgacttgatgttgatagaatggatagaacatttttctgttggcttttatttcgtaatgcagataattattccagctttggattccatttatatctgtcttctggcaaatagcctgtgaaatggaatgaaatgctttgctatacgttttctcaagtttctagagaatttcattgttgttttcaaaggaaaaatcacttgtaatgtcactagggtttttgtgactgctgcgtggaattacaaagacagatatgctctgtcacatatgaaggtctccaaatagtgtgtacctgctttgaggttgagatgtgagcatctgcagtgacatgacattagaatatctgttgtatgcataggatttctgtttatgtttcttagaataatatattagattctttcccttgatctgtgggttgctgtctgagttgatgttattttattttattttatttttataggtaaataagagtttgtattagcaaagcttagaagtggtaaaaaaaagtacacacaaagtatacaaacaacgcccaagaagctatgcgaaaagaaagacgaaagaaagatcctctaaataccccctaccccaattcacaaaagtgtacaaaaaagaatgttttaaagcttggtcggaccgtttaatgtcattgaacactctttcatttctttccttccataaggtccacattaagcaaaggggggcagccctctaagccttctcccttctcttactcataaaagctccatgccaaccaatcaaattccttttaattgaggagtgtaggacccactgcacatcaaatagagagaaaagcaacctccacaacattgtagccttcttacaaaataggatcaggtggtcactggtttcctcttcccctttacacaagtaacacctatttggcatgttctagccccttcttttgagctgatcaatggtcaagattctgttccaagacgcttcccaagcaaaaaagcttaccctcatcggagcccaagacctccaaataatacttcaaggaaaagggtcactagaggttcttgtgaaggagcggtagagcgatctaatagaaaaaaggccattcttgctaatcttccagctcaagacatcctccacatctctattcaaaaccaaaggatgcagttttcagaacaaaccctccacctcttccatttcccaatcattaaagtgttttgaaaacagaggattccagctacccacctccccgccctcctcccaagcatcaaacacccgctcatccttgttgaccgccaaccggaataaattagggaaaacttctttcaacgtttggtcctcacaccacaaatccttccaaaatttggccttcctcccattccctacgataaagcgggatctacaccgaatatcttcccatccttttctaataactttcctcacccccacaccatagcctcccctcacttctctcgaataccaacctcctccctctaccccaaatttgtctatgatgacttgtttccatagagaatccctctctactgtagatctctagctccacttcctaagtaaggctttgtttagggccacaagactgcgaatacctaagcctccttgcctcatatcagcacaaaccaaactccaattcaccaagtgcggttttttctctaaggcaccaccgccccacaagaagtctcttagaatcttttcaagtcttgcacacaccttctgtgttctctatgctgtttcatatttctcttctcttcttttcttctgcttctttcccttttttccttcttttcttttggttttttgggggtagattgaaagttataataaaggaaggggggaagcaggaggtggcatagtataggttggtgatctattttgcatttgtggtggtttggtctcaataatattgtgatgtaatgttactgtgatgattatttgtgtccctgtcaaaggtcataaggtgtttctgtgttatatgctgcatgtggtctgggtatatgaatggatttgtgtcttgtaggtttttaggcattgatttgtttgtgtcctctaatgaatcctgaaaatttcagtttattggtcatttgcctttgtttcagaatctgttttttcccccactatgtagtggggatgaacatcagtcctaaatattaactcttgtgagaaacttaatggacgaatcacattctttaattgaattacagcaattatttgttgtagatgaaatccattttctcagaggtgcttctcatgaatttagaagcccatgtaataaaactctcaagtattgagacatgtgagattacaaagatggtgattagttattataatgtattcaatcttggatttggaatggtataggatttaccctatgctttaataacaagtttccaacgctattaaaacttgtaggattgtacttgtcgaatgcaatagtttctatgtttatcagctttgaggaacttttctttcttcaagaagtgataaatctcttccctggaattttaactacagttagtgatggtcttggatgattgtttgtttatccttgaaattaaaagaaagtagtggtaaggataagtcatggctgctgctgaattgtcattaggccttcatttcaaattgaggcaaaaatccgaattttttatgaacagattgggtaggagagacaatattatcttgattaaggcaagcactgttggaattccaggtgaccagtgatggagagttgttcttgaaatcagctataggaagaacagggagcagagaagcaaaaatgtggcaacatctgccctaggaagaataggggagcagagaagcaaaaatttggcaacatctgctgaaccttccttaatcataacagttcataaccttctgggatggtgataattccttcctctcatcagattctggataaataaatctagacatggtactgctgtatcataaaaaaaattgaagtatgcttgtatcctcaatgtttcccaggaaaatttgtcccttccttcccattagcagttccagagatacctttgcccaactagagtgttcctccctggttaagaaatatatgaaattatgaatcctccttcccttttaagaaatactaatcaaaactccctaactcctccaatagggcttaaaccaaagagttgtttccaatcagcagcaattttttgaacataaactcaggaatgatcacttcttcagaatctggcaaatttggtctagagtccaaatagatgctggagaagtagcatggtgattctccactttgtcttgtgaggaaataaagtcctggtaagcagaactatatatgcgtgtgtgtgcatgtgtatgtgtgtgtgtatttctttagttaacttgttagtatgttagcttttatcctctttgtgggcttattccacaatcccaaaggccaaacagaagaattcttgatgctggagcatgttaagtctttagggcttactttgtattagtattattataaaccagattgtgtcacacttcccttgttgattagcagctctggattaggtagtcaatagttactcttgcaggaagagtgaactttagtaagtagatagagcagtggatggaactatagcaagccgtttctgcggtacaagaatatgatatggtatggacatggtgacaaggcaaatcctaaagaaaggacatagatgcagttaggacatggcagtgcatatgggtctgttatggaactcatttctatttctacaatgaaagaatcatttttcaatgatctgaggattttcctcattctgtttgttctaggtatgccaagtattgataacgacacaatgttttgtgctactttttcgtaatattttttcttgccatattagagttgtatctgtatcctagtgttttgagttttctgtcttcgtttgtctatttgtctaaatcgtagtcatgtcgatgtttcatatttgtttccatgctactatgccactaagcaacccttgtttaaatttgtttctcgaagtaaaactaatgattttgggaatcatttggagaaaatagccataattttggggttcattatcgtcttcctctgcttgagaggtggaccatcttcctctgtttcttcttcttctcaatggtcatcctctttttttgtcctttgttcaaatttgtttgttgacattaaatttgtgattagaaatgctgaccctagagagcttgtgggctttgagagatgaactaatttcctctgttttcttcttcccctgtctttgagagatgaactaatttccaagatattaaaaattaattttaattcttggattttgagtaaccagcttataaattcattactgaggatcaaaaccagggaagaaatgaagagaatcatgtttgctatctactttcaagtagaagggtagcctggagtgatgtagtctgtttttggtgttcttcctttgtctcatatatgctagaatcagactgtcatatccagttttttctgaatacttatgcaggctactgccttacc

SEQ ID NO: 13050 - DNA, 4383 bp, Vitis vinifera
  Intron number 15 from transcript GSVIVT01007755001 (locus GSVIVG01007755001) derived from phytozome v7.0 (chr-ID chr 17; pos 9426271 to 9430653)
ccatcggtgtaagtgcatcgtactttgagtgtgctcacttatatcattcttgtaattctacatgtcaatcttcatttatatcttatattttcaagagaaacttgtttgtcaaattggtgaattaggatgctcatgaactcttttattaatctttttccttttattttttattttattttattttggacttgaccttcatatacaaaaataatgaatagaaaatactgtttaatgatggtatgactcataatgacatggagctattgatttcttgcttggcttagatgatgaaaataatttcaacttgtttgaacaccgttgcccttggaaagccatttctcaagttttcaacgacttttccattttcattgatatttggtgggagatggaacaaaaattcattttaaggaagatatttggttgggtgatcatcttttcatgtttcaattttcaaatcttttcaaagttacaaggactaaaaagaagttatttctcttgtttccttagttgtagatctttcctctttcagactaccttggaatttcaattttcatagaaacctttctgatctagagattgaggaactaactagccttattttagtgctactttatgtatatgtcacattcctttctagataaaagagtttcgtcattgactccctcaagacatttctctgtgagctccttctataaagctttcttaatcattctcattcttctgctattacttgttttgctcttgctaagttaatttggaactcaaaagctccaccaaaggttaagacttttgtgtggctcgtggcaaataagaaggttaatactaacaacttgctttaattgaggaggcctagcaaagctcttagtctagaccattttgtaatgtgtttgaagaatagtgaatcagtcttcaatctttttcttaattgtctcactgcattggtactttggcacacattgttcaacattgctaatcttgactgggttcctcttagaggcataacagtgatatcgggaatttccttaagggctttgaaagccttcaaaagggaagattctttggcaagtggctgctttaccttttttttggtttatttggttggagaggaatgtaaggattattgaggatagatggagattggtggatgccatttgagactcaattttatttttttctttcctatgggtcctcgtcaccaaaccttttgcggatatcccattgtatctttaatgctagattggaagagtgcttcctactcatttagtttgaagaagacaatgattgactggttccccccctctattaggttccgtgaagttaaactttgatggatgttcattgggtaaccttggacagataggtattggaggtgttattagaggttatcttggtactgtattgagacctttttctaagcatgtaaaaatgaggttagctgcaaggtagaaatattggcattgttggagggggcttgatgcaagcaaaaactttatctctaataagatcaatgtctatgaaccaacttgagggggagtgctgagaatctgaagtctaataagatcatatagcctggaggagtttcctgtcaagcctaaaattctaggatttattcggctgatttgttcctatatttaaattattctatagttgtaaattatctataggaattctacagatattttcctattttttcttcctaatttttagcattgatcctagccttactcctatataaatttaacaacaatcatgtacacaattcaatgagttagattaatagaaaaattttcatcttttcccttataatattttagatgactgataaggagaggggggttcatggaagtttgacaactagatgcacaaaatcacagatattgcaaatgagttgggttgttctttctcttggattcctcatacctaaccaagttgcaaatcagttagccaaataaggagcaaatcatatgacctcctttgttggaggtttccttccccattgaggtccaatgttttttctcttgtatatatgcgggtttttatgaggaggggctagtttttgtggctctaattcttggttactttctatcaacttttgtgcacatttgaagaattgcttatccttcctatgtttatcaattgattgatgaatgaaaatgtttgtttttgataaaaaaaaggttccttaacttctgagtgggaatgtttatggtggaatttgaaatttaaaaacatagtagaagatgcagggactaaaatgaagaaatgagagtttttggtcgtagagaccttgaaaagagttgacaatggaacgcctaataatgattacctgaccaagtatctttccaaaagcaaattttcataccatcttttataaaaaaattagtaaaatcagagaaatctgagcataggttagattttgtgctttgcaagggcaatgatgaagccacctaacataatatttgatcttacccattgaagtgtaatctgtaggttttaagatgatcttatgcctacaatcactttactaagaggacttgatttgatagggaaaattttgaatcctaaagaattagtttgagtctaattttttgtaatattagttgcttggcacaaaacagaggacactttatggactatctttgtttatttattggcaattttagaaaagacaaatatatgctttcatttgttactgcataaattctcaaaaatgccaacaattttgcctatatagccaacctcttcttaatagagttttttaaaagaccctaaccaccttgcactattacttttggacacctatttgccttgggtttcccaatgcctatcttatgaaattaaactctagttatgaaaaaaaaaaaaaatgaaattaaactcaaggtaacctagccagagggtaagtttcacttggcatatgtctccttaatccttctgctcgcacaccaaatatgtcttaaatccaatacgattacaatgattgaggcaaatgtgaacactaaactaacacatacagaataggaagaaagtagactatatcccacaaagactccctttccttcttatgtcttttacatcaatttgttttatttactttatttttcctagaaaacagatttttttcttcctaacttttataatgtttagcccctacaataatattaattttatgttttctaggaagttagtttcaagagacattgaacctctctaatgaataatgtttagggccaccttggttaaattttcttcatcaatagttcaatgttaatgtataattggaaaaaggcaaaatcttgagtatcttctttttatttttttatattttcatttttaatatatatatatatatattttataacaaggaattcaccacaacaacatggaatttatcttgattgttgatgaagctgatcttaggtgataaggccttgcccctctagccgcaccacttaaacgcggggggcttcaaacttggagccttagtttcattgctagagagcattgccactgtgctgcacctcgagggccttgatgaagtcttgaagcctttggatcaaactatttatttatttatttatgataagaaaataagagatgtatagatttatattaatgaaaacatcagaaggatgaggagttcaccccatgattacaaaaaaaacctattcataatatgattgacttcctttgctatgtaaggagtctatacaaaaggtttatactacaaacgcaactcctctcaaggatgtccaagcccttttgatttacacactgaaagttagttgagttggataacattgagaggaatgcctttaaaagcctcggtgcatgaggcctagaaagtgaaatagaagtgaagtaaataccgtaacccctttgttgtcctcccttgtcctcgaaaattctgacatttctctcttgccacacaatccaaaccaatgtgtgacaagttatttgctaaaccccctatatgaaatgatcataatgtcgcatacacttctagttggaaccctattaatcttcaattgtttgaatatacagtgccaaaactcttaagttatcagataatgcagaaaggaatgatcaataggctttccactccccttacataagacacaccaatcaggcataagggatttgaaagctcttctcaattgtaacatgtcgttggtatttgaaagctatttatttttttagttgctactaatttgcatacagcttttgttgttgttttcttttgcctttttaagtttttgaatagaaggtcaaagtctaatccatactcaatacttgtacatttattttctttcctttgttttggtgttctatctaattccatgacttatgattctaatccaggtctgttttgtacttcatttc

SEQ ID NO: 13051 - DNA, 6522 bp, Vitis vinifera
  Intron number 18 from transcript GSVIVT01027730001 (locus GSVIVG01027730001) derived from phytozome v7.0 (chr-ID chr 5; pos 7241628 to 7248149 reverse strand)
ttgactagtggtcttatttctgcagtggaggagaggtttgttcaacttcttgcttttagcattaaaaaatataattatatgagtaagatatactctttgttatgatatttcttgtgaaaaaaaggggtgaagaggtatgtgaagaatttctgaactcctttattgatgatgaatcggtacacaccatacacatatatatacacaaatgactgaataagaaacaatcaatctagcttaattctctcctaaaattaggaaactaaatcataaagaaatatcctaaatgatctctccttttttattcctaaattaaagtcctaactttggcattatttcaacactccccctcaagctggagaatatatatcatataatcccagcttgcaagttaagtcttcgaagttaggcctaggtaaagctttggtgaggatgtctgcggtttggtgcttggtaggaacatagtttaatttgaccgtctcactagtcaccttctctgtgataaagtgtctgtcaatctcaacatgcttggtcctgtcatgatgcacggggttctttgctatgcttatagctgcctgattatcacacatcatcagaattggagatgaactcgtttgtcccagttcactaagaaccctttttatccaaatcccttcacagattccctgtgcaagagctctatactcagcttctgcactacttctggctacaactgattgcttcttactcctccaggtaacaagatttccccagacaaaagaacaatatccggaagtggaccgcctgtcaatgatgtttcctgcccaatccgcatctgagtatacttcagtgtcacggttctctgtctttctgaagaataggcctttccctggtgtcatttttaaatatctaagaatcctgtagactgcttccatgtgttcctcagtggggctgtgcatgaattgacttacagcactcactgcaaagccaatatctggccgagtgtgtgagagataaatcaagcgcccgacaagccgctgatatctccccctgtctacctgtgtactttctttctcgataccaagtttcttctgactatccataggagtatcaattggtttgcatccaagcataccggtctccttaagaagatcgagtatgtattttctttgagagactacgattcctttccttgatctagccacttccataccaaggaaatatttcaaatttccaaggtctttaacttcaaactcttctgacaaatacttcttcaaattctgtaactcccccatatcatttccagatagaataatatcatcgacatagactatcaatatggccaatttcccggcatgagatttcttgacaaatagagtatgatcagcctgaccttgtttgtagcccagcttcaggactgcttttgtgaatctatcaaaccaggctcgaggagattgtttaaggccgtacaatgatttttggagtttgcaaacctgattctttgccatactttcttcgaaaccaggtggtatttccatgtagacttcctcttctaggtccccatttagaaacgcattttttatgtccagttgttgcaagcaccaatcttgattgacagccaatgagagaaggatcctgatagtgttcagttttgcaacaggagcaaaagtctcctgatagtctatcccataggattgtgtaaaccctctagctaccaaacgagccttgaatctttcgactgatccatctgctttgtattttatggtgaaaatccacttgcaccccacaggcctcttcccaaccggcaaatctgtgatagtccacgtcccattcttctcaagtgcatcaatctcatcttgtactgccttcttccattctgaaatttttaatgcctcttgtattgtgttgggaacctgagtatcatcaagagaagtagcaaatgctctgtaagatggtgataacccttcatacgtaacataattcccaattggatgatctgtacatctcctaacacccttcctcaatgcaattggcaaagtagaatcatcaatgctgggaattaacacctctccagccctatcctcacctatgttctcttcaggaagacttgaattggagtcaatatattggccacatgttgactgtgatccgtgctctaattcctgtcttttcctcctcctgatgtaaacttgtaagttctcattagcaagttgtggggctataggttgaataggcatgggagactggatggtcacgggagaaggaacatttgtgtgctgggctggctgaactgatggcggcatgggtgtggacaactcagtgggcgcgaattgggaaggatttggtgactctgagtgaaaagaaggtacaccatcaagaaaagactcccaaacttgatgttcattcatgctctccccctgaacatgagatttgggatagaagaagacatgttcaaagaaagagacgtccatggtggtgtaaaatcttttgttggttggagaatagcatttgtaccctttttgggttggagaataccctacaaaaatgcacttatttgctcgaggagcaaatttgctacgattttgaggatacacatgaacgaatgccgtacaaccaaatactttgagtggtaaatcagaagaggcggcatgggtgtgaggaaactgttttaagaaaagttgacgtggggattgaaaggtaagcactctgggtggcatacggttaatcaaataggtagctgtgagaatagcttccccccagaaatagtttggaacattagaggaaaacataaggcaccgggcaacctccaagagatgtctattcttgcgttcggccaccccattttgttgtggggtgtcaacgcaagaacttatgtggataatgccatgattttgaagataagtgctgagactactagtaaagtattcctttgcattatctgacttgaggacttgtattttggaattgaattgattttgaaccatacgattgaaggtttgaaaaatgtgcccgacctctgacttttctttcataaggaaaacccatgttacccgagtatgatcatcaacgaatgtcacaaaccatcgagtgccagaaatattttttatccgggagggaccccacacatcactatgtactagagagaaaacagtcgaaggtttgtatgggatttgaggatatactgttcgagtatgctttgcaaactgacaaatttcacagtgataagatgctggatttttattgataaataatctgggaaacaattttgcaaggtaaacaaagctaggatgaccaaggcgatagtgtaacattataatctcactatctttattgaccttagaatttgacacagaattgaaagactctgacatactctgagactgtacgcaacttgcttgagagacttggttggagaattggccacatgaaaggaggtagagcccggaacatagttcagcactgccaatcatcttccccgatttcaagtcctgaaaaacacacaagtttggatagaatttagtaacacattggagatcatgagccaatttgctaatggacaaaagattgcaatccaagtttggaacatggaggacagagtcaagatataagtctttagtaagttttatagaacctgtcccggcaatttttgactttgaaccatcagcaatatggacggatgaatgaccattacttggcttgtaattttgaagaatggcagcatctcctgtcatgtgatcagaagcacctgtgtctactatccacggcctcattcctcctcgattagcagtgaaggctacaccggtagtactgccactgccaacttggcttaataatttctgtagcatctccatctgctctttgttgaatggactcggctcgggaatagaggtgctctcagagttggcagccacgtgtgctctgccatctctgtcaaaccgtggctttggtttccaatcagcaggtttgccatgaagcttccagcaagtctccttataatggcccggtttcttacaataatcacaccaaggcctatcccgtttctgacgatctccaccactactattaaatgaccgagccgcaagggcagaggcatccaatgttggggcaggttgctcttttgatcccatcatcactttctttctactttcttcacgtctaacctctgaaaaagcctccctgagacttggcaggggtttaatgcccatgattcggcctctaacatcatccaattccctgtttagtcctaggaagaacttgaacagtctcttttgttccacaatttgcctgtatgttgctgcatcatccgaacatttccatgagtgagtctcaaataagtcaagttgctgccaataccttgtgagtgtgttgtaatactgagtaactgactgctctccttggcggaagtcatgtagagctgattcaacctgaaacagttctgaagtattttcagaacttgagtaagtttctttggctgcatcccatatgtcctttgcagtcccaaacagcaagaaattttcgcctatgtcattgttcatggaattgataagccatgacatgatcatgctgttttcaatcttccacttcctgaaacccggttctgtagtttctggcatgactgcttctccagtgaggtactcatcctttcctttaccgcaaatgaacagcaacacagattgtgaccactgtaaatagttatggccatttaatttgtgtcctgtgatgagaataggagaggaatcattgccaccaaggtttggaatttcagatctgccccctgattctggtgacgtgacgctggatacttgtgatgatgtcattccgtattttgtcatggaccggaaaggtagaagaacacttttcaaggcacgtgcagggactggagttgagaaaaaatagccgaaggacgccggaaaatctgatcagagggcccgcggaagcaaaagaaccccaaaagaggcacgtgcagggctcggattgcacaaacaggtaggaagggtggctggtcggcgtcaggcgagcctggaggaggaagcgcgtcgccggaaagtggctcacgcgccctcacgcgccggcgcgtgagatgcagtcgctggccggaaaaacgcgcgtgggcggcgcgtggatgggtttctggttccggtgctttgggacaaattggagatctcctccaggcgctccttgcggtgtagaaaaaaaccgtcgccggaagttcgccggaaagttcgccggaaaagttgccggcggtgagtgttttctgacgactattcgactgactggaaagtgttttctcccttggctctgagaacagggactgatggccggaatgagagagagagagagagatgatcggattgagatatggccagaaagatttggccggaatgagtgatggcctgaataagaggtggccagaaaggattagggtttcagaaaactggctctgataccatgaagaatttctgaactcctttattgatgatgaatcggtacacaccatacacatatatatacacaaatgactgaataagaaacaatcaatctagcttaattctctcctaaaattaggaaactaaatcataaagaaatatcctaaatgatctctccttttttattcctaaattaaagtcctaactttggcattatttcaacagtatgtaatctgggtcccaacaaggggaacacattagaatgaacactcactgtgtccatttggagtgttgctttattgaatgagaagattacttatttcaggataaattgtcggtgtaactcccataaaataaaagaaaggaagtcgttggtttgttggtcttactttggcaaccagtttgctaggttgcatgtatggcaattcaaatccatgaagttgattgaccatgattgtgacgttgtgtgagtccatggaccaaccaagctgatttataggttttacccatggaaaaagtgttgccaggatggtgtaattggagttctgttctgcaatgaattgaccaacatgagtacttcatgccattgagattataaaccctgaagtgtcccattgtaagattctaataaaaactacattgaggaaatccatggcaaaagcaaatggaagttgtaattcataacttggctatgttatctcatgttcacaagtagatgctgtgtttttttacttgtagcaattaggaacattttgttgctgtatcttgatgcagccggctcaacttcaatgtggacttgtcaccactcatgtgaagtaaaatataaatgttaattgtagttataccatgtttgttagaaatggttccataaagatatcgaagctctcggaaatcctatgaagattggattccttttttaattccattcccatgcttatgggagaaaagaaaaaatgaattcatatattagaatcttaaaatgctactgaaggacactttagactcctccattcctatttaaaatacattggacatgttcaatttcaggggagcttcaaacgccctgaaaggtttttttgcggataagtcatattgatcactttttattgcagagttttac

SEQ ID NO: 13052 - DNA, 4996 bp, Vitis vinifera
  Intron number 2 from transcript GSVIVT01020855001 (locus G SVIVG01020855001) derived from phytozome v7.0 (chr-ID chr1 2; pos 978374 to 983369 reverse strand)
gacttcagaggtggccctaccgcaaggtatgctaggaaagtcccctgcattctgttcttgtttgatctgtgttcggttgtaggggaagtaatatttttctctctgatctgtttcttagagtttatattattaatgttatctcaaatgattttgcagtgaattcttgttataagacatatacttgacctccatgaaatatttaaattaatgtattcactatatctagtagaatatgcagagactttaccttcaagtgtttgagatggaaaaagttagggtgaagtcaaaatttacaatgtgaaagaaagggctttggaacagcgatggtgttactacttggaagtggagaaaaagacatttgagttgcagattgaagacaggtgaggaaattggcttaccatcgtagagaatagctgaggagcattggtagcactgggtttggataatgaggaggttgttaggtttattgagcatctagaaaaaccttgtggtttggagagaaacatagctttcaacaacaaattcagatgatagtttaaaacccatcttttggaggttaatttcaactgcaatgggaggcatatcagtctaacggacttttgaggtcttcataaattagatgtttaactttttggttatcctggaagggcctagttgtagtggtaatcttaaagaggttctatcatcttttttgaatgacccaaagagaaaggtggttgggaacctgtggaattgcagaaccttcccctctgttcctatgcaaagatggtgggagaggaaggccagagagatagtgttgtatctttaatgggtacatgggctagatttgtattatctcaaaagaaggctctctcaagagattgggtttaagtggatacaacaatttcaaagctgtggggggttcaaggggtgtgttgcagtactccttttgctcctttaaagggggtgcaatttatggaaacattagaagaagctatttttctaggtaaaattgggaaggtggtgtcaagtgccggcaatctaattaagattggagagatggtcacatagggttaacgaggcttggtctgatttttttgagaaatggtttggttgaagtgcgaggtattccattccatttatggactaagagctggctgttgaatctgggatagaggtggtgaaagttctcaaaattaatcatactcttaaagatttaacaaaggtgagaattggagtggaggtgtttgaaaagctattctttctgacaacaatggagttctctgatggtggatgcagattcatgatatttgtttcaattgttgggtgtgtagaagattatggttgatgtttcgttgagtcaacttgccaagtttcaatagagggttgggatgcacatgatgagcatcaagagtttaaaacgaattgtgttgtgaggatgcagcctataaaagggatatatggcatgcaatgggcctccatggactgggaagtacccaattcaaaatttaaattagccaaatggggccatctaactaggtccatccaaacaaggtacaagctccagtgcttctgccctcatcagggcctaattctcctttaatagacccatatattaaggtatttgctaatattatgagctaggagggattctgttggcccacaaccatgataaacaattcaatgaaagatctcaacaaatattacgattcccatcattatgattcctgtcatgggataggtcttacaacagaaaggtttgtagtttgaagcatgtggtggaatcatcattgctattgtacatggaggagaccagaatcaatttatagtgaacgatcctagagaacaatatcgcagagcggttttgtccaaagcattctggatcaatagtggctcccaacctattgtgaacagcttagaatgaggtctcaatgacctggtgtccttggaagtaggtgactcaaccttctgtcatcctcatatagaagtgttggtgataatactcccctttgccatctgtgaggtgtgacctatcctcattgacccaagaagttatgttgatatctttttcaccactacctttatgaaaatagatttaaggcctggtgccattgatccatttaccaatttcgttgttggtttcaatggtgaggaagtctatgagcaggagaggtagttttgccaggtactgcagggcccatcaccacttctgtttacttcatgctattggatgtcctttctccatacatcattattttggggaggggatggatacatgaaatggaggtggtttttgtcaactcaccaccaacatttagtaattcctaatggcgcatatagctataagaatgcattgcatgattctagcaacaagaggtttacaccatctaggtaaaattggtcgatagcacctattcacctcctctctaggtgtgttctatcattgagattcacctttcatatgacatgctggtgaagagtgcaaggtagtatgaacatggagcacatctagctcaatccctcttgatgttaagaaggtagcgcatgaagctgaacccatagaagtgcacctttgccatataaaataacaagtttttggttacctgattatgtagcatggaactcaggtcaatccagatctgatccaaactgtgcaataagtgttgttgtcttgtagctgtaaaaatatccagagtttaaataggcggattgtaactttgaattacttcatctcaaggtatctgtttgtcgccttcccttctttaagctcctaaggtaggtggttctaggatgaacctcggaatgtgaggaagctcagtcccagctgaagaagtatattgaaacacctttgaaacacctttgatactaagactcccacaaaaaggataggacttctttaattggtcacatcagcatgaattgtaagtgccatcttaacttgagaagatggatcaattcatcaactcgtatgctacattagtaaaaatatgattgcctctgaagagaggtatctatcagtgtgctaaccacactggtttagaggcaggacctctatggaagattggttacttgggcagtagaattgagagaatacaatacttaattttgcctaacagcaaacattaagagttaggttttagtaggttttctaccagaaggtggtgatggtgagataaaagtacttgcatcttagcgattgaatggtggaatttgagaatggatggttcctttgattaaaagtgagctggggatggagttttcctaactagctcagatggattgttgtttgaacaaagggtgcagctgcgattcatgcattccaacagtgaagtgaaatgcaaaaacttgattgctggacttaagatggctatacggcagaatgatgagtaatagtttgtcaggaagtgctataagctcactttcgtgagagttgatgactattatagctttgacccaaacaccaaagaagagtttgacctgatactttatttctgacctagttgatcctgattcaatgttagaattgtattgattcttccccaatgattgaatatttttgtttgtaaatactgcatatttggatagccatgtacacactctgatttaacctagtgaactccaattagttgaaattgcacttgactgcatgaacctttttctactattctttttatcagaaactataatgggctgaattatgaattaatactctgttatgatcaaggaaagtaggaagttgtgagggagaagaataaggaaagaagaaaagggtaaaagaaaaaaaaaactaacgaaaaccaaaagaataggttttagttcaacatgttttttaatcttttcattcttaaattttattccccttttatatagggaatgcaaattttgaaattgattaagtttttaaatgatttttattcttagcaaatcaaacaagagaaaatttaagattcctttctatctttttcctaaggttttgtccaaggaccaaatggtaatcctatacaatgtaacatacaaccaaatagcccatctataaaatgtataaaacttggggaggcatgcattcacctagaaaaacctcttgcaatgaggcaccttgcttggccaacttatctatatagttggtgaaatgagtgatccactcagcagatggatcatgtattttacgcaaataaatgtcccacttccagggcatgtactcctgaaaagacacaagataccactatagccaagtcacctttcacaaggtgatggctaaaacccagagaaggagccagtgcctgaccttccagtaatgccattattctctatctagggttgcatgttaactcacaggttgttttatttttatttttatttttttggaatcttactcctatgttattgttgccattcttttgactatatagcatcatttatacatgcatatataaaatagtttgtatgtattctttggttattttaatgtggttgggtgacaatgagatgtatactattatgaggcagtttattttgtatagatttggagctatgggcatacatttcctttttgttcagttcgttgtaaatcctggaacgatgtcttatcgttcattctgcatcttgagtttcaatctaaggaattttctcgtttaccatgagaggtaccctagaattatttttatattaccttcctatctatttcttatggttttgaaatttagctaggttcaatctggaacaagtgttgaggaaattaaaagatatgctgctagagaaaaaaatgagtaatttgcttgactgttgaaggttcctgtgctagggagtgaggctttaacaagttctatgattatgtaaagaggcatgcatggtttcctttgggcatgtctgtgtcattttgtttggacatgcatacaatattttagtctggttgatgactgtattccagaatgatttttatattatctttgtatctatttcataaggttttgaaatgtgtctagtttcaatctggaacaagtgttgaagaaattaagaa

SEQ ID NO: 13053 - DNA, 2712 bp, Vitis vinifera
  Intron number 2 from transcript GSVIVT01026066001 (locus G SVIVG01026066001) derived from phytozome v7.0 (chr-ID chr1 8; pos 25042160 to 25044871 reverse strand)
gcaccattgttattgcttctcttctctacatcctggtttgtctaacttttcttgtattttgtctgacgcctcacctgacggtagttgcatcttgtactcaagtattaagtagtgggtacttactactttttttcccttttttatttcctatatataaataaataaatattatctctttaaaaaggtttttgaacggctatggttttgtggctccacccatgtctataaacaaaaatgaaacgtaaagtcgaatcaatgggacactggacagctgggcagtaacgactctattcttctatttatatatactagtttagtataggacaacactccacaactaattgcttcttagctcaaagccactgttccagcagataattaagttgatgaaatgatgatatctggattctttatttgaataggtattcactattttacaaaaggagcataaaaaatatttttgaaaattccctattgaaaaagagtaatattttgtgtattgaagtccatgtgacttggcctatccagtgtatgctttgtcattcggagcacttatgttattgatatggcaagaaagtgacaagcatcatcttgagtatagtttagaattggtaactaagttgggtagttaagacatattttagggaattaaagatcaattaaaaggcctgaaaatattttaggaggtaaaagggtatttaattatatcgatagctcatatcgatataagtaaacgactttgatccttttgtgacttgagagttctgtacatatgcccaatcctagaaatgtattttaacacatacttatgtataaaattttctagactttttttgaactcaaatgacagaatgtcgttttgctactcaattatttatgagattcccaaaagggaaaaaaaggggcagaataaaagtcctatttcctgatgaaatgttgttaaaagggcttgaaagtttgatagaattgtcttaagttgtggttttaggttaaggggagtagctaagaagtaatgctggacaaacttggaaattttaaatgacataaatttaactttctatgaaagttattatcagaagtacttgagtagaagcttttatgatcttggaatgaaattagaatagcgttttatggaagcacttcggaactttactttgatgatacaccatgtctagaccttatgatccttgtatttatttattagtaagtaaagttaaattgaaatctcaattgggaatgttatctagtaataggatatttagagtgtgtttaacaactattttaaaaaatatttttatcatttctagtatttgaaaatttttgtaattttagaaagtgtttctaccatttataatattttaagttttttttttttttaattttcaagtattagaaatggtagaaacactttctaccaccactatcaaacacattcagtgcgcttgatagtgattttaggaagtgtttttaattttttttatacttgaaaaataaaaaattttaaatattaaaaagactaaaaacactttctaaatttactgtcaaacgcgttcttactatatctatcaaataaaacttgccttgtattatttgtgcagttggaaaactaagcatgcacataatctatagatgtgtatattcttactagagcacattagaacacttgatatttagaataccatgcaatattctctatattatttagattttgtacatatatggttaatgacacgaaaatttgtaagggattctttagatgtaaagattattgacggttaattatattcttttaggttaatttcattgagaactctttcaggtttagtataaatatactatactattattggtttcaaatttcattggttaatacatctataaatatatttcatatataaattttattttaaaaaataaaatttagtttttaaagaatttttaaatatctgtatctctaatatttttatccaaaatattctaaaaaataaatcttataaacgagataaatttatacgggtgatgacagatgaaatttgaaataaatggtagttgagtgtatttactccaaatctcgacaggtctcatgtgatcttttttgtagagctttaacttcttagaattctaaacaagaaagaagtataccacggagaactcatatatagcatgagagagagcatgtatggaagtttggatagatgggaagcctagctattattgaatataccttagtcaacaaacctataccagccatatatatgcattgtgattacaagactgacagaaggaatttgggtcttttttgcaacaaaagtagcctaggaatttgccaactgctttcagaactgcactttgtaggttacttgtatgattatgatttttaattcccaatgtttattttcattgtaatttttgtgagtgatgaatgttggttatcagtgttactcttgcaacttatcattagcttcacaaaacaagattttcagtcaagttttcaataacatcattcaaaccattccagcaaccaactcaaccgtttttgtcacatagaaaatcattacatatgccaatcaacatactgggattgtgttttgattcatggaaatgaattattgtaattaagcttctgcaataatacatagtgagaataatccttgacttggactggtttgaattacagggactcggcctgttaactctatctgctgtacttcc

SEQ ID NO: 13054 - DNA, 1838 bp, Vitis vinifera
  Intron number 2 from transcript GSVIVT01015256001 (locus G SVIVG01015256001) derived from phytozome v7.0 (chr-ID chr1 1; pos 2148579 to 2150416 reverse strand)
cttcaaaagcatcgccacgatttgcaggtgcaggtttcttgctatcatttttttcaaactttcttatgccttgaaatggcatatcatatcattcccctgttatgtctcggtttatgaccggttggtaggttgtttcagttagcattgtgcattaaataattcatgatcgaaaattgatttcattatcggttaaaaaatgtttcatggcaaacacaatattggtaaaggaagtaaatggcaactatcataatttcacaagtataatttgaatgtcagattctgtagttttatacaaatgtaaagttttttagtgctaaataaatgagttataaacatggttatgtgactcactataaaaaagaaagtatacggggatgagaaagattttaatgaatgcatctgttgagagaattttgttgttgttcttgtttgttttatccagaaggaagtgaaacctaaatttgacataggaagataaagtaaaagaaattagtaataattttcaaagagatggaaagaaattggcgctccgatctagccagttcagtaatgaatagaaaatggcattttagtagtcgcatggtattgcagcctttgtcttcacccaaacagctttgctaaaggagaatatgggaacagaatattgcaacagtaggttacataataataaataaaatggaagtccaatccaaacctcaaggacaaacacaacccaatccaatccaagagattcacagttaatattgcaaaccctagtttcaagaaaggattgacatgtttggttagaaagaaattgtttctcgctgcaatgaatacagttgctttagaacttgtttttggttatatgttgtcattgctaagaatagtgttttcttttcaattcatctatttggtagttggaaaatttcttgtgtgatactgttttagaactcgtgggatgaatatatgttgtatacttgtatggctgtttttgaacttgttggtttggaaatatctgtttggtaacatgtgttgattatgaagttatttggtatgatgctcttgtttgtgaggtgagttagccaaatgtgatatgttagtcataggcagattaggacaagctaagcttggttttggttttcactagaacctttattcttacatcctttcttgtttttgtaccattttatacatttgacagtttcctagaacattctcttacatagagtcttctaagttatcacccttccacacacaaatatcagatgatgaaattggagtttggcatggcattatactctcattgaaattttgggccatcctttgtatcttttgaggaacctacctttatgctcaaagtcacgggatgaagggcttttcctaacataaaaactccttatacccagttcttttataaatcctatgatttatttacttttgtaaccattggtgataaaatatgcatttttaattaaattggttacttaagtaagaatggacctttgcagtagtttagtccaaaaccaacagagcaatagctaagagaaaatattttgaaattgtgtagttgcatctctaatggtagtaatatcaatgacacagccaatttacctatagaaagctggttagtgactattgactagaacatcatacatgatataaaggtgttctttatgccttctttttgcaagattaaagtcaactttgcatgttgggatatatcactgttcatgatactgtatcagtaagatggtaagtaatattgcagaatactcatgtcttctatggaagaaattttgtgattatcgcttctggtttcaatagggaacagtcgttcttgttttccaaccggctgagga

SEQ ID NO: 13055 - DNA, 11326 bp, Vitis vinifera
  Intron number 1 from transcript GSVIVT01036308001 (locus G SVIVG01036308001) derived from phytozome v7.0 (chr-ID chr1 8_random; pos 3657994 to 3669319)
aacctagtttaagaaacgcagaggttccagttccagtttaagacacatcaaggtccaaaccaggtttaaggcctaagaaaagttaaagaatcaaagaagacactacactcacaagcttaccagttcataaaagtcaatttgtttcataatttttcaaagaagttacactaatctcatttaaaacaaagagtcttccccaagtggatgcagaaagacctattttatagctgcaaagaagaccttttattgttttccaaatgtttccctaaacttcaagatacataaaagcatcacgaaaggcatccaaggaatacccattagtagaagagaataagacaaaaaacatgagcccaagagcttttccacattgctgggcatcatggtggtaggggaaaaatggttcaaagaagataaaaatcatgcttgaaaacatctttggaatgccttttttctgttgtcatttttttaatcaaactactataatcttgtttaatacacatataggcatacatgtactacagggatatgaaatttgtgtcactgtacaaaagtatttattaactgtataagggaaatatactaagtgtacaagcagtgtataagattaccatttataaaatatttcgatatattttgaaccactcctttattttccttgtcacccacaaattgcatactcatgtcatgcactttatttaactctcacatggaaattccgatactttcccatgtttggggaaaaaaaattaaccctaattcatccatcattttctcagttaaaccattagaaatatgatcaacacacctacgtggacacattatttaggaaagatatattgcactattgtacaatggtattacactaattgtacaagggaaatgtactaagtgtacaaggctaacttccacatggaaattccgatattttccttagtaataatgtttggggaaaaaaaatttaatcctaattcatccactattttgtcagccaaatcattataaataagattaatatacctatgtggacatacaacttaagagggatatattgcaccattgtacaatgatgttacactaattgtacaagggaaatgtactaagtgtacaagggtgtacaaggctaccatttgtgaaagattttagtcgattttgaatcatttctttattttctttatcacctacaaattgtatatgaaatttgcactattgtatgaagatgttacactaactataaaagggtatcacactcatagtacaaggcaaatgtattaactgtatgaggcaaatgaactaattatacaattgtgtataaggctaccctttatgcaagatttcaatcaattctgaacttttttttttcttgtcacctaaggattgaacacttttcccccacacattccttcacctaaaaattgttttaattttaaattttaaatttcatcatccaaaatttgtaattgcatatttcatttaagtagttttaacaatattttttattactacatttacatcctatataaaggaaaattaaccataatatttaggtattacatttttttgtgaaatcaaattaatataaatggataacacattagtatcattgtttcaaatgacttaagacaatataaataacatataataattgttgaggaaaaattatgaatattttttaccaaactatgtcatttagatcttccctaccaaaattaaaacataggaaataaaattaaaattaattacatttaaagtgtttattacaagtaaaccgaatgaaatatatatttttactattttacctttataaacataatgccaacagagattaaaaaaatcatatttaaatagaattaaaaaggataaaaaattatctttgtaacatttgtaatttttttataaaaatcattaatttaaattatcaagttaatttaaaatatatatttttgttgtaattatagttttgaagattctacgatttttatattattacttttaatttattttctttgattttttattttaaatttcatctaagcttgttttttcttgcatttacatgttttctattatatccctatttaaggtgatttttatctaatttgtgttctattatattctcttttcgattttaatgtgttgttatacctctttacataacaaaagattttgttgtttttcatctacaaaactttatacaaaagatatcatgtacgaggaaaaaaaaagagaaaattatgatataattacatacacatctcttaatatgatacatttgcttgacttaatgacatcgtgctttaataatttaaaccatgtcaagtccacatctattttagatttaaaagggtatttgaatatttttcaaattattaagttataatacattattcaattaaaaattaattattaccattagttaaaagatgatcatgttagaaaataatatattaagacaatatcaatgtattgtccataaaatagagaaaatattcaaataattgtctatagccttaaagatatttatatatatattggataaaaaagaacaataatattttttaaggtgtttaaaaaatatttattatatattttgtaagttttttttttaaaatattttatgagatgtttaaaaaatatttactttaaaaatgtagtaacaatcatttttaaccattgatttccaatattcaatttattagacatggtttttgggagaaaaataattgatggaaatagtaacacctccctagtaaggaattaatttacatgtcctacaattaatatgtgagagagaaacataaggtgaatgatgagagagagggaaaaagagaatgagagagagtgggaagttagttgttttctttttctttttgatagccacgggcatttcaaaaaattttgaaaagtaatgtccttcaactcaattttcactcattcactaggttttgggcttaaatacaagggatatgaggatctttgaccaattttcaagcccaagtgggtgtaaaactcaattctcccttcttatttcatgccccgaatccaaccttccaaaaccggtgtggtccctttccatgagtgtcttctgcaccttcccgttgactccacctgcatgggaaaaaccactcactagcccggagacagccagcaagcatccgcgtggtgctaagtcaccttcccaagaatattctccatccttaaggacgtcttccaactccactttccctaggttttctcatgccaaataaaaaataaaaatcaaaaaatcaaaaaagaaagtaaaaatccattaagtcgaaaccattcccgtcattcaaagtcaacattcctttcactaaaatttcaagaagtcattaaatcccaaataagaaaatatcaatacatagatgaaaggtataatacataaataaataaataaatattagacatatttaatataaaaaaaaaaataaactaatgcaacatataataataattgaagtgtcaaactcaaaccacctaaaaaaaaaaattcatttcatgcaatcataaaataaaataaataaacaaaatacaaataataataataatgaaataatataaaataaattaaaactcacttaatcataaaatcaatcaataaaataaataaataaagaaaaacaagaaaacaaatttaagtgtatctaaatgggcctaaggtgcctatgcgggcctaaggtgcctatgcgagcctatggtccctaagtgggtctaagtctaaattagggctgctaagagtcgcaattaatgggatcacatgaattcctcaaccaaagtcttcaaggtgggttagaaaaaataagctatatgaacagtaatgggccactagggaattgttgtaaagtaccaagcgaacacgtaataggacaaaatggagggtctacaattttattgagtttaaactattttttattttcttttcttatatttttcctctctattttctttccctcacattttctctcaaatttcccgagaagcaaacatagcctaaaggttccgacaatttataaaattcaagtaaatcctagtcattaaatgatagtatttaaataatattatgagtgattgtgtaatatatccttcatatagagatgtgtttgttaaaatgagatggtagttaaatagtggagttagaatgtaaatgaaaaagaaatcatttattttatgaaaaatatgagtagaaaaggggaaaaggtgtagtgaagaaagctttatacatccttaagtttcctcttcttttttttttttttccaacttgatttgcaactacccatggctaactatttttaggctttatgactggcatttaaccatgggtgatttaaaactacctagaacaaaactaaatagaaccccaaagcctagttggatacgtttattaaatttgttcttaaaaaacaatttttaaaaatagttttctaatgttttattgaataaaagtctattaatttgagaacttaaaatgttattaacttattttgtatatttaaaaaaaaattatttgtagtgttttattttcaattgtttttcatatttatacaattatttcttaaaacaactttgggaaaaaaaaaagtgaaaacgacataaacaattaaaatatgtttggaaacttgaagattcaagggtcaagtttatccaagcccatgcccaagacaagtcaagatccaaagttcaaactcaaaccatgccaattgatcaaattttaggcatcaacgagtcaagacctaagtccacaccccggcttcaaccaagccaaaatctaagtctatgtaatagctaagacacaccaagatccaagcccaacccaagatatggcaagatccaagctcaactcaagatatgtcaagatccaagcccaacccaaaacatgttaatctccaagttcaggtgatcaaggaatgacaaggtccaagcctagcttaagaaatgcagaggtttaagctctaccttaagacacatcaaggtccaaaccgaggtaatggcttatggaaagttaaaaaattagagaagagactacactcacaagcttagaagttcataaaagtcaatttcttccataatttttttgttttttctgtttctttaaaagttacactaatcttacttaaaacatgaagaaaatgcagagaaggccttctattgttttccaaatgtttccaaacttcaagatgcatgaatgcatcacggaaggcatcctaggatccaacagtagaaaagaataagacaaaaacatgagcccaagagcttttccacattgctgggtgtgagtgtttagctaggttggcaattccagacaaaattcctaagtgtccctaaacttggtttaccaatccctcttcaggctacatgattttgaagactaagactttgctaagaggccgaggtatgtagttgagtgtgtgatgattaaatgtgaatcaaccctgtttttaatctttaaatgtgttagaaagctaggagaaatgatttttggtgccaaggctttcattcccctgtttctagatcgatccaggtgtaggggcaaatcgatccaactaacttggtttttagatcaaatctcaaccattagattaagggcttctttttacactttaaaaaacaatcttctctcattttctaggtagagacggcagaaaacgtggagagaattgtagccactctatgtgttcttcattttctcatatattttcctaatttgggggtttttattgcaaagaaaatcaacttctcttaatgttttccaaactagtttttaatggattttcttgagcaataaatgggttgattcattccttcattcatatctcaatctctcattctatttgggtttgtgcaaaaacccattttcttattgtgtggattcaagaagaggccaagattgagcttggtgcggactctaagtgtgctccgaaagatgaaggtgagaaactgaaagtgaaggtactagttaagtggtccaggaaggattggttggcttgagctaagtaaaaccttgtactcagtttttattcttcatagtggagtttttcaatcaatagtaggcctatggtttttgatcactttgaaggtttcccacgttaaaatctagtgttaattgtctctttctctcactctacacttcaatttaatttctgtttttgatatcgttgattacttgggcatacatgttgaatggaagaaatatgaggtgatataagtgtgatgatccatggaatatccttagtaatttttctgctcattttggttaatcatatcatgaagtaaattgatatgagttgaggagataattatttttttgatttatttttggggattgttgaagaatttgcatgtgtattgctttataaattattgagagagtgttggtgcatacattcttgcgtgtggatgttgtgctttgttgaaaagttgttgaaagaaaagtttcttgacatggagaaagtctaaggttaggtaatctttgttgggagaatttttaaattgttctacaacacctattcaccctcctctaggtgtagtccattattgagattcacattttcactgggcatcatggtggtaggggaaaaatggttcaaagaagattgaaatcatgcttgaaaacatctttggaataccttttttctgttttcatttttgggaaaccatgttaagaaaatagaaaaagtgaaaaatacccaatgagtatcttcaattgtttcatgatttttcaaagaagttacactagtcttatttaaaacatgaagaaaatgaatgcaaagagtcttccccaagtggatggagaagacctattttatagctgcaaagaagaccttttattgttttccaaatgtttccctaaacttcaagatacatgcaaagagtatcttcaattgtttttttaaattttgaaaatatataatattggaacaaaaatcacatgaaaggcttagtgcaacccgtaatctaatgggaagatgaatatcacaaatataaaaatatgaatataaaaaaatataatatcaaatctatgtgaaataaaatattatcttaaaataaatttataaatattttttatttattaaactaggaattatcatgaatggatatatttttgtataaaacttaagagtttgttttgtagtgtgattttaaaaaatgtttttacttttcaaaatagaaaaaaccatttttaaaaattatataccattattcggttgttctttattttcaatttttaaaaataaagtgaaataaataactattttataaaaaaataagtagaaagtgctttcaccattttttaagaagaaaaggaaaacatggataaattaaaaaaaaacacaatatctattttcttctctttccacaatctactattgatattaataaaaaaaaaatctttaaatatgatcgtttttgaattacacatgtttttttctaaatttcccttatcatcccaaaaaacaatttaattatcattagaaagtcatgaaaccaaataaagttatgaagtcatagaccaaaattcattttaagtgacttgactagttattttctttgcatataatcatatttttgcaattttatcaataggcaaataaatcgtaaatcaaacaagacttaatgtatttgcaattttgtcaatagacaaataaatcataaatcaaacaagatttaatgcattgaatttattaatgaatctagtaatttttaaaaatgacttgaaacttaaatagtgatatcccaaaaatttataaaccaaaattggtttaaaatgattgtattgattctcttctatatagaaccatatatatatatatatatatatatatatatatatatatataatttttttttcactacacaaataaattgtaaactaagtaagacttaatgctttggattcaattataagtttagtaatttttaaaaataatttgaaatttaattatgatccaattaataccagaaatttatagataaaattttagtccacaataaatttattatttcttttcattaattatataaattttctcactagagaaataaacttcaaatcatgtcacattttgtattaaattaattaatgagtttaatatgttttagaaataatttcgaacttacaaaattgatctaatatattatatattaaatcaaagtatttcataattgagtactaaatatatgaatgtaatgaaaaacttgactcatttacttgttaaaaaaagttaaatcttatttatttttaaataaaacatataataattataaattataaattattattattcatttttaacaaactctaaggatatgttaaatttcactcaaagaattactatgatcatagttttcctgattatatgtccttaggatctcttgagaaactactagccaaattgaagcaataaggccatgtttggtatgaagccaaagcaattaggcaatgtttggcatgaagccaaatcacggccaacttaaagcaattaggctgcacaagtttaaatattacttcacatagcatttaatggctgaggcaacatgccctctcttttcttcagcattcctagcatagctttctttccttcccaaggccgcacatgttttttttttttttttttttctcacttaaacttggagaaccttcctttcttctcacatacgtagtgcactttatttatttttttctttaattggtgcacttctatttaattctcaaggtggcttacctttctttacttaatgatatacttactaaaacttgactgcttcctatcttcttttcttcttgttaaacttggtgcacccttggattgtgggaccatgataaaataaagacttcgtgattttttttatgacattgttgtgtcaggatagagaaagttgtgataaaataaaatctcattttatttatttatttattattattattattgttattatctttgttattaattcaatattgtataaaaaacctaaaaataaattcataaagtttattaattttagttaaaatgatggccattgtgcaaaaatgaatcccactagctagacaatgatcccatcacaaactcaccatctaggtaaacacctcaaaattcaaaaaataataaataaataataaaatcaagcacttcatatattattcgttaaaaagtaactactgagtgtaggaaagggtgttttgcaattagaaacatgatataaatttgaatggatttttacatatgtcaataggtataattgatgaaattggatattgtttttgttttttctttttttgcaaatatagattgatattattatgatttttttttttcaaaactgagaaattattactttatatttataatttatatactaaaattgttaggagttgaattttcaactactaggagaatgatttgattcaaggcatgcatacctaataataatgacttgtttggattttttgagggaatttaaccaaagagactatccaagaccagtatttttctagtcatcaatctcttctaaccacaactgtttcatacgatgggacccacattaaaccaaggttcacatgcttaattttcaacaacatacaaccactgacccactgaatgacagtgccgcccatgaatgacatcaccatgtatgtcccacgaccttcaattcttagcgaccatttccacaaactcaaatgctttctcagattcttggtccataaagattgccctgaaatgtacttaaattgtaagcagcctcataatcagtctctatgtttcaaagctatgatggggacacttaaccaataagtccttaaaactgtcccaccatgtctttctccttatgggagaaattagatactcgtcttttcatgaaagtaatttctcgcaagagttaatgctgcttgtcctcaagctatatacccattctccaagttaacattaggctctcggaaagtggagaaaacctcctcaagttcaatcaaatggtcataaaccaaataaattatgacaacaaaatgaatcgttttaagacctcatgtttactggctgggcattgtaagggaagacaatatacgaaggggaattcacccttggtgattgaaaaaatagtctctaagtgtcatctcatcgcactcccttgaatgctcctctatttttaagatagaggaacatcttaattgttgccctccatatcaagttttgtggttataagctaagacatgttttgtgtgatgtctcaaataaaaaagaaacactatatttacgtgaaatcattttaactttgtaaataaattttaaagttatgaaaatctttgagatctagaatggataatatttaccacttaaagattattagttattttaaaaaataaaatcactaatcatgttatttagagaatattcgatctatggaatcaaataatatatttgattcaattttcattcttgtaagttcacatattctcacattttcttaataacattttttttcaatgtaaagaaattgcagaaagttttttcgcttggaactactacacatattgctctcatggtaacaatttagggttatttaaacgtcattttcatttattaaacagaatcaagagtttctttagaataatctacaaaattaattggaattgataaatggggttttaacttttaagaattagacaaaattttgtagaaaagttatccaaattttaaaagatttgtatgtggaaaagtttgacttgatatgtctcttcctacacgtgaattacattggcaaggaagatgagaagttcaatcacgccagtgttttctctgttaaatacccattttctcatatcggcacttttttcttttgtcaatatgacgttcatagtgctagatattgattaatgaccatgactgttactcaccatgtggcccaaactgatccaaattgcttttcaacaatatacaaccaccgcatgactttttgcatggtagagaaactttttaaaatttgttttatcaaggataattctaccataaattaggatttcatgtccaactcatttactttctttctttttttttttttttttgaaaagataaaaattttcaatgaattcattttgagaagacaattacaaaaaataaatttgttttattaaaaaataagtttaatataaaaactaaattggtctttcgaatagacgatttaatttaaaaataatataatagacataaatatggtattattatatttatttttcaaataactattttttaataatattttttgaaaataataaagaaaattcctctaatgacactgaaagttccgcccaataaatact

SEQ ID NO: 13056 - DNA, 9791 bp, Vitis vinifera
  Intron number 1 from transcript GSVIVT01013575001 (locus G SVIVG01013575001) derived from phytozome v7.0 (chr-ID chr5 ; pos 21098683 to 21108473)
gcaacattaaaaaaaaacattaaacataaagtcttcccaacatattcatacatataaccacattaagattaaaaaagagcattaaaataaaaagtgtatcttgggtcccaaaatatatctccaataccaacttcacttcaagaaaagaacctatagcaagagtgattcatcatcttcatccatgattgtgagtttgccccctcggttaacaagcaaagaatcacccaataaaagtaagaataacaagaaacaactttattaaaaaattcaacatagttgtttcataagattgaaaatattttagattaactaccttccatttcatttcccaaccaactttgagcacacattaaggcctccaaagtatttggatggagtctactacgatgttttgataccatcctaccacccgtactgaaggctgactcagatgcaactgtagatactagaatggcatagatatctcgaacaatcatttgtaaagtcggatacttaataccatttgttttccaccaattcaaaacatcaaaatctgaaatccttggcaaaacagtttcttctaagtagtagtctaactccgacttcgcatgaccttcttcactggtactatgaacaaataagtcaaacttcgaaagaggatcttgttcgtcataggtcaactcaaagagatttgaaactgatgaagcaccatgagatgaagtttgttgacccatcttagactttgattggtactcagaaagcaaatcataacatagttgacgaatttttccaatctcacttgaagcttcagacccatacattatcggaaaataaaattctaaaatcttcatcttgtatcttgggtccaatacaactgctattgccattacaatatgacatccactccaatacttgtcaaatttttctaacatacttgatgccattgtgcttacaacttcatttgagcaaatcaaccaatcatacaatgcttctttaatctcacacactttgatgaaaaaggtattcgcagtgggataatttcgccctgagaacaactttgttatattataaaacaatttcagcctttcacatatttctcttgctaaattccattcttcctctgatggcactgtggtgtagagcttttcacgttgcttcaaacgcgggaacacatctttataagttatagctattgataacatcaagtatgtagaattccatcgtgttttacaatcaaggcatagcttcttgttgcatggaaggcgcaattggcgagctgcatcttcaaacttttccactcttgatggtgttgctgaccaatatgcaacactctcacgaattttttcaatttctactctaatgacatctagaccttctttcacaatcaagttcaagacatgtgctgcacatcgcatatgaaagatttttccatttaataaaagtgacccacttgaagataatttctctgagaggatattaatcatgccatcattacttgagcaattatccacggtgattgtagatagtttcctatccatattccaatccaataaaaaatccaataacacatcagaaagaacttcttttgtatgtggaggaggcacataaacaaacctacattaaacgatatataaaaacatattattaatataagtgacatcattaaatgataataaaataaaataaaaattgaaaacttgaacaaataacatatctaaccttacaatatgatgatgtagtaaccaagactcatcaatgtaatgcacagtgatagccatgtaacctttcttctgattagatgtccacatatcagttgtgatagccattctagtttcaagcttttccaagtagctactcattttccctttctcaaactcataaatcttcattatgtcatccttaattgtattgcgggaaaccatcttaaacaaaggttgaaggctactagcaaaatctctaaagcctgcatggtcaacaattgaaagagggtactcatgcaatataattgcacgtgcaagcttctctcttgagatatcttgatcaaatgtgaaaccaccaatttgcacttttccatagccttttctctctattgctaaaaattgttgcttaatatcaacatttctccatttgatgcacctatctaaatgtacatgcaaatgtttagtcccattcttactatcggccttgagttttgatttacaatgcttacaaatagcataatcttgtccatctattatgactttctcaaactcattccaaacaattgaagtcagctttctttttttacatgtcaatgatccatcagtagttgaagtactacctgtagctggattggaaccagtacttggcatgaaaaaattttcctccccttctgatgtcattttgttgaatccttaggatattctgaaatagtttgaaaccaatttaaccacaataaaattctatttgtatgtttctggaagcatgaataatatgtttcaggaagttgtttagaaaaaaaaatttagggttttcatctatgaaattagatcattctcttataacaacttgtttatgcaaaaacatgaataccaaaattgaaccctaaaataatgaaattataacaacttgtttctgcaaaaacgtgaataccaaaattgaaccctaaaataatgaaaaacccataaatcatcattcttatttgtataaaccccaaaaatcagtttatatgtggatgaaattgatttagacagggtgaaaaataatgtcagaaacatgaacaataagagccaaagacgaaagttgattcaactgaaaaatacatttaagacgaagaccaagagtgcatataaattacaaatctactgataaacaattgaaaaaacctcaaactcataaactaaaaccaaaaaaaaattgaaaaacaaagccaaatttttaacaaagcttcaaaagttaaggttttcttacctggaaggaaggaatccacaagaactccaataatcacttgtttacgagattgaaaatctggtttttagagcaaagattttgattttagggccgcttgaactgagaagacgaaacctttcttccgagagagaaaaaccctaaacccataaactaaaaccaaaaaaattcgaaaaacaagccaaatttttaacaaagcttcaaaaaattagggttttcttacctggaatgaaggaatccacaagaactccaataatcacttgtttacgagattgcaaatctggtttttagagtatagattttgctttcaaggccgttcgaactgagaagacgaagtctgtcttcctagagagaaaaaccctaaaaatttaggaagaataacttatatatacagaggagattttgggtattttataatatttaagggtaaattggtaattctaattccggggcggggcgggtaactacaaacccatacccgccccgaacccgattcgggtttcacaaagctttcctatacccgtcccatacccgattaatttatcccatacccgtcccaataggggcggggcggggcgggtgacccgattgacccgcgaaattgccattcctaaccctacaccctaactccacagccagctcatccacctcttccacctcccctattggaatgatctcacttttagccaaattgattcttaaccctgaagcggcttcaaaccagaacaaaatccaacttaaattcgttaagtactcctttttagcctcacaaaaaacgattgtgtcatcggcaaagagcaaatgagcaatgtggacagcccgccctctaccacaccgaattttacaccctgaaataaaaccccctttccatagcccttctgattagaacgctcaacacttccatccccatgacaaaaagatatgaggacagggggtccccttgacgcaactcctttgagctagagaagaaacaagctggggctccgttcaccatgactgaaaatttagctatggagatacaccaccacatccacctcagccactttgagccaaaccccattttttccataaccttcaaaatgaactgccaattaatactatcataggtcttctcaatatctagcttacaaattaacccatttcccccccttttattccacgcgtcaatcactttgtttgctattagagaggcgtctagaatctgtcttcccatgacaaacacgttctgatcaggggagaccacttttcctatcactttcttaagcctattggccaacaccttagctaacaacttataaagcccccccaaaaggttgatgggtctaaagtcccctagtttctcagctcctcatttctttggtaacaacaccagaaaggtattgttgagactcttgaggaaaatattctggtcataaaactccttgaacatctccaaaatttcctcatttacaaagtcccaacaactttgccagaagaacaaagtgaaaccatcaggacttagggctttatccccgttcatatccaccaaagccgcctggacctcatcctcagtgaaggagagctccaacatctccgcttcttgcaaacaaatttgattaaaatgaaggcttccaatgtccgccctctaccccgaactttctaaaaactgctgttgaaagacattcactaccccttccttaatttcatgctcctctgtcagccttaccccatttatcttaattctgtccatgtagttggctcttttatgaacagaggccatacgatggaaatatcccgtgtttctatcccctgcctttaaccataattcccttgacgcctgtctccaatgcgtttcttccagatctacccatttggcatatccctcattggcttccttcttacaagctaattcctccactgtcaaacttctctcaccttccatcctattctaatactccacttgttagagtgctgcctccttgttacattctagattcccgaacacctccctattccaaactttaagcttctttttcagctccttcagctttgcagacaatctaaagctggcgctaccattgacctctatcccccgccaccaattacggattaaatctttgaacccctcaactttgaaccacatgttttcgaatctgaaaggggcaagccctctcctaaagctacccccctcaagtaacactaggaaatgatctgaagtcgatgtaggcaacctttgctggctcaccctactaaactgatcaagccagcagggagttaacaaaaatctatctagcctagcccttgattgactattcacacccctgctccacgtgaaagctcccctttgcagctgtaagtccatgaggcctagctcatctactacttctgcaaacctcctcattgctgaggttattctcccttgcttgctcctttcactttgagagagggtgatgttgaagacacccccaaggcaccaaggctcctcccaaattcctctgatcgccccaacttcttcccacaaacactccctctcaactctagtaaacgggccataaacacttgtgattacccaaatcaccccattatccactattctgaatctacaggatagtgaaaactgcctctcctcccactccaacaaatccagaactcttttatcccaacaaatcagaatacctccagccgaactacacgcatctagggccttccaatctaagaatcttccagaccctaaactactcaccaccctgtcagacataacctgaacttttgtctcctgaatgcagaatagatccactttctacttcctgattaccgatttgattactttccttttcatgctttcgttcgctccccttacattccagctcaacaacttgagattcattggacaaccactaactgcacccctttgccctgaagaggacatttccttctaccatccccctcatagttgactaagcattccaatctctttaactccctttcaaatctcgatttttccaatagtcctttgctgtggatcttttcccttattttcctaattttgaccaagaaacttaatatgtcattttccagtccttcagttgaaaatcctaggaattggctgaaccttgctaggctactttcttgccaatccaaggccccttccccccttccttcttggaactcatactgggatgaccccccctccaaatcccttgccactgagatggggccattaaactcaaccaactcccaacagacattgccattctcactaggcccagctgcatcttgacgatttgacacactgccattttggcacacctcccttaacaccccagaatgatcaaagaactccctctctagagtccgaccaaacgaaaacaaagaagaatgagaaggagtccccgagtcccataaaccccctaagattgaaagagacccatacctcgagacttcttccactagggcactgtctatcaacaagtagtggaggtctgccttttgaactctctgagcttccttttcccacgcacttagaaactccagctcaaagttggcttctccacaaagcccaggttgagctaagaaccctatcgggcctttattaaactgagcctccactgggccttttctcttcttgactgaaggcccaccaggctgcaccccgatatccttaaagcggctcaataacggcccgctgctctttctttggaccatattaggcccaaatcgcggcccaaactcctcctctaagaccttctcctttcctttaaagcctttcgtcccacccgcaggccttaccccaccaactccagcctctttagaaattactccttcagataagaattgcggactaggccccccagccctcctcaagcccagattgatctcaatgagcccatccaagggtgacccatcttttgtcccacccactaagggtcggatcattgacccgaattggatccgacccacagacgaaaccctacccgtcccgtccatctgcccttccatcttgtcagttgtccgtgacagcgcctcgatccctacgctaccccactcttccactcgtcagccagcgcatgcgcctccattgcccttgacctctcctctaccacgatctattgagccccggtaaccctccggcttctgtctaatcaacggcaacacctcccaccaaagaggaagattataaaaattccattcgattccaatttctaacgagcttggcagctcacctctcttcgttttcaccaagatcctagcccaccagaggttttccgtttttttcgtcgaatgatccatggctacaaagccaccgcactcatcccccacccttcgcagaatggtcggaacctagagcgataatggcaagcccttaaccctcacccaaacttcttctcttacttccccttcttccaaacacccgaaacttggactccaaagctccaatttgacctgaatcccaaccaccaacctcttcccggcggcgaaaactttcctggcttctaccgcaagttcgaaatctaaaagggcctgaccctcttccagctaggccaaacctagcttccctttcagcccccaaacactcgccatcagccaccctaacctctccaaatcctctcctcttgctaccctagggtgccattttcccaccaaataatgccccaatctattcacatttctgctaatttcctctccctctactttcattatgaccaagagactatccctattcccccatttctttcccatttcagcttgcattctttcagggatcgattcttcctttttttcctcctttctgtcaatcctcgcgatcagatcccgtaccacctccgccatagctgaccatccctcccttccccttctgcctctcgggatacaaacgctgtattttttctcctccgcatttacaacctctaaccggataaaactccccgccttattgacttcgcgcaccatggagtaacttctccctttttccttccaacccttctcccatttgtcgtctttcacatccttaacgcactagtccaacccttctagaaaaatcccaaagcttgccggccccaatctaacccatgaagaaacccctcttttgctttccacaattaagagtagggttttacctcttctcttctccacctctacttcaaagaccttcgattccaccccgaaactctttcctagccgtttcatctgtttctccatttggttttctccctcgttgccatcgccctcaccctcgctctcgcactctctcgctctctctcttaacagcatctttttagaaactcccactattgaaagtgctatacacaacaactccacatcagcaaagtgagataaaagatctcatccaggaaaaactcccacaagatacactagtgttgttaatattcattattagtaaaacaaaacaagtttgcataaatttgattaagaataaaagaacactctacttattgaataatataaatttaagtaaaaagattgtttaccatgtgcatttttctttctttgtttgatagtcttgttcatcacataaaggccttaaggaactcctccaaaagattatcctacttggaaaacctattataacctcttcatattgtgtagacgggtacctaggagcatacagagggtaatagagttgaatctcctgcctttgagggtttaaaaagttagcttatatttatcttcctcaccattgaaatcattatggtgtgactttagttctgttaatggtcttgtaatgtatgggagtttttcttatcatcaactgatgtgagtgtgtgaataagagtagccattaacttaagccatgactcatgttccaaacttaaggcattgtggctatgtttggttgactagataggacatacataagaagattatatcagtgagatatggtatccttgcaataaataatatcctaggatattatatctgatggaatatatcatatcatgcttatgcttgtttcatagaataaaatattctaatatacatataattaatcaactaaattattgcaatataaaaatccatagtttaataaataagcaaaagacttatattacatttctaagatgataattgttttccaatatatatgagataatgtttatttatattaatattttattttatgtttacaatatttatattctttttatattgtagatcacacaaggtattttgtacaattttattctcttcttcatattcaatttttttagaaaacagtttccacttttctcaaggaaattttgaaaacaccaaactagtgtttttatttttattttttcccatgttttgaagttaattttcaagaaattgaaaatagaaaaacactgaccggatatgtttttagacttgatttctactttctttgaaaatgaaacagaaggaaatcaaaatacataggatctaagtttttgattttcctcttatttattattatcttttaaaacataaacatatttgttagcatgtataggcataaatggaggttgatgtatatcagtagtggtaatttcagaattaaaaacatgaataataacattgtaggtcattggaataattaacaagttcatttctatttttctttctttctctgttgaaagttaaatcggagaaactcaggttttgtctacacatttttttgagtagtgaattattgtttttgtttttctttcaattttttttattttttttatttttttaataggcaaagggaaaagagatgggagtagcataaattataatagcaagtcgtgagaaggctgccatataaacatttaatatgatcactttcaaaatcagttgaatagggtaatagctattcgcaaactttggcagacattggtacgctaccagttggcagtggtggtgat

SEQ ID NO: 13057 - DNA, 2621 bp, Vitis vinifera
  Intron number 1 from transcript GSVIVT01023326001 (locus G SVIVG01023326001) derived from phytozome v7.0 (chr-ID chr1 2; pos 19710054 to 19712674)
cctcccagggcttttctaatcgtacacctcccaaggtttctctttctctctctagttttttttcttcatttcttcaacctcatattgccataccgtattaggatgatctcatttttttttaaaaattttaatttgtttttattttaatattttatttttttaaatatattgatgtgaaatttcattatttttgggagtttcaatctctgtagctactgtccgaatcgtttctagggtttcttttttctggatgttttgtagtgttattgatttatgacgtgatgtttggatgtttttgacggtttgttcacttttttagggttctattgttcttcatttttccagcattgccattggaaatccaggggttgttcatgaagtgttagtgaaatggagtgcatgtgttttggggggttggggttgttttcttgcgctctgtttggttggtgagaaatggtgggagaaggacggagaataaaatgactttcaatctaataaatgagaaatgggatttgtgtactttggggtattaggagtgattttcttgtgttcggtatggttgctggggacttgtggggaatgcatacaaaatatagtatttttcaattaaataatgggaaatgaatgtgtatattttgggggattggagtgatttgcttgtgctctgtttggttgccgtgcaagtgtgagaaaagaatacaaaataactgatttttcaatttaattaacaggaaatggaatatatgtatttgggaaattggagtcggttgcttgtgcttttctgagaaagcgtgggaaaataataaaaaatatttttgttcttgaaggagagtttcataaactgtttgtcaaaaacttctgcaaaatgcctgtttattgtgaaccttttttctctatgttgaaattcagtcctcctaggagcccaagtttaatcagttatgagttattgcaaaattggttggttgcaggggactattgttattcagtaaattagtatctttcttccaatttcttttttgaatgcagttgtttgtcttatgctttgatggagttaaactctgcttcttaggattcttgcattcttcaaagttcattcttatatggattaatgactttcttggaaaataaatcagaatacaagaagtcaaaatcggatgctagattactcaaaattcatgaaacacgaggtttggctttcctatgatactgatcaagtgttcagtttatgatgggaggagttgatgtctctggagttggttaaagatactacatgagtccaacatcatgctttggggtagaaagtgagatatatcattctaattgctcctagttggctatgcttcctgaatcctcaagtgtttaatcgtctacctgataaaagtgattgtctctactattaagttcaaaatttgtgatgattaattgatgctgatgtgctgttaccttggattaaacttttattggactgttgtgacttcttaatgctcaatctgttctgaatcttgtgatatttccttgcctctcttgcggttttccatttgacatttgctgtttgtcaggtgcattttatcttattttatagcttgacacattgagtaagcttgtttgggtctttgcattcttcatacttctcttcaagattattagtatgtttgcttgttccaccaatgccattccattaacacagccatttggtctaatgttaatcataagagaagtttgaaaagcgaattatcatttttagatttagggcttgaattgtgttgataccaaataaatatctgaacaatcctgtaactaaatttgagttatctcaataacatcaatgctggcacatagatacagagacataggtctttgtatgtttactctagctttgcagaaagatgtggggaaaaaagtgagattgcgatggagagggacattatcaggtctggtttgtcttgttaatgtgaaacactccagcttctggtgtgaaggtgagagatgaagcttcaaagataaagtgtaacaggcactctagcaggaatccagtacatatggagtattttctttgggcacaacataactgttagaaacatttttatttgataggcccacaagagatgtgtgtttgggcatatatgatataaagtgtattacaaaagggtgagtacatctttaactctgattcctgtagaaactttgaaggaaataaaaatcaatgaaatcaatgtctgtttctcaaaaaagttgtaaatttttttacaatgtgaatattgtagttttatgtgttctgttgaacaggacagcattgtttagcttgtaaaaagattagatgacctctgtggatataaactgtcgagaagcatcctattaatacagataaattcccatagcttgcataggagtttcatgatggaaccatgagatgtaatatccattcctacaatttttgtttggcatttattgcattcagcagaatcaaaatatatacttgaatggactaagggttacttttgtagaattgctctgacatggagcaacaactgtctagtttagcttatgcaccatttataaggaaagatttttccttcatttccttttactttgtacttttgtagggtaggagttaagcaaat

SEQ ID NO: 13058 - DNA, 11436 bp, Vitis vinifera
  Intron number 5 from transcript GSVIVT01001786001 (locus G SVIVG01001786001) derived from phytozome v7.0 (chr-ID chr1 8_random; pos 3090919 to 3102354 reverse strand)
ggtaagttgatttgcatgttttttcagatgatatttctgctttgagttttggtggaatttatatcttactacatgcttgtaatcctatgagtttattagtaatgatttgaaatttgtagtaaacaaaacgtttagtgatttacacttgtaaagaaatccaaattgctaaagacatgatggtggttggaaaagtagaagttttactttacattgttatgtatgtgtgtgtacatttaaataaagcaaagtttacaaaaaggcattacctccaccaagtctttgaaatgaagtcttgcaaggttacaaatcttgatttttccttatatatatttggtcaaggccacatatcaattggtcgttaggctggtatttattttgaacaaaataagctaccacttttaaaaagtaggaagcttggaagtatagaaacttgtaatatcaaattccatcaaaaaagattttcgaagttttaaaataggattcaaaactaactactactaacttgaactcttaacaacccaaatcttcagaagttataaagtaccttttttttccttgtaaattatatttgaggggtttatacaattaaccggacatggaagaagcttgatgtcaagtcaatatgatatttgatggtctatttttttatcagaaacaaaaaaatattaattatagataaaaaacttatgagaagcatggaaaatctttcctccaaatacaagaactggtagaaaaaaaaattgactttctccaatatacagggagatccatacaaaatggattagaccacataagactttacatagatgtcatctcctcaaacttggaatcagctcctctcattgttgaccaaaaccttttgattacacaccgaaagctaattgtgaggaatgcctttaaaagcattggtacaagaggcctaaatagaggaagagaagtccaacagatctcataacatttttgacatcctatatttatcctcaaagatccttgtgttgactaataaaaaagatggtgagaaaatcactaaaaaagggagaaaaatcgggcattagatatttctatcccatatatcttgttggggttgactaacactcaataaagcgatggtacttttttatgtttaaaaatgttaataattttatttacaagtttatattactcttgtatttaattaataaaaaaatatataaagaaagattcattaataagattattatgatttttttttatatttttagcaatgtattaaattgaaattgaaaaataaaataattaaaattaatttgattatagctaaaatttaggagggacagataagctatatgtgtgtacctttgccttttattttaaagtgtgatccctattgactagccgatgccccgtgttgactaggtgataagatgtgagaaaatcattgaaaaatggagaagaattgggcattggatatttctatcccatatatcttggtagggttgattgacactcatatttcgtcaaaatatcatcaattttcagccacatttttatccttggatatattcacctgagttttcaggtttaaccgtgtttggtggggaggattggtagtgaagagggacttcatttcattggtctgttgtacctctcctcttccttgaataaacttgtagttccctttttgtttctccctgctcctgtagtacccttcctgtttctccctggtcccttaataacatcacactcaggttgttatgcagaataagatgttcctccattttctttattatagtactcagtggtaaaaaacctgcaaaggactaactatgaacaggaggagaataggctatggatgccagtagaatgtcccaataattctctctttctctctagtcttttcattcttagtagatgttaaatgggtctttcagaaactgtaaaggaggtcttaactagctggaagggcccctttgtagggaagaaaaggaaaaaggtttggaaatccatacctttgtgtattttctggacggtttggaaggagaggaatagactagcttttagggggggggtttgtgttgaatatctagaagttaaagaatttttttgtttgtaatttatggagctgtgccaaattgtatttaggtgaggagtctctctcccttataggctttttggagtgggtagcatccacttaaggggaggtgaatcttttctggtcttgttgctcttttttgaggccttagtcgccttgtatgccccctgtatgctttgtggctctttgcctcttttttaatgcatatcttgtttacttatcaaaaaaaaaaaaaaaaaaaaattctctccctaacaagaatttttggtaaagtagggttggtcttcaaaaaaggatacatccatagagatagtttttaagaaggtgggtgaaagcacttataccttttttgtgtaggagaacaaccaaggaaaaaaatgtttttatagctcttgagtcaatttcctttttttatgattatggatttgtacaaaagctagactttgaaaaacctatagggaaagtgaggtgaagaaatggtgagaggtgggacaaacatttattaaggtgcttatggagtatcctacttaaggacacaagttgtggcatcctgttgattaggtataaggttgtcaacattgcttctccccaaaaatggttaggaacctcattttaaacattaatgcttgagctacttcaagtaaatgtctatttttcctctttagaaccccattttgttgtagtgtgccaatataagacatttggtgaacagtattattctttttaagatacctccctcaaatttgtgagaaatattctttcccattgttagtttttaggatgcagatttgggtttggatcatttggtgaaagttttgaaacattgtggttgccttagatttttcctactcaccttggtgaaagtttggatctcagtgaaaaatctcatcatctcagttgtccttggtaattcctactcacttttttagaattttaacttttgccacaatctcactgacattgaaattgattctcttgaaagactcatgttttcactcaccttagtgggcttgtctcccatcaccgcagattcaagggcatgatctttatcctcatttagcttattctctgtagaatctttctttttggacttgttcaagtcttcaaatccaattcctttctatccggccaattttgtttggaaatcaaaaaccccttcaaaggtcaagatctttgcttggtcggtggtgcacaagaaggtaaataccaatgacttgttacaagtaagaagaccctacaaataccttggtcctcattggtgcattttatgcaaaggaagtggagaatcgattaatcatctttttcttcattgtcttttaactttagggctttggcataagctcttcaatttagccaatatggtttgggtgccacctaggagtattggagatatgatgattatctcatttagaggattgaggaattcattgagaggcaagactttttggcaaattgtttgcctcactcttttttagattgtgtggcaagagagaaatgctaggattttcaaggaaaaatggagaatggaagagacgttgtgagatctacttaatttttactcctccctttgggcttcttattccattgcttttatgggagttccacttaatgttattcaattaagttggctttcggtttgtaattcttaaggggtggatgacattgagaggagttgatttcaatttctaagttattttgtgtatgcctttgttttagttctccttgtatagtggtgtcctttactcttactttgattagtttttgtattccgtgagaaggatctctcatccttctctctctctctctctctttttttatcaataaaaatttatgtttgtttctgatttaaaaaaaaaaaaattcttttaacaaataagttcgacacactcttgtataatcatgtatcaatgtcataaaccgcctagcactcaaaattgttctcttgagagtccccccacacttcactatgcataagggagaaaggtctagatttctcataaacttgagcaggaaaatagttgttgtgatgtttagcaagttcactaactttcatattgaaaatctaaagcatttttattcttaaacaatagaggaaataaaatctttatataggtaaagcttgggtgacctgttctaaggtgtggtaaaattatttctttctcacaagttggagaccctaaaaagtttctgctatggctttggtgtgctcttcaaggataaacagtccatccaattccctagcactgccaactgccaatcctcctccccatgcacagttcctgaaattcagaatgagttgggaaaagtttagcaatgcaattgaggtgacaagtaagtttactgatagatataagatagcatgatgaacttaggacatataagacaaattttaaggtaaggtcattaggaacaaatattgaaccccttctagcaacagatgagagagatccatcaacaatcttaaccctttggtgacctgagaatggaaaaaatgaaccaagtaaattagacaaacatgtcatatgtttagctgcctctgaatcaatgatgaagggtttgattttgagtgactggtttgtagagtagcaaggaaattgccctttagggctagattttcagaagttttacagtttcattttgactcataaacctagagaagtgctctagttgttccatggtgaaggttggtagtctaagagtgcctgattgccatgtgttttatgtatttggctattctacaacagcttgtgacccttgattgctgccttcattgttgttgcttctaccgttgtttcctttgccccatgccttgtggtttgccatggaacctccaacctgtctttcttgcatgacatgattttttgcaatggtcacaccataacttgtctttttttttttttgattggtaaagataggcatgtatataataacaagaaaaagtacacaagatgtatacgaagagtacctaaaagaagccctcaaaagtgaggacacaaaaaaccaaggattaaaatatcgaaaatttcaaaaatatctatagttgattttctgaaaatatgaggtaatatcggaggaaatttggataaaaatatgatgagaaggaaattgatgaaaattcataaaaatattgattttttttaaaatgataaaataaaggataatatgtgtattgaaaattttttattaaagaaaataataaaaatgcatttgttttcaaaagctccttattttcaaaatgcctttctcttacaaaagagggccgaactcagaagagagagatttctaatgcccaaaaccccctttctcttatccaagcaaacaaccaaccaaccaaccaaatgaggttttttctccaaagtcccacgtccccaaagaaagtccctttgaatcttctctaaccttaatctgactttgtctttgtcatctccttgcttgccaaagttcctttgactaccctgaaaggcagtttttggattggccacagattgaggagtattagctatgaatagtgcaggattctcagtttgcatactacccatcaatccatcatgattgaaagtctactctattaacttccaatagcattgaagacctctcttaatgatggaataggctcctttccaagaatttgactcctagcttgatcaaattcaggttctccaagaattgcttatatttgatgctattctccacgcacttctagtccaagtcttgatatagatccatctattgatttaagtttaatacattatagtaggctctcacggacatattgctttgcttgactccattttctatttgttttaactcatacaattgagcatcattccctaaaagggaatagatcaagtttactactgcccgtatttctctagttgttgtatagaaaataatagctctgattgatttcaagttcaataaagttgactagctaggacattaacatagagttttctacatcagagatgggaaaacttggatctgttggactcggagccttcttggttccatcttgcaaatccatcttccctctctctttgatgaagaacttcatagattgagcctatctttagaggttctgtccattaggtttgtgcaccgtgatttagatggtaggatcctcatttgggcttacaacttgcctaacagagctctgtgatttttagaggtgattgacatcttaatccaaggatggatgctagattaaatcagaacaaacatggaagaaagaacccaagaaggggctctaactggaaatagtgttcacaaattttgtattaatcagagaagaattacagcctatttatatgcaagaattagctagactcaaggaaaagatagagagaattaaggtagttcaattacaagatattctaagttaagaaaatattttacaaataaggatgaattggaaaagaataggaaatagtttgccagtatcttgatgagggaaaaaattattgatagttagagattctctcaataattcaatggctagctggaaaaatattccagtatctttaacaataagtaaatggataatctgttgtaggaaaagtgtgtttggatgatgtagaacatcatgaatccttctctgttttatctttggcacaaccaataatttttgcattatgagactatagccttgaatcatggttgcataaattgtgccacttcttagttgtgtgtaacttcaaaacctttccttcaataccaaaccaactatagaataatcttaagtttgctacctatagtcaaatcacaacaagctagggctttggttttataactttatgaaatgggaattatagctactgcaaaaattcaaaatttcaaatattacaaaaataccttgttctctgtggataaaccttaagggggtacatccccattgtagcatttatacccatacttgatttatcatctgcctttttcttagtttacccaccaattgtctatttctactaatgacaacaatttgaaagggtggatcagtagtgttcacttgaagcctctcttagtaacattggcaatatcccccccatatacaattaatatttctagtgcatctcccgattctatttgtactggagctattattgatcgttttatgcattgaattattagctatgttttgggtaccatgttggcataataatgtccaaggatgcaaatactacaggtgcttgatctcccaaaattaaaagcagtattcaggtttttggatgcttttttgtagatgataagagtttaattacaaaaccgaggtaggggttaattccaagttagatgtgatgctttagaatctaatggtttatgttatatagggcaaatttagtgaaattgaaaatacaaatgagtgtgcgattaaaattatttgtaagatgtctaaaaagccatacatacttttatgtgcatattttgggcgattaaaatatatgtttgaaatatgaatttagaagatacatgctaggatagaagagtggcaatatgaggaggattgaacaagaagtacttgcatttgttagaatgtacaggcgacaccattcgatcatgtgcaatatatatgtgacaggatattggatttttctttagggacctgatggaccgggatgttttggtatgtttgtctaaagttaaagcaatttctggcgtgttcattaaaaatgtgaagaagattaagttggatgaagtagataattttaattatagagaatggactttgattggaagtgatgtttccagttctttaatcttgtttcaaaatttaatttggtggcttataggttggaaaatttgcaaaagagatacttggaatggtgttggggaaggtttcaaatgttgttgttgattaggatttcatttgtgacccaagacaaataggactagatataaagcctttagtggaaatgaatcaaattcatgaaggaagtgactatagagattttgctagagtgtagtatagtttgaggagaagggttcgtggtttggtattatggatgtggtagtgcagattaatggttaaaagaatttacagttgccaattgaaagctattatgacaattttggtgactgcttctcagtagaggtgtgcttgaatttggtactgagtggggtaaacctatggcaggattttttatacctggatacttctatttttgagttatagtgaataagttaaatggtcagaggatggtttagaatatttggctgataattctgtagtttgttagaagatgtgagtcacctctcttttgacctttggttagcttttcttacttctcaggagttagtgcaggagcaagcatctgcaactgtaactttcatatagaaataggaaagatgactgtaatccacttaaatgaatatattagcaattgttatattctcacccttatatttcaaggggcttactccactctatctttgctttaatatcctagtctgttttgttaaataggttaacgaaagactaacataagcgtcagttgaaggatctaattttctatcctgatggataaaaaaaccctgaaaagcagtttaagcttctacatgtacttactattgccatggaggtatttagttgtttgtgatagccatggaggtatttagttgtatgttgagaagggctattagtgggggcttcttatctgggtggagggtgagaggtaggagtggtgagggggttcaaatctcgcatttgttattcgcggatgacacgttggttttttgtgaggagtctttagatcagatgactaatataagttggcttctcatgtggtttgaggcgtgttcaggattgaagatcaacttagagaagagtgaggtgatcccagtgggtagggtgcatgatatggagggtttggccttggagttgggttgtaaagtgggtgggcttccttcctgttatctgggattgcctttaggggcacctttcaattcattggctgtgtgggatggggttgaagagcgttttcctagaaggcttgctatgtggaagaggcagtatatatctaaaggagagagactcaccctaatcagaagtactctttctagtatgcctatttattttatgtctctattctacttgccaagaaaagtgaggttgagattggaaaagattcaaagggattttctgtggggtgggggagctttcgtctaaaagccacaccttgtcaagtggaacttggtttgcttggataaaaagaaaagcgggttaggtgtgagaaatttagctctgatgaatagtgctcttttgtgtaagtggaattggcggtatgctaatgaaagagagacgttttggaggcgtgtaattagtctcaagtatggcgaagaggaggggggatggcgtactcgggaagtaaatgggagaaacggtgttaggctttggaaagcaatcaggaagaagcggtttcttttagatggtaggttaacttaccatgtggggagtgggcaaagagtgagattctagacggacaagtggtgtggagatgagccactttgtgagtcattttcctctcttttctccatctccttgtctaagaatgcttgggtttcggaggtttggaaccccgttggtgatggggatggctggattcctctttttgcaagggtgtttaatgattgggagatcgaattggtggagcttttgttgcagaagatccatgtctttcgggtacaaagggaggaggaagatagagtgatctggacagcttcaaatgatgacgttttctcagttaagtctctttattctattttggagtgtgggggttcttctatgttccctagcgaaagtatttggagggtaagagtgcctccaaaggtatctttttttgcttgggaggcttcctagggtaaagtcttaactttggagcaacttcaaaggagggggttctctttggcaaactggtgctttctttgtctatctggagcagaaacggtggatcacctcttacttcattgtgtgaagacgcgggtcttgtggaaccttcttttctccctttttggtgtgtcttggactctttcgtgtacagtgaaggaaacccttcttggatggaatggacttggcaaatgactcctttatgtttattttggtcagtttggaaggagaggaatagactagcttttgggaatgaggagctctcgcttcaaagattgaaatattcttttgtatgtaatctttggtcttgggtcaaggtttccttagtagcgagcccttcttctcttgtaagttttttaggctggataggcttctagtaagggaaggcggtgtgtatactccttgtatactttgaggacactggtttttggtgtttcctctttttgatcaatatacttactttttacttataaaaaaaaatgtacttacaattgccatgccaactattctctggcctaagaaccaaactcataggattggagtccgtgttaggtaaatggttcatgattgggaattagaagtggttctgatttggtctctttcttctctctctttttttttttttttttcatgcttgttttatttttgtttttttatttttgagatggaacagcctccccatattcaaatcagaatgtgtggttatctggagaagaggctcaaatggtatgttttccataaattattttatcattagttgagatgcattgtgaatggtgtttcttgctctaaaaggatgtggacttatgttctagtgaaaacgaatttgttttataagtgctagagaaaaatgtctgatagtgggttgataaatagaaagtggttgattccaagctaatgttacatgtgaaagagaaatgaagtagatattttgcttggtggctctacattttgcttttctcatatctttatttggaattccttgagttttgcctacactagaaaccttatgtggatggtgcactgacggtggggatatgataaacatgattatataaaaaaggcagcttaaaattttcattgtgtttttagcagtaagatagatttattttttagaaagagctgatcccatgaattctaaagatgtactatcaagatccttgttcttgtggagcttgccttctatattattggatctacctttttattctcttcttgagttgttttcagttgtactgtgttgattctcctttttatggctcaaggaacattcatagctctaattgcttgtgatattactcaatttggaattgaggctgatattataactagtaattcacttgcttgtgatataactcaatttggaattgagactgatattataacaagtaattgacttatctgttaaggtctttatatatattttttttcacactatttttgttttctttgtttgtcagagttgttcgttcctacttactgcact

SEQ ID NO: 13059 - DNA, 4623 bp, Vitis vinifera
  Intron number 1 from transcript GSVIVT01013494001 (locus G SVIVG01013494001) derived from phytozome v7.0 (chr-ID chr1 3_random; pos 1832505 to 1837127)
gcgtccactgccggtgctctcttcaggcatttgaggtgcaacattattgctcttgtttcttcagttcatttggaaaaatgcattgccaatgatttattttaaaatgtggttttgaaatgcttgagtgatggagtgcaattggttcgaaatggatcgtagaaactgaggcaagctcactatggactgtgtgatctctgaattagctttcttactcgcaagcctcttagagacggagattttagggtggacattcaggctatgtttgcatcccggaaaatttggggaaaagcaccggaaagaaaatagggagaaagtagaaagaaagaaaaaactaagggaaaataaaaagggatttagagtgaataaattatttttatattttactttaaacttattttagttattttaagttttccatataaagatttgataacttgaaaatacatatatatgtttaattatatttaattttcatattctctatagaaaaaccaaatatgagaaaattattttagttctaacagtttcgctttccttaatattttttagaaccaaatataccattagttgattggctctcttaagaatctaaagaaacgggaaagaatattctgtgactattaattttcattactgtgaataagctgtacatcagatgtcttaaattgccttggtgaagacatcagcaatctgatcaacagagggcacatgatgcacatctatctgtttctgcaaaatttattctctgataaaatatagatgtggctcctatatccttagtctttgcattaagaatagaatttgcagcaagcatcactgtgcttaaattatcacagcatataactagtactttggctggcttgaaatgtccttcacaaagcaaggactgtaaggtgagtctcccttctaatatagaggaattggctagaggtgcaaagtaggttttctcccttctacttatttgggtcttcctttgggagcccccttgaaatttgttcatgtttgggatgtagtggaggaaagatttcaaagaagacttgctttgtggaagagacagtacttgtcaaaagaaggggactgactttattaaagagcactttatctagcttgcctatctatttcatgtctttatttgtgatctccagtaaggtgagtcttagagtggagaagattcaaatggacttcctcggggtgggggggagaagggagagctccaaagcaagcctcattttgtaagatgatcaattgttggctaggaaaaaaaggaaggggcctaggagttaggaagttatctcttctaaataaggcccttcttgggaagtggtgttggagatttgcttatgagaatgatttcttttggaaacaagtggttgtagggaagtatggagaggaagagaggtatgttattctgtaatttcaatagaaggctatggggtgagtctttggaaggtgatttgatgtgggtggaaggggatccatgagaggattggctttagggtgggagatggcaagagggtgaggttttggaaagataggtggtgtggggaggaacctttagttgtgacatttccagagctactttcaattgccactattaaagaagcttgggtagatcagttgtgggagtaggctggggagactggttgttggaaaccagtgttcataagacagataaatgattggagtttggtgaggtggaagggttgcttagaagattgtaagggcatgtgatcagtggaggagtagaagatgttatagtttggcaattggcaaaggggggcaccttttctgtcaaatctttctactatttcttagaaggttgttattgaaaggttttcctacaagcttggtgtggaatccttgggtgccgatgaaagtcaatttctttgcttaagaagcagtttgggaaaaaattctaactctggattagctaaaagagaggggttggagtcttccaaacagatgttttttgtgtaagggtgaataggagtcagcaaaccatattttcctttattgtcctatggcaagcatgttgtggcaccttattttggctatatttgatgtttagtgggtggtgccgttctcaatcaaggatgccctcattagtgtctattttggacattatgaaaggagagaaatcaaaaagcttttgaagattctgaactaacagaccgattttacactcctccacgtacatgtttttggagtgggttaggatacatatagtctacttctttctcctttttagatttcattaattggttgggctataagtgaagcgagggtgttggcattttgtctctctctcctttttttggccttatatacatcgtgtatactttaggtgctttttgggttttaatataattgctttacttatcaaaaaaaaaaaaaaaaaaacaccaagtttctgcaactatatttgccaaacttctatactccagctatagaggatctggaaccgtgtattattttttagagtgccaagcaattaagtttggtcctagagagacacaacagcaagatttagacctcctatcataccaattcaatgctcagtttgcatacaaaaaccaacaaggtctagagcagtaggtgactttctgagtagcaagcataactccaaagttctacttagatatcttaaaattcatttaattgctttctaattagcctccaaaaggtcctgcatgaattgtcacaccttagtaacgctgaaagctatttcaggtcttgaaagagtaacatactgcaaggccccaactacacttctgtacttctgtgaactttctatagagttcacttctatatggtgtaagttaaagtccacttatcgttggtgcattgactgctttagcatattgcatcttagcttggcacaacaaatcagtaatacaagtattctctgtagtgtgttttacttggctgcctaggaaataatccacaacaccaaaatcttttaaggcaaacttctgattcaggctagttatcaattctttcactgccttggtactagttccagaaatgagaatatcatctacatacaccaaaatgatggtagaatgttgagatgttactcaaatgaagagtaattaatctgacttggctggttggaaaccaaaaccaataacaacattgtacagcttttcaaaccaacccttttcacataccattttaagaatctaaaaaaaaagaaaaatcattttctactaaaaatgacacgcatattgattggtttaacaaacttaacttttgccaagttgtcatcaacagatgtaactaactacaagtcttaacaggttctgtatgggatgctgtttttgctcttgaatttcatttttgcatgtgcgtttaatggctgaaatcatcacagtagcagtttctagtatttgcttagaattgtggtttgataatttttcttggttatgatagagataatgctaattttaaaacaatggtgcagttgagggagtgggctgctatcgtcatagtatttgaggtttttgtggtgtattgctgagccatggtgcatgttgtttgttaactttatttgttagttgatgcgagtcatgtgactagattaatcaggggcaagcggtatactactatttagtaagtaccaagggatagtggatattgatgtcatatagtaatctttaacaaaatgaggtgcaagatgcaactcaaggcaagactggcaagtgcttgattgaagtaagacacaggctaaggtggatgtgcaattgataaaatgttataaattcctatgctcttaacatttatcatatgctcatacatcactaaatataatccaaaattccaattcaaaaacaacaaatatcaaaattcaaacatctaaaaaagcaaccaacaaatataatgcaattatataaatttgacatgcacatattcatcatatatcactaaaacgtgatcccaagttccaattctaatggatacatgaaaaagtgatccaagtaaacatttgtctaaattccaaggctaggtaatacccttgaaaatgcttcttattgatttgggtggagttcatatttaggtagtcttcttattggggataggtctaggtttactcttctccaccggtttattatgtgggtcagatttcgttgatagagtgagatctggaacccacctcagacgacctgaaggatgaaaagggctgacctaatgtctttttattcaagtcttctggtacacctaagttctttgtacaacctaaacttggttcaaccatacagaacctactagaaatatcatattatttagtcgcaaaagaaaacagaaacatatatatatactgaatagatgtctgcataagattctgtcatagctaatatttttttcttgataagtcttaaattaaacaaatataaaggcggagggaagaatcagaagttaggttatggtgtgcgtctgtgttcagtgagtgcatgcatttttgtgcttattcctatgatttcatcatattgtctgcctaactgaatgtttttactttttttcccacttttgtttacttgctggtttgttagtcttttatgctaatccagttcaacatcattccctgcagttgtgactgggaagagagaagttcagtgcttgtta

SEQ ID NO: 13060 - DNA, 1603 bp, Vitis vinifera
  Intron number 1 from transcript GSVIVT01037418001 (locus G SVIVG01037418001) derived from phytozome v7.0 (chr-ID chr6 ; pos 14126777 to 14128379)
gagacggtccgatttctctttcctgagatcttttctccctctctcctccccagatcggatctgtttctggggttcttctcattttttgaatctgttatcttctgattatttccttctgatttgatggatcgcgtgaaccttttgattttgactttcgttgttgtttttgtgtttgggtttcatgtctttttctggatcgtagttgatgcctacgtgggtttcgtagattctgatgttgatcttccatgtttatggtgtgatttttgaatgatatattttctctaatttgttctgcggaatgatgtctaagtttctttgattcagattcacccttagatccgtggatttaaggccatgtttggttccatcttgcagaaaaacgatttttgaataatgggaatggaaaaatatcaaatgatgccaaagaccaatttggtttatttctctagaatcattccatttttcctggaatgaccccacaattttctcatttgtgatggacaatctttttgaaaatttcaccttttagcgccatgtttctttgaaactttaaagaaatttctaaaacactgaaactgtttgatgttcgaatctctgattctgttaattagaaatgctgcaatctaggcaatcttatgatgggaacttggctttgtaatttattcttgtggtcagtggcgtattaaagaagcaagaattgatgcttgaacagtctcctctttcttggaataatatttatcccaagtttcattttcctttgttgcccatctaataattgtcttttgagattccatgttatgtttgtatctttggaagaccacttggtatggttatattctctgaaaatactttctagtagatatgaatttcttaccagatatgcatgtcatgtatgtagttgaatttttctttgagtaaatataatgttaatggtgatgaattcaagtttatgagctgtccgatcgagacatgtgacacatatatttattctacgtgatgaatgaaaaaattgcaccaattttttcttatgattttcttgtgaatgaattagggtgcagattggtgtccactttttagacggtggccacacatatatttggaagtgccacatccatcacatggcagcatgcatgctaatcttcattcaatgtcatcaaggattctcgagtcctcaaaatcattaacatgtttgatttgatcatattaaggcattgttgaaggattctgaagatgtttgaaatccactttgttgttaacctgtaacatccatgctgggtgtttgaaatctgcatttcctgtttaacctttattgattttttctgattatgttcttgaatattattaatattcaacaacccatatattaatataggaatcattgcttaggttcaaggagcttgtctcggctagcacaattttttcatatttgcagaaagttgtgttgggcatgtgcatcaaacccctctccccctctaccttggatatatttgtgtgctgcaaagcaaagctagtgtacacttggcagattcatctctggtactatatcgtaattgtctctaattgtactgcaggttgtatcactaccaaggagcttggaacagtc

SEQ ID NO: 13061 - DNA, 7758 bp, Vitis vinifera
  Intron number 24 from transcript GSVIVT01023393001 (locus GSVIVG01023393001) derived from phytozome v7.0 (chr-ID chr 14; pos 12730809 to 12738566 reverse strand)
gaaagtttacttgtcaggcattatccacggtatattcttcttactttaacatttgttgatgtggattaaatatattttcagttgcttgttcgttattttaccactccattatatatctttttgtttttgtttttttgttttgtttttatttatttattttaattttttttataggagtcctttatcatatatcaatgttatgtttctgtttgctcaaaagacaggatactagaaagtcactagtgactatttgaagtagtgtcagtgttggaatgtaacaagttagcctaatcagtcaaactgtcattttcttttttcttttttatttttcctttctctttggaactagtaagcatataagcataattttttatttatgtttgtgtttatggtgcccaaactctccaacttcactcaacatatccgagtcaacacaacatgtgggttgggctacaatcctctatggatgctcctattttgctttggatataactgtgtcatcctaattgatttcctttttgttacgttcaaaactttcttaacaaatggttgcgtggactttcataaaaatatttagggatattaacgaaagataggaataaaaaagaaaaagaggaagcatctatcaaagatatctttgctttcaattgattactaattgatttttccattttttttacctttgattgtgccaagttcaagtgtctttgcctatttttgagatcatttaaaagccaagtctcaggtgtgaagaattgggcatttcgacacataccagtacctaaatttgtgtgagggtgggtggatcagagggcactatgaacctgaatccaatatgtcgtgggatttctttactaggaaacccccacatcaaccttcatagtgtagtgaaatgtggcaagggtgaactgaagcattctttcaaagaaatgtactatagcatatgttgcatggcttcgggtataatgtcaaatgtgggaatgtgtcgaggtgtttgatccttcactactcaaagtttatgatatgaggactcgacttaaaaggatccaaaaagggacatgactactaggataccacataataaaagaaaagtcaattaaaaataaatttgaagtgaagatatccttttttaaagctcccattgtttccctctaatcccttttctttccatgtatcgctaaatattcttacaaaacttcactttttaattaactcttcttttcctctaatgtaattattactaagaacgttgaaagaataaaaagtatcaatgaaaaaaataaaattgtcacacccaaaatataataaatgtatctgacaaggatcctatacctacacccatatcatgtcatgttaatacgggtatattgggtgaagttgaaggattcggatatcctagagtatagcagtgaacttctgttgacgaatgttgataaaggagttagatcaggttggattgatatatgcaaccttgaatatagtaacactctcatgaagatgatgaattttaccagtggaactattaaggtggttggatcaagttggattgatatacaagcttgaatatgataacaatcttatgggagaggatggagtttgtcagtggaactattaaggtggtcagtctagcttctctgcagcaaaccaaatatcagggtacaaatccatggaaattgagaatatgggaagtgaactatggttcacttaaaaggagatgtatcagaatgctgtaggtagaacatacagggcttatgttgtcagtgttagaagaacagaggatgcatttcaagaggattgcatgttcatatgaggttgaattttgagaagatgtgatggaaaaattagagggatatcagaggggagaatttttgtaggatattagacgatgacatgcagaagaacaatgaatatgtggacattggattttgcagactcatatgaccttatagtagcaactacatgctttgaaagaagatgaaattttaactaataggtttttaaaaaaaataaaaaataaaaaaataaagagaggaaaaagccccaaacaagcatcttccttactagaagggtagatcaaaatagtgtataaatattgtgaagtcataaacaatggtactggaacttaataggagcaatagtagtaccagaagaaaacgacttagaggcaaaattgagcatagatgcagtaactaattttttttgtggaataaaagggctaacgacattacaaaggggtggcataaatgatctttgaagaatctaaaggtaggggattttcttctaataaaattctgtgatggaatggtaatgccaaaaaaaatctccttcaaaatagcgcattataaggctatcacaggtttggcgaagatacaaaaatgagaaactttgggaggtaaaaactggctagaaagaaggaaagcggttagtaagattaagtttgacatatagtaatttatacagtttgttgtgtacaaaagatgaagtgaaaggtatacttgctattttaagggaaataaaagtagaaataaaggtaggagaaaggggaaaaagttgaaaatatcacttaataattgctgatatttcttgatttaatggtccttgtatcaaggggatgtatcctattcataatatccccaaggtcccaaatatatttttgaaatttagcatctcttcagatatactagtatgtgtgtatatatatatatttgaaaaattaatgaccttgtttgaatagtgaaatcttttggtcccaactcaaactagtgtattaaattaataaactcactaaatatataagataataattttttacaaatccttaaaggcccatgaaatatatattaataattgatgaagttcataaaaaaatgaataatatataaatcattcataatatggtattgagtaactttttacaatttctatttttttcaattcaactttttctttgaatcattacatacttgaaacttctttatcttctagcgaattaagttttgatattgtatctcttccttttaagagtctttctatcttctacaattaataaacctcttttctttttcagtctcttaggtttccatgtattaacttttgactacattcattttttttggatttataactcatacatgtacaagtattgtatagttgaaagatataatctctataaattaatagatattcatttattggtaaatttataaattatttatttattgataaatcaattagctgttaaaataataattctcttcgtcccaaaatgattattttataggggttttactgtacattaacaacagcaagcaaaggcacatcaaagtataccggtcgtatacagatgatgccaaaagaaaaaaacaaaagataaggcgacaaaaacaaaagccctttgtgaggatcctaaccaatctattataattagggacccctcatcaatatgctacctaaaccatatcaaaatgctacaaagaaaagtaagttttaatgcttgatcaaatattttttttgttttcaaaagacttttggttcctctctttctataatgtccaatgtacacacaatgaggcaaccctttagaccttttttcattatttttcccacaaagcatcattccaccctaatagggcttgtcttaccgaacttgccatcacctaaagaactccaaataaggaaagcaccaaattctataataccctaactttgacataatgtagagggatgtactgactctttgtcttccttcatatagaaaacatcgatttaccatagaccactctctcctttgcagctgatccaacatcaaaaccttgccccaagaagcttcttaggccaaaaaaaaaaaaaagaaaacctactttagatggacctcataagaaaaacttctcctgtttcgtaacctaaaaaattgtaaagcaatttgactgaaaatttccccttcctcatatttatcaattccatcctgttcttaccctaaagcctcaaaaggaaagcttcaaccctttccatgtccaatcatttgaattccttgaaaaatgagctactccaaagagctgaattattgaaggagctttgatattattgggaggaagaatattggattggagaagcttcaataaatactagttaatctctctatcataatattcttcgtcccaaagagctgcccaaactcatcttcatcttcccaaagaaccctaatctccttaaaactcttatccacaatttaaaccaaatattatatatcttcttaatttgatcacaccaaatccaaaataaatcaaaattaaaaataaataaaaacatgaaacatgttgcatgacctggaagaagatcatgtaaaatgaaggagaagatgaattcttgagaataaaaaaattagaaagaagaagctaaagccaatgttgtaggagtttttaagaagaaaaattcatatctagacttggactcatcaacatctcaatatttatttatgacacatctaacccaaaaaaataaacctcatcaatcaaacaatggctgtccatgaattgtctttaagtaagctttagaaaacttggagaacaagtattgctattgtcttgcctctttgattgccttagcagcaaattgatgttgtactagatggaaatgagtgaactcactctcaaatcccttgattggaaggttcattatcagaagtactcaatttttattcatatcatgtgtaccataaggtttaggcttttagttttcatgtagctagcctttgaaattctttctgcctataaatgctacaaaaacacaataacgatattgcattgtattttttgccctcctttttttaaaaaaaaaaataataataataaataaaaaatcagaaacaaccattttattgccatgaaatacttaaatacaaaaaaagatgagaaatcctccccttgaaaaaaacatttaattagtctaaacaaaagcaagaaaaatcgttacaaatttaacatcaccatggaaggaggtaggaaaatccacccacttctagagggaaccctattagtctaagcaaatttgcataacctatgtcatcatgttaatgctatgattagtaatgaaaaagggatgatctgtcgattccccactcttacacatgacacaccattccaggttgagggcctagtaaggtatcattttttgcagcaaatcctctgtattaaccttcttatttgccaccaatcatgtaaaggccttgacattcagttggctttaaattcctaaatgaagtttgggagaagaaaggaactcaagttggtggaaacaaaaaggattatagaaacgaattgattgaaaatatgtcaacttctcctcaggaggatagatggggcgattcaggtgagatccaatgtagatccaactttctattcactcgtggttctgattcctctatttttttaagaataccgagtcgggttcttctcctacccgtatcgaatagaacatgctgagccaaatcttcttcactgcttgctttagatcgaactttgtaccgcgcacatgacttagatgggctctagaaaatcatgtaggggggaatgaagagaaggatcaaacccttttatcatgaaaagttaatgaaaaatccacttaaaactaatgtcgacaaaaggagagtaagttcattgatttcatgattcaataggttaagtggaagttaaaattccaagacaatgagggagaggaatgacctagaatggtggaaatagttgaatttctttcttcaccactctatagaggtttaggaattgaacccaaataggttgattataccaccaaatatcctactagaatcgaatttttgtacagtaacttccaaaaattgagtgaaaagggtgttttagacaatacttatgcaacggcctcccaagggcaccgatatgactacctaacaacaacattgacatctcattcatttgagtgcagctcataaatacttagtatgccataaagaatagttctccctgagaagcctctataaccactttcctagtaaggctttatttctcaaggcaatcctcattggcccaagccccctttttctttttggacacttgttcccatcccacaagatgacctctcttccttgccccacacctaaccatagaaagttcctctatagtttctcaatcctatgtgccacttcaactaaagtcttgaaaatggaaagaaaataaaaggagatttagggcaagcctaactgcaccatagttattctatcaggggcaagtaggcttccttctaattatctaatggttggcaaaccttatccatttgagtgagtcaaagttgggattttgggtgaatcctaaaaggtgacaaagcaaatcaacttcagccttcaaaatttggggaaaaaaagctctagaaattaattttacataggatacaaattcttataaaataatgaaaatgagcaagagaaaagataaaattcaataatgcataacttattcaagattagcctactctttcatataattgaaatttcgttttgttggttttgatctatgtattgcttcataaatattgctatggcttggaaccttcattaaaggaagcacacatttcaatcaaaacattgtaactcattacaattttgaatcacccaacactatttcttggactcttattacaccactcttctttgcatctaataccatttgtaacaacccactccctaccatgtagatattgtccacttcaaccccaatgggccctcatggctttaaaatgcatctctatggttaagaaaaattcatacatattgtgttaggaaccttttttcctatccagtgagggatatcacacccctcccaagatctgttgagataatagtcatgcatttacttcaatcttccatgcatgttgtctattatgcatgtacggtgttcggcttaccgtctttttccttttgctcctgtcaaatcatttttaataaaaataaaaataggatagtgacccatgatatcagaactaagagaagtcactttcaactgcctaaaaatctctcccaatttgtaattagaaagaaacagatttgggtttggagctttggggttaaagaattttaaatcatttaaaagatgggaaatggcttcaaaagcccaacctcttgaaaggaataaaaaaaggcaaaaaggtggcctttagctctaaaagatgtttgaaagctttaaagaaatgttttcatattttttaagttttgatttgattgcctagtcattgctcaactgagaaatcaaccaagcatattacatgacactgaatgaattgcttgatgcatatgatattcacgtatcatacaattttagtaaccatgtttactaggtatatccaagataaggtcttgtggttgcgtagtgtctgctgttgatattattttagttgagacaaggtgcaaggcctaatctgaaatcatgggtttctaataagtgcacatttttacccacattttctcattgtaaaacgattgactagggaatttttttcgagaagccaataaggcagtaatctctatgacaattcattccattctattgaataaagaatgtgaccaattgactttgtgcattaccagtaaggtagtaatgttatgttatattttttgttatttttagcatgtaatatagcacatgttggaattagaattgtcattttagtgaaattaaacatttagcaattagcatctgacatataactggacattcaggtggattgctaactacc

SEQ ID NO: 13062 - DNA, 2561 bp, Vitis vinifera
  Intron number 21 from transcript GSVIVT01013566001 (locus GSVIVG01013566001) derived from phytozome v7.0 (chr-ID chr 5; pos 20968092 to 20970652 reverse strand)
attcagcttacaaggccattgatctccttgtgaaggtttgagaagctttatgatctttgcctttatgatccgttagaaaagttaaagaaaattgtgtacgaacacctattaaaaagtattcacttattaaatatcatctctttagcccctaggctggttttggtggattgtgatagaagccatagaatagaatggttgtgtccaggagtaatatccaaagtacaggaagggaaagaaaacctatatgattgtctatattcaacatggggttgccatatctagtagagatgaggaaaaagatgtaaagaagaagagaggggaggggaaactatcatgaaagctttaaacaattccatgaaggagatggattttgaagttggcatctgtcaggaaagttgtggactcccttgcaggttagggtattgttgctgacaataagagtttttgaagatttcatgtaaagaagtgcatgctttgtgttgattttatttggaaggaatgaaagaaaagaatccttaaggatgtagtgttccctagtaaagttgaagttagtgtcaagttgctttttcctttggattagatggattaatgtgagatggttttgtcgttttttaagttcttagattctttaaagttataggttttcctttttagcctttctccctcttgtgtatatcttacatagatatgagttttttggaccttgcttgcattaaaaggttactaaagaagattttgtaacgcaatgctcccaaccctattttttaattcatatcaaggatgtgaaatacctgaaatgccctctaaattgattatttatatgttaatgtcttagagcatttcttttccagttattgcatgtgtatcagacatgcaaacctatggaaaattgaaccaactgcttctttggaatattgggagctgatctccagttctcacaaataggttgcatatttgttgagcctcaatcttgttttgaataatttacctttatctattttaatatgtttagttttatcatgattgggtgggatctagatcagtcattgatgagttcctttgttataagtttgtcattataagtaagcatgtacatagcagaaagattagtgtctttaatcgattttgtagattgggtggaattgagatgaggaagggagcagttttttgtattttccctcttccgggctataccttttgatttccctttgtatacaacctgcatacattggtctattgctctttttattaagatgtatcttaccattgcttgcttatcaaaaaataaaagttttatcatgattagcagttgggtgcagcatagactaatagttgtcataggctattgaaattaatcccatcactttttacagtaatcttttaccacgttagttcgatctcctgccctctttgacatcccacccataactatatattatcttgtgtaatgggaaattagaaatcaaaagaaacatcatgggcatcctaaaagaaggcaattacacaagtattctctaatatctcttgttttactgggtattcattggatgatgagcacaaaaattcacttttgggaggatattggtggagtgattaactcatggttcagttcccaaatctctatagagtggtgaggttgagaaattcctgtgtttctttagttctaagttcatatcattcttcagcaagaaatttcacttttcaatgcaatattttttatcatgaatttgaggaattcacaatccatgtatcgactctagtctgtgtgcatatacatccacctttctaggtataaacttcagaagtttggtccttgacagttgacatcctttggtatgttctcaatcagttcatttgttagtgccccctctggttccaccagttcaagatcctttcttccagcaaacttcatttagaacttagaagaccaaactttcacctaaagtcaagacctttgcgtggctggtggcaagtaagaagtttacaaccaataccataatttagaacatcaatatttcccctgctcccagattcttgctccacattctttagaatatctttctacaaacctaatactgtaatttgcttttttatgaaatactttcataacaagcctacttattgaatacactgcctgctctagatactctgtcaggaattaccttttgtttaattccagactgtgccacttctcccagaagagcccagagacaaatgaacttcagggaaacagtaaccctgactggaacaacgcttgccccactctcagggccttttccccattgtctaggttcattagctcattcaacccaattcaatgccttgagtgcccttctatccattgctccttacaggctctaattatctctatagaaaacctactaacctctctcaggaagggaaaatcccacatcagaagcttgtcttcttattgttggacttttttcttgctcagatgcatccaatttactaagatcatgccacaatagtttacaatggagaaatattgctgagttttcttttctgctttgatatgcaggaacaagttacacttcttgagt

SEQ ID NO: 13063 - DNA, 926 bp, Vitis vinifera
  Intron number 3 from transcript GSVIVT01033491001 (locus G SVIVG01033491001) derived from phytozome v7.0 (chr-ID chr8 ; pos 20275315 to 20276240)
ctgtaagtatttgatgtttcacacattattgcagttgttattttacatttggataaactaattatgtgagaatttagctcagtatggttatcatatgcaaacttgttcattttaaaaaaggagtacaatgaactttaagaacccagaatgcatgggaggagatgtatagtgaggtggttgccactcattcataagtttatacgtttatttaatttattgtttcctttcttagtatgctatatttttttttttttagtaggtgtgagttgagcgttggaattttggattgataatgaaagacatgtgcttattctttcttcttttcttttttttcgtttttttggatgaaactgatatactttcacgaatcaacatttagttaatagagaaaaggatggagatgtttgtcacctgaccactgcatagatattgccccactttaaaagttattggcttttggggtgttttggtgggggtgagaaatggttgtttgttattttattgtccaaaattgccttggtcaattgtatccactgtatgaaggaaaaagtagattcacttgagaaacattgtcaaggagctggactattgttactttttggggaggagttagaacaataactataatgctatgagcttgcaagtaccacatttttcttgttgccttcattgttgtgatcattatttttgttttttttttccccaatcttttccatggtttcacgtgagatttctttacaaaatatacatactgaagatttaatattagaaaggggaaaaaacagaaagaccaagaacaaatatatgatatttttcatcattatgtgattattgttgtcatcatttttcttgttggttgctgcctctagactaacatgtaaatattttgattctgctgcatgtttagacagctgtttctgttgttt

SEQ ID NO: 13064 - DNA, 4258 bp, Vitis vinifera
  Intron number 1 from transcript GSVIVT01033679001 (locus G SVIVG01033679001) derived from phytozome v7.0 (chr-ID chr8 ; pos 18742478 to 18746735 reverse strand)
tggacgcccttcgcctcgcgctaggtttgctcttcttcttcttcttttttctttttcccttctctttccccaattcatgtgatgcatttttaatgttatttgttgagattatatgaattaaaccctagggtttccttcatcatgtgtcggaaaccgtactttcctggaaaagaatgtggcaaagattaaaagaaaattgttctgaatgtttgagtgtgatatgaccatcgatagcagtaagagagtgattgcatgtaactaggagatgcttaaggctatatttggttttcgaaaattttgaggaaaataaagaggaaaatgagaaaggaaggaaaagtgaaagacaataacaaatacatcaacttttaactaagttgaattatatttgattttatttccagcattttatagtgaattcaaacatgataaaatcattttcctttacaatttttctaggtagaaagattgagatagatgtcagccatgggattaaggatcatttatgcatagttctatgtttgagagatattacattttttagacaatgttaggcagcaaagaagaaacatatccataaaagtaggctagagggaagagaggaagagcttggctgttatgggtctagataaaagctgaatgagggaagatttgttacaagtcccaatgtgacatttctggtgttggttccaaagaaaggggggcaaaagatcttaaagattttatgcctattagtttggtggttagtctttataagttattggtcaaagtgttagcttataggcttaaaaaggtgatgaataaagtggtttccaagttctacaatgcctttgtgcaaggaaggcaaatcttagatgttgtgcttatagccaatgaagccattgactctatgttgagaagcaacaattgcaaggtgttgtgtaagcttggcattgagaagacctatgattatgtaaattgagagtttttgcttttggttttggaaattatggggtttgggtagaagtggatcgattggattagattgggtattttgatagcaagtttctctgtctttggttaatgacactccttttggcttttttcaaagttctaaggggttgaggcagggggacccactttcactatatttgtttgtgctagccatggaagtgctcagttgcttcctttggagggctaagctggtggttatctatctaacttcaaggtgaatgacagagatggtaaaggtttgaagatttcccatttgttgtttgtcaatgatattttagttttttgtgaggccacccacacttaaatgaaccatttaagttagttttttatgtggtttgaggccatttctggcttgaagataaatctaggcaagagcaacttcattttagttgggagggtggaaaacttggaagatttggcttctattataggttgtaaggtaggagatcttccaaccacttatttgggtcttccccttggcgccccttccaattatttgacgatatgggatgggatggaagaagggtttcacaaaagagacaatgtagaaaagatagtatatttccaaaggggggaggcttacactgatttagagcacgttttctaggatgcccatcttctttatgtcacttttccaaatgctgaggaaagtgaggatgaggtcagaatagattcaaagagatttcccttaaggtgaagggaatttagagaaaaaacctcgtttagtgaagtgggctattgtatgctcagataaaaaaatagatggggttgggagttaggtgccttgatttgctcaacaaggcttttcttagcaagtggatttggcgacatgcaataaaaagggagtctttctagaaacattttataaagggaaaatatggggaagttaaaggggaatggtgttctaatgaagtgagagataggtgcacggttgggctatggaaaaccatttggaaattgtgggtgattgttaatgctaaagtctcattttctatgggcaatggaaggataggtggtgtgataatgagttgttatgtgcttcattcccctccttatatgccttagctagctcaaaggaggtgtgagtggcggatctgtggaatcaatctaatattagtagcttttggactcctagcttctttaggaatctaaacgattgggagattgatatcttggagcgttttctttcgaggtttcaagatgagacagtgaatagggaagtagaagataaggttatttggttgtagacaaaaaacgattctctctgtgaagtttctttacgcttgcctggagcttaggagtttaaaccctttctcaaaagctactatttggaactcttgaatttcacctaagtcgagtttctttatttaggaggcttcatggggtaaagttctgacttaagattgactccagaggagagggtggtcctttgctaacagatgtattctttgtcatacctagaaggagtcaattgaccatactctgcttcattgtggtatagcaaaagtttagcagcagcttttgttctctctcttcaatgtatcttttgtgttgtctccctctataaaagagattatattgagttggcatgggtctatgttagaaggagacggaaaaaagtatggggagcaactcctttgtgtctcttttggacaattggaatgagataaatagaagatcgttcaaaaaacgagctctctgtcctaagactaaaaaacttgttcctctgtaacctgttttcttggaccaagttgcacatagctggaggcccaatgtccttatatgattttattgattagttgggttcttactaagagagggagtagttttttattttcccattccctattttttgaccatcttttgacagtcgttatatacatcctgtatactttggtgcgcttttttggtgctttttatgcatttcttgtttacctataaaaaaaaaatgaagtagcaagtttagatgacctaaataatttgcattttgtacttggatatgataacaaaactgtattgattttcagccttaggatctgttattgatcttattggtattttctagaccattatttattaagttagataaggggattgttttttgtttatcccttggccttgattggtttttaggagcctttatatacactgtatacttttatacaccattttgtttggtgcttttaatatatttgatatctgtctataaaaaaagaacaaaaactttgttgtagatgtgcactacttaatgtgacctatccgcttctgctcaaagcttatcttgttaagaatcactataaaaaaatccctagttcacataatcatgcgccttttcaatatcaagctttctaacctatccactctcaccaacagtttccttgcatgcacacctctctgaaaacatccaacctcaagatcccacctatctaaatgcaagaacttgtgttcaaacctccttggacctttgacaaggaccgattccacatcaaagacttcttcaaaatcaaataagaaaagaacagccccaacaagaaaatcttcacttgtttcaaaaaccagttttgagcagctcatctcctcagtgaatgcaaatcagggaccggatctgagaactccccccacctccccactaagctacacttcaaaagctactccctagactgctcctctttatcagctaactaattcacactgtatcacccattacaccctgggccttcttaaccacttgtacgaaggactctttctcaggacaagctatgttgttacacccgtctgaagacctcctagccatgggactaggaatgcactttggaccttggggagaggggaccactcccaaacgtctaagtttttaaacttcctgtaatctctcctcagtaaaaaaatcaacggattttgagttcacaacaaaccaacacctcctctcatcctttcttcaagtgaaccctaagctagttagaaactgtcatagttgcaaattatttaatttttataaagaaaaggaaacatatgtgaaatgagttttaagaagcatgtaaaaatatttaatcaagttaaaatttattttttattttttgttgccttttcttctatttttcctctttatttattttttttccttatgttttccttcaaatttcccaaaaaccaaacataggatgaatgctatggaaaacaaaattagttcatttttgaaggcatatatcattttgttgctgatgcgacccctattatgtgtgcacagatacattgaacggcagcattg

SEQ ID NO: 13065 - DNA, 2687 bp, Vitis vinifera
  Intron number 9 from transcript GSVIVT01029443001 (locus G SVIVG01029443001) derived from phytozome v7.0 (chr-ID chr9 ; pos 22839152 to 22841838 reverse strand)
ttggatacacaatcattcgccctggtcccctaaaggtaaagttgttatatgagatggtgggtttatgaattgactttgaaaagccaatggacatttctttttttttatctgaaacaatctgcacatttctttttttatctgaaacaatctgctatataaaatctgattaaaagaaggaaaatagatctatactagtctacaaaagcaaatctaactgcagttggtcattgacacagatgtttttttccaaagttatgacatactaagcagttggctatgttggctggttttcttccaagttatgacatgctagggagttggctatatagttagtgcccaagtcatttgtccaggttatgcttagtttcagagcttcgaagaaaattgttaggagtttgcttttgaactggctttagaattacactagccagctggaatccttaccatagagaacatgaaaattctaggccttgttttgaagctgttgatgaaaacagttttttgatcttttaaacagaaattagttttctaaattagaaaacatgattgacaaaatagaaatagaagccctttttttttttttgaaaacaataaaaaaagaaaaacatctttggtagctaaaaaatggaaaacactataacatggtattttttgagaatatattttagttgttttcacttgttttctgaggtttgtttttaaaaatattgggacaaaaatgaagaataattgaaaataaagcactatatatatatttttaaaaatatttggaaacatagaaaacaaattgcaaacattccaaattcccatatagaattttattcaataaatcatcagagaattgtttttaaaaactgttctcaatagttgttttttgagaacaatttttgaaaatgttcccaaatagtccctagttttaaatcggaaaacatgattgacaaacttttgatagaaacagttttttgaggattcgttctaaaaataggttgttttttagaacaaatttgaggtcttttcagttgctttttgtatggtgatttgagaaacaacaaaaaatatagataatactttgagaacttttgcattgtacataaatgtatagtaccttcatggagaattagccaagaaaactatttttcatgtttgagttcccaaacagagttttgttcctaaaaataattgaaaactggttttgagaactattctcaaaaaacagttttcgaaaacaatgccaaatagacccttagagttggttcttccacatctagttttctttctatctcatgaaccttgggatcatgtaatttggacgtaaatcttactacattgaaaccttggatggaaatcttactacatggaaactgcactgtttaccacaaacatgtctatgcaggtagagatagaaatatttccatttggaagagaaaacaaaaacccttattgccagttctcctcttccagttgcttttcaactacatgcatcttcaagtcatgtgattaggatttgatctaatatgcttttcaacttctgtattaaataagatgtatcctaggatgttttttgctaaataacattaaaaatgtactttaatacattgtaggaaaccagctgaacaagcactatgtgctggcatatataggaggtgcatgtgcaaaagcatccatcttctccactgtgtatcaactataaaacccatttgtaatgtgtatgtaccataagtcagtgctaataatctgtttttccatacaaacaatggtgcttctttttcctctagtgaattgtatgcatttcgtcgatttattttctattgtggggctttttgttcatatcatagctgggcattagcaaacagccaccaattatctggagcatttcgaccatcaaaagtgattaggtaccccgatttcatggtgggattagagtggccataacttctgatgtaaaagaagctatatcaatcttcatttgccatatgcactaaaagtgccttaaaccaattcattgttcaatgatgccatttgaatgttctaggataggcaatttacagtagaagttgcgaattttgctgatcgaaagaaagtttttggtttcttcaagtttagttgttgttctgcttctgaactgatttctagtactatcttatagcagcttaagtgattctatggattttgattgatatggtttttgaaagagttttattttctatttttccttgtggattcaaagaatgagcttgggattgaagaaagtgatcttccttccttttcttgcttgctgctacattagaaatgggccaggcaagtatacttttgctaatggtagtgcaggatgctgtgaaactgtttagggaaaggggaaaacatgtacatcttgtaaaacccatgtcatataggggcttgcaggctaagttatttcatgctccataaggattcatgctagggtaattcatgatacatatattggaaaaggactgcagaaatgtatcaattaaagtcaacagagaaaacagtcatgagtctgaatacaagtttgccttctcctgtcaatggttagtagtgatattttgatatcacatatagcatttcttttgtgagttgaatagctgtttccacagcaaaacttaaagtgtgattgctaattaattctttcaggaagaacctggtgggcaacgtgctctcatatttga

SEQ ID NO: 13066 - DNA, 2767 bp, Vitis vinifera
  Intron number 2 from transcript GSVIVT01014094001 (locus G SVIVG01014094001) derived from phytozome v7.0 (chr-ID chr1 9; pos 340815 to 343581 reverse strand)
ttactgggttctgggtgactggtatttgcatttctaatctttgctacatatctttattttgtggttgtggaagagttgaatctgaaattagtagacattgatttgtattacccaaagtggtgatgattttttattttttttcatttttaatgaacatttgaaaattttctatatggggtacttgtctgtggttgttcaggaacgaaaaaatcagctgggttaaggttctgatgtttttagtagggtttttgctgttgaatcaatttgaccaatgggctttatgattattactcttgatttgactgatggactttataattgcctctgatatagtataatcatgcttaccaggttttggtctttaaattattctagatgcaagtgcatgctgtatactgtagtttagttggtaggcaaacttgttccctatctgatgatgatgctctagatcggaatgttggggtttagttatcatcagaatttgtatggttgatcatggagaacttctattttggaagactttgatattcaagttgaactttttgattggtttatttttaatttaaagatgttaagtttcatagaggtttagcatttgaatcttgtacaggtgtattggatctagaaaatagctcttgatgggtctatagtgttttattacaaaaggaatatttatggcttgagcttgatttgatttatttacccatgtcaatgaagggggagaagcattttgttttaagagtattctgaggttgaagatcaaaattctgtttacttgaatcttttgaatacgcattcttctaatgaagtgcaaagttacatggttgtttagtatttggggaactttaatgatctcaatgtattttggtctatacttggtgggtttctccttggtcctttttagggttgaattatggccagaatttatgcatatatgcttgttttgggcctttgaaagcttctaagggtgaatgctcctgcacctgaactcacttttagcgctgctcgcattttggtctcttagaggcaaatgctagtcacctactgggagcttccattccatcttagcgttgctttgtatcattgatcttttgatctttgggatgctttgctttgttttgtgcttttctctttattgaagatctccttttcttttccatcctttatcctctattctattaatttgtttgctaaacttgcatgcaagcacatgctcaaacgcactgaaagttgaaaatggcttgttagctctgttccccaattgtataagggttgccacatacatcttcttctcaaaaagtctaacctacatcttcatcaacataatcttcttttccagcatttatctcagttttacagtggtggtgtcccctgtacttggtgtggccctttgatttttttaaacatatcctgtaaattaagattttgtgacactgagggatagaaggattgttcttggattgtggtctgcataagtggctgagttgtcgaaacctcctcctctgctagaagattggaatgttctatatcataatatgagcaggaaggctcttatctcggagagcgccaaaggatagaacaaaattcccagggaatcactagggataaaggcatagagagttcctagtgtttcgggcttccactctatctgtattgtgtttgggcatctccttgaccaaagaatcatgaatttggtcgtaacattggtgcaaagagagtcaaggtattcctatgtccttctctagaggatgcatcagaggacctatgtttgttcctgatcaaactttgatggatcagactgtcatccctttttgttgaaatttctcttgtacagtgaacttgtttaggttgctttatgatctcaagcatgctgataggagatcaggttttttttcaagaggagagtggctagaataaggaatcctgagcattttttatacgaaaaataaaaccactaggagccttcttcaaacccgaaagattggatatctggcgttttcattattattaagtctttgtttgaaggatgtggttatgttcttggttatcatagaaccccttgactagtaaggcttgtacgtgagatttgagcatcttatcattacttggctatgtaggatgacttcagacagtgctgtggggcttgtactgctgactctagaaattctctgagaggacctactccctagttgtctctcacttcatgaccctttacatactctccatttcggccttaaattgttgatatcatctttcccatcaactcaactttaaactgtttccgttttattgatgactgacttatattagattattttgattctaagagagtgaaggctgtttgcacaagaattgctttcagggaatcacacttctctttgaaattatgtttacttgattgtgtttgattaagcaacttctgagcaagatttgttcatgatgttgagagtggagacttaatgacatgaaattagtttgttgatcgcatttttggctgaggatttttaagaattttgttttattattgatgtttgagctctgaaggagacttctggcatgtaatcacatcctcttatttatttattgataattcttaatatttttttatatttatttcatattctttttggttaatgttgtttcattgttatttaattttcatcttatgttttatttggctagatattctattctgctttgttttttaaggctatttatttgcagttctatgtggagtgcaggatttggttaatctcaaacctgtagg

SEQ ID NO: 13067 - DNA, 6419 bp, Vitis vinifera
  Intron number 24 from transcript GSVIVT01025133001 (locus GSVIVG01025133001) derived from phytozome v7.0 (chr-ID chr 6; pos 4070894 to 4077312 reverse strand)
gaaggttggtgcattatagatacgatgaacatttatccttttgtttgtttgatggtgtctcagctctatttgttgcatctgtttttaagacattggcttattatgtttgtcatgatttgtatgtattttctttctgagtacatatttttttctcatctattaaaataagggaaaatagagtgcctcataaggtatatggcataagaaagttactcataaacttgcaggcaacttaacagattcgtcaattggtttggaactttgagatgtgttatagtaatcctagtacaagcataacgattgagtttgtatttttgaacagtggcaaagtccgatgtggtgccaaaacaatgcacgtaaggtggaaacaccaaaatcaacaacattcatcctagtcactgctagaatcaagagttctagtcatctttctccttccattattaaatacctttatgcttagttgtcaagttaagataaaacatttgaatttcttatagtaattagtttgggacttgtgaaagttgaagaaacatatgtttcttatagtcaattttgagtcattaaaaaagttagattacttggtggtaaacttttgaacttcaaaaccatgatgtcacaagcaaaggaaaaatagaagagaaagaataaaaaattgaagagacttagggatagttatgagatcatcctacgctattattaagtcaatatggaatagatggatttttcgtaagagaaaaataacaagatgtgttatggttttaaggaaattgcctcctgatgttgttggctttgaatgctacaacaacccactctaatgtgctgtttacccaaattttcttccccttctccttatttgatctatttttaccctctcttctatgggtgtcttgttcctcatactgtatgagacaatccaggatgtgtgcataaaagcgtgtgccttcttaccaagtataactcttagttcaaattttttatttttcattcttccaaattggaggattattcctcaaatagtgtgatgcatctaggaggaagggaggaagggcaagcacatagctgtgtgcttttagtagagaatttggactttgaattcttttgaatttaggggttattcctcatatggttgaggcatccaagacacacagggtttgcatcttagggcttaccattatcttctatttataggaggttaggatattttcctaggttagtgctctatagtcgactattgtatccttgtacagttaaggcatatatcaaatttttcatacttctttcacatggtatcaaagctgtcttggctcttgggtttttttggcagccttcattgttgttccattttaggtgtggttcattgtcatgttctattatgcttcacgaccttcatcactgttgtggtttgtttcttgactcaaagccagccttgttattttttgtgctcacaaccttcattgctttcattttttgttaccactttctccccaatttatttatttattttgtactatcatattttgtccttcaaccatgtctaaaactccatagtcctccaacactacttttgcagccactcctttcaatgcccaggtatccatacacattgaaaatcctaccctccagatcatcgcttctaaattgagtggaagaaattttatgaagtggtctcaacttgtaaaaatttctttgagaagcaaagggaaattcaaatacgttactgggtcagcaaaaccacaagctgaaagtgatcccaactattagagttgtgaggtagaaaacctgatggtaatgtcttggcctacactccctacaactaaggacatttgggaggttgttaataagacctactccaaggttgattttgcttcccgagggccttcaagtgtcataattgactataactccttcaaagggttaccgacagggttagatctttactaaaacatagagatggaatttgttgctgatataaaatagatgagggacatgttggaaatggaatgtgtctttcaatttttgttaggacttaatcctaaattcaattaagcataattgaatgctaggaaaataccattttctggatcttgatgaagctttttcacacattcatggggatgaaacccacaaagaattgataggcaacaaaatgggagatagtggaggttctacaattgaaaatgtggctctacaattgtccaagttgactcaaaatggaagggatggtaagaagccaatagacaaggacagagtgtggtgtgactattgcaataaaccaagatacacaaaagcatgttttgaaagctgcctactagattaggactagccaatcacatgatcgttgttgaagaaaaacctgagcagtcacaattcaacagatttgacattgagaggctaaaacaattgttgaactggctggagaattctaatgcaaacatctttgaattcagattcttgttccgtggctcaatcaggtgtgaaggcttcaattcccctccaaaatgactcacctagatcattgatttaggtggttcagaccatatggctagcatgtctcattttttttccaattacttaccatgttcaggaaaacaaaaaatcaaagtagttaatggatcattctactcggttgctggccaaggatctatacacatctcaccctccttaaccttacactttataaatctaaagtacaatatattgtctattggaagaatcacaaaagatcttaattgttctattgagttccctcctactagttattattttcaagattattcaatgaagacatttgggcatgataagctataagatggactgtactacttggtgaccaattgaagaactgggggagagggttaatgcctggtttcatcccacaaaaccagtttggactagattcttctttggcataaccatttaggacacctcacattccctttgtttaagaaatagatgtttgcaatttccattgtgagtcatgtactcttgctaaacataattgtgtgtcaatttgtttctctgtttagcttaattcatttgaacattcagggtccatcctgcgttgccaagatttcagacggttggtttgttactttagacgattgtaccaggaactcctgggtcccatgaagtctaagtccaaagtgtccttaattttctttgtatttcacaaatttgtcaacactccttttggaaccaaaattcaaaccctaagatttcataacagtaaggaatattcaatcaggaattgatgaattttggaacagtaaatgtattctacattgatcaacatgtgttgctaccccacaacagaatgggatggcttaaagaaaatatagacatcttcttagaggtatcacatgctcgcctattccaaataaggatgccaaaatgctattagggtgatgctacgctaacaattgcataccttatccacagaatgccaactaaagttttggaaaaccaagcacttgtgaagaaactcatgacactatttcctaactctcaaggagcaggccccttgtcatcaagtatcctatgttcatatccatgaacacgtatgtggaaagttggatcctagagatgtgaagtgtgtgttcttaggttactccaaaaggactacaagtgctaccaccctcctacaaggaagcattatgtcactatggatgtgacttttctagatgattattcatactttgataacacctatcatcaaggggagaatatcttaagattggaagataagtgggattgggatgtggaagaagagtcagaaaaaggaaaaaaaaaattgcattgagattgaaaggaataatatagcgattggaaatattaatgcagataaagatgatgggaataagaacaattattaacccaaacctaagatagctcattaatatttcctctaatcatcaaacaatgtgtccccaaaataccttttgaaaattatgttgaaactactcctaattctctcacaaataattaaatcatgatagaggtacctaagactttacttctcaacatgtattctaggaaaaaaatccattgtcatttctttggctccaattatcaaccctaaagtaggtaaggaaaataatgatctaagtccaacctgtactatataaatcaattcccctaataatcttgatttaccaattgctcttagaaaagtggttagagcttgcactctaaaccctatgtcttcttttgtgtctacatagaaactctccctcaatactaggcctttctcttgcgagttcttagtgaattccccctttgttcaagaagccttagtctcaaaaccattgaaagatgtcatgaatgaggagatgacaacattggaaaataaccaaacttgggagattgttgatttaccaaaaagaaagagacttatgggctccaaatggatcttcactgtgaagtacaaatatgatggatcattagataaatacaaggtaagacttgtcaccaaagggtactctcaaacctattgtatagactaccatgtgactttagcactagcagcaaagatgaataccattgacattcttctatctttggttgccgtcaaggattggtctctacatcaagttgatgtgaaaaatgtattccttcatagagatttagaagaagaggtctatatggacataccaccacgatgtggcacagaatacaaaagaacaagttccatagactgaaaaattcctgtatggattgtaatagtcaccctatgcctagtttaggagatctattaagtctgcttgggagaggctatttcaaaagtcaaggtaatcacaccttattagtaaaagtatccttaattaggagtcattgctctaattgtgtctgtagatgatgttattgtgatagatgatgacaacaaggggatgttaggattgaaggtttatctaacaaaataatttgaaatcaaagatcttgaaagtctaagatacttcctaggaattgaagttgccgaatctcgataggaaatttttatttccaaatagaaatatactcaagactcctttgaaaaatggatatggctgttagcaaacccattgacactctaataaatgccaatcaccagctaggaaagaagcaagggatgtattacagaatgattaggaagtttatatagttatcacacacaaaaacctaatgtagttgtgagtgcaactagtcagtttatgcatgctccatttaaaccacctgtcgatgttgtctatagaattgttggatacttgaaaggaactccaaggaaagggccctcttgcttaaaaaatgtagggagcttaagctagaagcttatatagatgttgattgggcttactccatgatagaagattgactaccaggtattgtaccttattaggagggaatttggttacttggagaatcaagaaacattctagtgtagagacaaagttaagagcaatggctcaaaggatatgcaaactaccctagttgaagataatactatcagacttgaaactggagtaaagagttcaatgatattttattgtgacaataaagcaactataaacataacatacaatccagttcaatatgactagacaagtttgcacttcatatgtttcatcctccaaccagcttgaagatgtgctcacaaaaagattattgtgtgcaaaccttcaatagataattagcaagcttgagatgtaaaatatctttgcatcaaattgaggggggagtattagaatagttgattattttctctaaataggctgtatattttttttactgtaatatttccattgatttgtatcttttatttataggaggttgggatattttactattttagcactctataggtcaactatcgtatcctatatagtgtgtgtattatttctccctaagtaataaatcagttttttcagatttctttcacatattcacacttaccttatctgtaaaaatgaggcatctgactttgaattctcccaaatgtaatcttctaatttccaatttacttgtttatgatttattaaagggctgttttaatggatgttcaagtgcttctttaggtttttgcctgtagtaaagtttttccttgcattttttgcaactgatttgttacaacctagatctcttacgaaggtatcttttcaaaagtttgattagttaatggattttattcattgcaataatcagataggagtgattcaacagtaaattattttgcttctacttgaagtagaaatcatattcttttttcccctagacagtttactgacagatgttgaccaaatttatctaatggaacagttaaaaagatgcaaagatttagtgcttttttaggtttcctattgtgtactttctgaacttaattctttggtggaaatcttagatattcacttgtgtttctgaacctagattggagtccactaaaggaacat

SEQ ID NO: 13068 - DNA, 1578 bp, Vitis vinifera
  Intron number 1 from transcript GSVIVT01027870001 (locus G SVIVG01027870001) derived from phytozome v7.0 (chr-ID chr5 ; pos 8804387 to 8805964 reverse strand)
tgctcctctcacacttcctcttcgacctgtcgcccgtaatttctctttttctttgtcttcttctttcttttgtttggttaatgtgaaaattgacgaaaagaagtgaaaaggaaatcctttttttgattctctggtgtgccaaatattgaaaattttgagtttttcttttttccatacattttgttggcaaccaagcgcagcattaatgcgcatatgggtgtatctatttgttggatttgtttgaactttgaattttgggaagaatgagagaaatgaccaaaaagaaaaaagccttagaaatgggtgccttttcaagtgctaaagggaacattatgttcagtattgtatgctttgttgaattgccccatggtgtagctacatatagcatgcaaatctgattgaaattgatgtacaacacatgtttaatttgacggattaatgattctttcagatgcattaatgcctgaagcctcctataatggttgctgctttagtatggtttaggaagctgtaaacctgtctggtggatttccgatgggtaatgcaatgacacatgcattgtgaatgaacataagtactgggcaatcatggatttcccataattttcctttaatagtgtcttgttttttttttcttggtgggggtgggaatttgttcaggggttctcacttaatattggttggtttcatgaactacattggcttatgcttgatatatacttctgcttcttcaaattggtgtatgaaaatatgggaatggtgcctccccattataattttacctgcaaaattacagattcaacagaatagaatggtgttgtgaaacattatctgtgcattcatcatttaactttgattaggtttacattattggttttattgaagcagaaaaaaggttaggtttacaggaactacgaacatgagtgagatttaattctttcctttatagattagggtatttaatgagatgagggatggaaaggtttgggaaactgagactcagttatacaaatggtggggtagatttatctgtatggtgttttatgaacacagttctgttctctgttttgcttttgttcttcagttggtagggagtgcattagaacaagttgattaacatgcttctcaacctatgcatcatggatcaaccagtgccttgcccttttattgattcttatattaaacactttataatcttttcatccctttccttccactgtaatttattagtatgatatgataattgacctctttcattatggggtttttctatgtttttataatggagcaatgtttaattaactcaaccaaaaaagggctcaattgatgttcataatgtgtgatggtaagtattttgctagccttttacctactacaaccctcttctttttctccaggcataagagaactacatgaaaaataacaacacttaactcagcacaggcagggttgtaaaattgttttaaccattatgacagcaaacggtatctgtttaatcagtttgtgaactatttgattaatctcatgattggtttattcttcaggtagagtgtgccccttcactgggaagaaagcaaac

SEQ ID NO: 13069 - DNA, 6075 bp, Vitis vinifera
  Intron number 2 from transcript GSVIVT01029939001 (locus G SVIVG01029939001) derived from phytozome v7.0 (chr-ID chr8 ; pos 1789486 to 1795560 reverse strand)
gattgagggcatttcttgccggcggtgaaagcaatgtaagcttctatgaaatctttgttactcatgttgttctttaaataaatgctttggttttctttttcttggaaaatgatggtagctaggatgttggaggtggtgtttgaacttgggagtggtggtcttggcaatggttttgtaaaaggtgacagtttgaatggtattctccaataatatcatgaataggaaattgcagaggttgtcaggataataccgcatttcacaactgcggtagattaactagttgctaagctctagccgatttactatgaactatttccatacactatgtaatttgttacttattaaactatttccatacactatgtgatttgttacttattaaactatttccaatactaactttggtagagcaaataagcccaattttgccctcttcatgcaagatactgcaaattgacatttattggaaattctgagtatatttaaggcaggaaagcaagtacaaataaggatgaaagatcctttaaggaggaaagtgaaagaataattaagaataaatataaggacactgctagaccaaaactgaactttaccttaagagaggtattagtcccttgccaccttggcaaagtgcccctgattcactgaacccttatttagctaattagctggtgtaggcttccatatgaaggaagaaaagaggtagcatgcttcttgctctccgaaaaaagaaaaagcttccctagcaacctcctgtttttgataagtgagcaaaagttgtattaacagtgtttatcaaaagagcgcctttattatattatcctaatttacctatcaaaaaaagaaaagaaaagaaaaacagtgtttatcaaaagagtcaaactacaagggcaccaagaggctgctctcttagtgacctcttaaaaggtgacaggtaacatgcttagaaattttttcatggccagtttagtatttcactattcccacaacatagaggatgctaggctctcaagtccttcttgggagaaactggttcccaataaggtactctgtaaagattaattttgagactagtgatcctcttgaaggcctatagggtaagctttgagattggatatttgtttctttgagggggtggaaaaaatgatatcatttgaaaactagaagtaaggagctagaacttgatattgcctaccttggaactttccactaaacctaaatcttctggtctgcaacactccaactaagaatatccaccactaaaatcacgagaaagggagataggagattctgctgtctaagccctccagaagcatcagtctatccctagtcatcccattaatcacaaagggaaaagacgtctttactatttgttttctgtggggcaaaaaaagaatgatgtaacttgtatccttagaattggagttaatgcaattccaccttctttcttgtaaatcactaggataacaaggataagactagagaatccaccttcccaattacaacatcaaatttcttaggagcataaagtcattttggggacagtttgcaaggcaaacacttctttggttctgtctaccataatttcatcatcttctttgacttccttgagtttgaccttggaatcttcttgctcttttatgatttctgtgtatgctcttatagtcatgtctttgcttcttcaaaattgccttgttggtcttcatgctgatcttgaagaatatgagtaacatcttgtctaggaaactgatgtgggactttgaccattctttttgaagctgtctagtgtcctattgggaatggttaattgctctttattagacttcattgatggaagaaaattggtttttgtatagtttgccactttcatccccattattatttttggtaaacaaatggagcatctattaaaagagcgctaaagagagggggcgcttccaattgatacaagtagtatatgcaaaacatcacagcaaaacaccaaaaggcatattcaagaacagcctacaaaaaaccaaaaactattcacaagttaggctatacaagaaatcaatcattgaggagctctccatctccaatgaagtgtggggccactccaatagggatttaatgaagaactccttgaacctttgatatgagagttcttcattgagaaccctttgttgctctctttccacatacaccagagcaaagatacttccatccccattacctttttgtgtttttttgtgtatttggggtgtgttccccttttttggtaagtgttgtttaatatatctctagttgctaagcaaaaaagaaaagaaaaaaggataggggtaaaagagaatagaaggtggtttcttattaaggatatctttgactgatttcttattgattctccccctttaaatatgccatatccaagtgtccatgtccattattgagatcctttttagccgagtcctacaatttgtaggtataaaagattgaaatttggacacatagtcatacctgacatcctcatgtgaacacatgcaacttagttgcttaggataacaatccacttgttcttaatgatttcttttattatcatcaaggtcatttaactaattcatttttttacctctaatccaagcaacatattcttttctaattaacatttttctttgtggccttcgttatcttttgagaaggccacagacttggatgagagggttgctgttctgaccacattggtggactggccaaaagaaaatttgaggttaaggaaaaaatgtgaactgatgctggaaagcaattgaagccttaggcttcaagttgtcttgtgaagagagttggtgagatgtatggagacctcatgtataatgttcggaaagagaatcaaagggaaatttcatgagagaataggagaagtgagtggatgtatatgatgttcttcggtttgaggatgatgctagagggtgctggaatgaggaactgccgctgaaggcaaagtctgcaattgtgtacattgagaggcaactcttcgagattgaaaggagtggatggaattagaggagtttgactgaagagtacctgagaagataatgggcgctcccattattgttctcttgagaaggaagagatttggttgctggttgaatggctaggaaatgagtttccacatgaggaaagggggagcaagcctgaacagaagtgactccaggatcatatgtgtgtgtgtttatgtatgttcctttttatttttttttcttttttccttggaggttgacatcaccatccagaggggattggttgcagtggttttttttgctacaaatctgagaataagccatttaataatacggagttggatgtctctctgctaagggccacatgagtcatggatgtgtaagggatctggaagttcatgtactatgaatcatagtcatcaactttgctccatgattatgtggaatactaaatagtaactgcgattggaggacagaggctgcttcagttggagattcagtggctattaaaggacagtacctatttacccttgtttcagagaaggaagctgttttatttgttaagcagatttgagggctataggacacaacaaattggaggggattagtcagagatggtgaatcactattgtatggtaggttgatcccttcaattagcacccttcaacttgctggatttttgctaagttcctacattgttttaaatttctttagggacttagaaagggaaaacttactttcctttgtcaattgatttaacctttgatcactgtgaaaacttctaaaaagtttcacctaatttttagtaaacactttatgaagatgatcagatctggatttcagtgatcaaaatttttcatcagtgtggtcttacaaattggattccatcttgagaatgtgttcagaaacttctaatagcaattgcccaaagtatggggatgactgaaaaagctctcaccatttggtaaatcaaaatgatcaaagatcaagaattatgggtttgtcattctctttggattaagagctttttgtatttagaaaagcaaagaccatatcaaggcaacaagctttgttgatgtgacttagctccttactaacaatccaattcaatatattccaaatagacagcattattaatcttgagtttcacttagataatcgagaaaaactattttatcgaatggggtttagcatgttaagtcttacagatagggtgcccaaaattctatcactaactgtaaacaagtttaagtctttaggatagtggggatttagtgcatgagtcacactgaatcatccaaatcatctacactgtgatttcaggattctaattcatctcatgaattaagcagtactgaatattcacaatatgccaaatatgatactaaattttaaatattctttataagattatgcaaatatctaatttgtcttttatactacatacaatcaaaactgtaaccacttcatttagaatgaatgctgaatggccaaatctgtatgattatcattcaaatggattatatgagcctttaaacaggaatatgcctaaaacacgtagaagtggcaactaaaattgggtggagagagttccaactaaaattgtgttctttgcgtgggaagccacttgggggaagattatgacttttgatagactccaaaagagagggtgatagcttcccaatcgctgttttttgtgtgcttgtgaagagaaaaatgtaaatcacatccttattcattgtacagtggcccagagtgctgtgggacttagttttgggtttgtttggggttcagtggacatttcctgaaattgtaaaggaggttttatttagttggaggggatcctttgtgggaaaaaaaaggaaaaaactttggaattccattccgttatttattttttggacggtttggaaggaaaggaatagactagcttttgggggggggagttagttattcagaaaattaagtattcttttgtatgtaacatttggggttgagctaaattgtatatgggagaggagccgaactcccttataggatttctggagtggttagcttccagataaggggtggtgggttttttgtttgtgaggccttagtagccttgtataccccctatatactttgtggctttttgcctcttttctatgaactctgtgcttacttatcaaaaaaaaaaaaaaaaaacatgtagaagtggcaacagtgccaaacatagctcgtatggttgtgttggtggtagtgacagttttgttggttatatgggtgttgggattggggggtggtgcattgctgctggcggttgtgggagagtgcatgggggaggtgatgctgttggtgatagctgagagacattgaatcagctggctttgttctaatttcttgcattgtttttacttcatcttggtatggtgctatagagggcaaggatataggagttgttagtggtgatagttaagaggaattgaattgggttatatatatatatagatacaagaatttaaaccttgaatttctccacccttccatcccaacctctggccacatgcgtttgacctagataagatcaaatttccatcagaaactgattaacacacaaaatgttcagccttgccttccactataagatattagagtgtaacataagatattagataaaaaacattgtttgatatcaattttgctgatgagtgtaacattcatggatgttcttcacatggacaataaattcggaaaaaacctatgatttttttttttaagatgatgaactactgttcttgtttgtaaaaataaaaataaaaaattcttctgacaacatttacaatatcaagctaaaccctccaaaattaaatttctgggaatattttcatagcaacttggtgaatttgattgctttgtcgtctcattatagtttcgtactatttagtattgtctgaacttctctcctgttagctatttatgcttggcatatcctttagcctattaataataataataataataatactaaaaaggaaatagagtaaccataactgtcttggttttctgcaatgtcttaaattttctttctcatttttaggtt

SEQ ID NO: 13070 - DNA, 12011 bp, Vitis vinifera
  Intron number 2 from transcript GSVIVT01036714001 (locus G SVIVG01036714001) derived from phytozome v7.0 (chr-ID chr1 9; pos 23412926 to 23424936)
gggtgcttgcttggtggatttcttctagctccagtggcggactcatcatttggccgtaagaacatgctattcctctcatgtctcactatgtctgtcgcagcgcttttaactgtcttctctaccaacatttggatgtactcagcattaagatttatcagtggttttgggagggcatcaattggagcttccgcccttgtgttatcaacagaaacagttggaaatgcttggcgtggccaagtggggaccatcggctttctctgttgcaccctagggtttctgtcattgccagctatggcttatatgaataggagctcctcatggagacttctctacgtatggacttccattccagcaattttctactgccttttaatccgtttcctagtctgcgagtctccaagatggcttttcatgcaagggcggaaagaagaagcattagcaacactggaaaaactagcacccatggagaataatacaagtttaaagtctttagacttgtgtctatcaggggcattgctcaaacaggaaaagatgaagatgaatcttcatttatcaatcaagatgttgctggagaaaagatgggcttctcgaagattacttgcagttatggtaattgcatttgggattggaattatgtactatggcatgccattgggggtcggaaacttagcatacaatctctatttgagtgtgacgcttaacgtcttggctgagatgccctcatcattgatcaccatgttctatataggtaaatggagcaggagaagctcagtgctggctttgaccaccatcagtggggtgtctagtataatgtgtgtggtggtaggccatggaatgaaggaattgcaggtggggctggagctgatatccttcttctgcgcctgcaccgtcttctctgtgttaatgatatacacacttgaactgttcccaacttgtgtgaggagcttggcggtagccatggtgaggcaagcgctcatgtccagcggcacggtcagtacaatattgattgctgcggggaagacgaatgcgtttttgtcctatggagtttttgggttgttgattttgtgttgtgggttgtttgtggtttgtttgccggagacaaagggcttgtctctttgtgataccatggaagaacaagagcacaaggaggccaatgcatgctgataatgttttgtctgatttgcttctaagatggattaattccagggagatgcattacattatagaaaacaaattggtggacatgtttgaaatatgtaccaattgctgtcaaacatagtacttgtgatttaagatgccactatattactagggaggctgtcctttgctcatcaatgtgccataatttaagtatgtttcctttttattttcccatttatgtaattgcaataataatgtttagaaggtatcctttgcaaattcaattgtaatttacatttggatctatcatggtaatagctccttgactcaagggataattgcacttcaattaatggagacatgaattcaaacctaatttaaaaaaagaaaagaaaagaaaagaaattgagatcattgtaggccgtgaaaaaaagaagaagaaaataacgtaaaagtacattacaaaaaaagaaaagaaaagaaatcgagatcattgtaagctatgaaaaaagataaagataaagaaaataacataaaagtacactacaaaaaatagatatttttttaagaaattttatttctatctatttttaaactttcaaaacaaatgttgtgggaaaaaagtaattttacaaaaaataattacaaaaaaatattttaatacaatcttatatatttagatctaagagtgacaaaatttgatacaatttataagcaaaaccacctattgagttgaaaataattgtattaggtttaaatttgtgttgaattgggtaatccgtttgataaatagttattttttagttcaacttgtataacaataatttgatccaaattaacctatatttaataattatgttgattaacttgatatattataattacaacctatttaacctatatttgacttatttaaaatctaattttgaataaataagccaattaagtcataaacatattaggttaagaaattaatcatattgactcaaataagaccgaagtcaatatgatcattaaataggacttcatgattaaataagttgagaagttaatcatattaattgaagaaagacatgatttgatctaattattacataaaacttgatgattaaatggattacacaacgcattattgatttaataattagatggtatttaagtttatacttttaatctaattattatttacaacaagttttggcatgatacaacctgccaacatgaattacaatccctaattagacccatcctattttcctaaaatataacaatactcttcttcaatctccaacgagaaccactcaaaattctaaaacctaattgcaccttcagtttgatcttctttttctcctcgacctcattttcttccctcctacactttccatcctcttttggctgctatctctataaatgggaatttgcatgttatagaactattttaagaactgtttcaccttggatgaccaggtcaaggtaatcaaaagtactatatattgttttttgagtttgtagccaaataacctttatttttaaaaaaagaaccaaaataagtccacatcagcattttatctttgacttttctttccattcaacccacttttattccaaaggcccttgttttttattggaaaccatcggcatacttttatcccaaagttttttttatttgaaaccataacttcattttctctcttcactgtatgcggctcccaccagcaccagcagttcccatcagtaacatctcacaggtaagtttttgaagcaatttaattttgggtaaaataataaccaaatatttgggtaaatggatttgaggagagaagtggttaatgagtttttttcctcttattttcctcagctttttcactagccaaacaaagaaaaatgaaacattaaaaataccaaaaataaacaaataatcaaatcgaacaagtggttcatgagtttgtttggcctcatttttcttagctttttcactaaccaacgaggaaaacgaaatattaaaaacacaaaaaaagaaaagaaaaaaagaatcaaatcaaaagcaataattaatgttttatggttactttccttgcaattatcaaccccttgttttatgcccacttttcctgcaatttccaacgtcttgtttatgcccatttctgtttgaaattttaaaaaaattaaatttcatttattttcaatctataaatgttattactaaatatgtgacatatttttgtttttttttttcttttagcacacccagtatttaatatttatattccattaatatttattttagatttcccattttggccaactagataattaaaaaattaaattagttaaattactacttaagaatggataatacatgtgtacatagatcctacaaatcttataatatttaatagaaagaagaaagaaattaatattttaattattatttttgaacttattaaattgtataaaagttgggagagtcaaggatgtaaatgataaaaatggccttattgggtatattttaatttatttttttcaagtattttaaatttattaaattggtaataagtcttaaaaacggactttggaatgatattgtatgaaaatgtaaaatatttgaaaaaaaaaaattctcaaaaaacacttagtcctcctttttaaacaaatcaaaattatattttaaaaatgttattattaatgttacttttaagtaaaactttcattaattacatgtaaaatcattaccaaaatgttatattattaaaaaagaaaaaaagaaaaaagaaataacactaaaaataaatttaatatatagaaaatataagtttttacttaaaatttaacttatttaattataaaatgtaaaaattgaattgaattagaaaattttaaaaattaacaagatataagcaaaagtgtattaatatgtctattccacttcctcctttttaattattttaatgagaaaagaaatgaaaaaaatattaaaatatttttattcgtaactattaattatgccgaatatgtacactttacatccatttttgaaacttatataaaatcaatttttgaacaaatttaaaaaattttccacttaatatgggtatcttaaacaacaacattttaattgttaatggaaaaataacaacattttattcaattttaatggtaataaataataggaaaatatattaatgaaaaacattgaattatttggatattaatgtgttatttgttatttgatttttgttaatagcaaaccctattattattatttgttatttcattacaaattgatgttattactaatgttttctattatgtaattttgttgttaaaaatgaaattgatttgatttttttggtttcttttataggtaaactatgtctaatttattggtggcaatagtttgtttttgtaatgggaaaatggtgagaatacaaaccgattttgattatgttggggatagagttgtggttgaacctattgatgtgcctcttgggaaaacatataaacaattgctagaaatgatatactcagtcactgacattaatagagaacatttttaattcattcttagttgtaagtatcttatgaaaagagagaataaattccaaccttgcttagtaaaggatgatagtggtgtagcttgaatgttagaaatgcataacaaatttgagatggatgaagttgagttatttgttgaacaagtaccgattgacttacaaatgaattcaccaattggtaattgcacacctttgttacttggtgaaaatgatggtactagtaatgttcaaaatccatttacttttgagcatagagtggacgaggatgaggaagatgaataaggaagacaatgtgatgatgacaatgtaggagccgaggatgttcataatgatgataatcaggatagggaaagcaattcatcttttttagctgttcgtgagacaattgaaaaagaacaaatgagatatgtggttgtggatgggaaatgatctaacttgtcaaacaatcaagatacaaaggatttagatgacctaattgaattatctccaatgcaatatcatctagcaccatcaccacagtttgaaaatgttgaaaacattggtcatgttatgtcaagtgattgggccccatggggaaacattcttacaggatatctaattggagagttcacaattggccaaatatttaattccaaaagagatttgcaatatgttgtaaaaatgtactctattaatttgcaccaagagtatatcgttttgtcatccataaagaaattgttggtcctaagatacaagaaagctgaacagtctcaatgtccttggagactttgtgctacggttgttaaagggacatctttatttgaactcaacaaatatagtggcccgcacacatgtgtcaatctttacatgaaccaagaccatcatcaactagactcaaacctgatagctgcccatatagaaagaatgattaaggcgtaattcacactttcaatggttgccattcaagcaagtgttgtagaaagatttgatcactagatctcatacactaaggcttcgaaaggtaagcgtaaaacattaactaatttttttggtgagttctataaatcatacctaaactatcacattttttggtgccttagagcaagcaaatccaggatgtgttgtaatttctaaaacattctcaggtaataagcgaaataaagaggtatttcaacgagtcttttgggcatttcatccttccatagaaggcttcaagcattgtcgtcctatgctagctattaatggtacacacttgtatggaaagtataagggcactgtaatgattgccatggggtatgatgaaaataatcaattgttttttttttttttttttttttgcattaattgagggtgaaaatgttgatagttgaggatgatttttggcatgtattagaaatcgagtaactcaaaagagaggtctttttgttatctttgatcgtcattcggacattatggctacgtttgctgatgtttatcttggttggtctaagccaaatgcatatcattggatttgtatgcgccatcttgctagcaactttatgactccctttaaagataaatgcttgaaacaacttttatgtagagtcgccttagaaactgaggtaaaaaaattcaacatgcatgtgaacataattaggagaattaatcaagatgcactcagctggttggatgtcattccctttgagaaataggcactatcacatgatggaggtcggcgataagacataatgactacgaatatgtcagaagtgttcagtagtgtgcttaaaggggcatgaagcttcctcatcattgcatttgttcaattgacattttatcgagttaatagttaccttgctgtaagaagagaacatggtgctagtcgacttacttcaggtgaagaatagactccttatgttgatgctaagattaatgcaaatgtcattaaagcaaattctcatgaggttgttttgtatgaccactttcaaggattgtttcatgtgaaggccagtaggagtagtaaaaaaatatcatttggtaggcaaacatatcgtgttaacctacgtgagcatggatgcatatgtggcaaaacactcatatatggattcccatgtagtcatattctagcggcatgtcattttcatgcaattgatttttgatcatttgttcaacattattatactatgcaatcgtactttagcacttggacaccattgtttgatcccatacccaatgagtactagtggccgccatatgttggtccaattattgtgcttgtagattcaatgaaatgtgtatcaagtggatgacctaaatctactcgtttgcataatgaaatggatgttagaagaggtaaaacttggttacatgtggtttgtgcaaacaaagtggtcacaattgttgttcttgtccaaataagaacatgggtgttgggttttcatgatgtgtcattgacattgtatttctcttttagcatagacacaagttcattaatgatttagttgtgtttaacttttcattggccttaattagctttggatgttgacattacgttatttgtattttggacaatacctatgttataaaagagactttgttgttaatttcaaaattgcaacattttgcaccaatgtgactaattatttttttaaaaaaaaattataggtattatgggagccatatacaacagtttaattgcacatattccaattatatgtcaagctgatgaagacatttgatgaactatgtcacctataatttgctttgatgttatcgagtggcatagactagagtgtgttttatgctagtttcgtatgcaacaagggatacctccaccttgtttgatagatatagagctacatttagtagaaagatgaggacgacatcagtatgattgggtgacattccatgctcaatatatttctctttgggctacttgttttgagcgtattgcgacaacaccacttgctattactaccatggatttttatgatccatatatgcaatggtatcgacgtatcatgcgacgcctaatcgcacctattttgcatagagatcatatgaggttccatagtacaacttctgccactgagttattggtgagaccatttgagatacaaaaccattttttaatgaatgttaaacttagattatgtgcaaatgcctcatgtttcattttcttatacaaatcactatcgtttcgcagatggctattttaaatgatttggaggaaactcaccgaattgctattgatgttttacgtgctataaaagaggaccatcgcatacactcaacacaagagtcatccacatcttccgggccatccatgagaccaccatcattgattacacctgttacagtaccatccattggaggtcgaagaagaggtggtcgtcgagctagtcaatgacatgtacctccaacatctactttggtacaaccctcacatctacttgtcacatccaccattcctttatttcagtcatgtatcattagagtcgccactctctccccctaatgtatccataccaaccccttcacctcgacctgagactaccataccatctaccattacccttgttgagccatatatatcattagacttaccttttctccctcatgttacatttacacagactttttcacctccacttccatctttaccccaaccatctatatcattggatgcacccccacctgttataaagtctattgcaccttcatctgttataaagtcctttgcacctcaaccttttcttaaggggacatctcatgctgcacgattacatgtacgggtgactaaaggacatcaagttccatgtgtacgtcgagttctaacttcatcagtctcatctgactcgacaactcatgtagatggcatgtcacagtctatagaaatggaaacttttcagataacatagatggatacaacaaatatggtcatctaccgtagatgttcacagcgaaagaaaaaaatttcatcatgtgggacacattgagagtttttttcatgtttgtaaaactataatagtttggttcatacatttaagtttatataaattgtcaattcaaattagtgatgttatgtcattcacttgtttccttgataatttatacaaaaaagactcaaatgcatcctaaggcctaaatgaaagaaattttaactaaacaaattgttacaaccataacttatttttctttcatgtaattaaaaaattatacattttaaccaagacataagttcaaatcatacttaatatggaataacctaaaatcgtaatcattggaattaattttcatgtgaaaatataaaattttaaaataatatgaaaaaataattttctttaattcatatgtgataaaatttataaaacaaataaatattttatttaccataaatatataaaattttatgggaatgcatgtgggtgaaattattttctcaaaatttcaaggaaaatatgaacaaaaaaaaaaaaaatttaaagtagtcgtaaagaaaaaaattattaaggataatttgaaaaaaaaaaaattaaattgacaatagaaaattgtaagaaatttttcctacttcaaaatgaactttgggatccaaggttcattcttaaggaaatttggtacatcgttaagaaatttttgtacatccataatttacacaaattaaaaagaaaaaacaaagttctaaaatctcatatttttttagttgatgtatgattacacaagttcctcttaaagatgtttgtaaaaccacagttagtaactgtgggtctaaaaaaatttgtaaaaccacagtctgtgattgtggttttcaagatatttttaaaaccgtagttactaactgtggtttataaatttacttttttttttttaaggatgtacttattttttttatgaaattaatataaaaggttaaatacaaattttttattttattttatgaaaaatacattttcttttatattttattttaattaaaaattaaagattttgagcaaacaaaaagttagatccactatcgatttgaaagcactattgaaatgcatgaataaaccatattttttcccattttacactaaaattataaagaaaaaagcaaagttctaaaatcttttttttttttttagttgatgtatggttgcatgagtttcccttcaagatatttgtaaaaccacagttagtaactgtagttctaaagaaaattgtaaaactacaatattctgtgactatgattctaataaaatttgtaaaaccacaattattaaatgtggttttatgattattatgataaataatattttaaaaataatataaaatcataataccattgaaacgaggggattaaaaatatttttgaaaccataattattaattatgattttaaggaaaattgtaaaaccacaatatgtgactatgattttttacaaaaaaaaaaaaaaagacctcatatgaatgcttacgtggatacaaaagattatttttacaaatattttgagatgagtattattcttaccattttatttttttctacaattggattattttttgcttaaactcttgttgtttttttaagtaggcaattattacattactgaagatagatgccatgcttatccaattgttgttgtcacttacaggtgtatgccaaatgcattcaaagaatcatgtagtccaaatttcaatttaattgttatcatctttgatttggacacaatggcctttaaaagtaaaagggtgaaaggatatttcaatttttaaaaattataaaaattttcagcttcttgcaagtgttctcaacacgagatacttgtgttgcttgcttttttcatgagtcttgatttgaaacaaagcataattgatggctatgttttgttgctaccctttcagctttttcaaaaagttagagcatatgttaaaacaagaaatatttttagataaatttcatatttaaatgaaggttatgaagaaataaagagtgaaaaaaaaatggttggaggttattacttgaaattcaacatgggaattggagtaattaagaaataacaatagcacatatttttattttaaggtgaattttgaagcacatttcaagattaatcttgggcaaactatacatggtttcaaagatcaagaaattaggagtctagccattgaatcgtgcataagtcaaagttaaaacaaagaaattataatcattcaaattcaattgggtaaagtagaaggagaatttcaaattttgaaagaatccaatttgaaatatcccatacttcgaagtcagccctttctccttcgacagtcctctttgaaatcccatttttgtagccctacactccaactatccaacaccttcaaattaaagtaaaacaaaattttctccggagttaaattctgaaatcccttttttcttctcttgttttcccttctcctctttccatctctccagtgcatcaaaatcgtaaataagatggatttgtttctattcaaatccattatcaatggttgttaatttttcttttaatttgatttttaatctcttgtataacaaatcatttgataggagtttctgtgctaccatttcagtagcagatcattgcatgttcatgtggtgaccactcttcacaaaatcgccattatcgctcctctagtacttcctttttcattaatttacatgggctaaatttctctgacaaggggtggcaatttgaattctaaggttgctttgtctttacttcatgatgggagcatccaccagaagattgtttatggactggtctgtgatgttttttccttgtttctattcattcctccctataggtaaattctacttaattccttggaatcctagagagcgcaatcatggtagattagaaatctgttgtttgtgtgaacaagaggagctagattcctaggaggtcccacagcacgaagccagccatctgtgagattaagcagtctgattaggaatacatttcttgtcttcacaggtcaatacaagagtcagcaattcattggttccggacaatcttaaggtctgattacaggctagatattcatttaatttgatcccttgaaacatgacaccaacaatgagaggaatgactcgttttgtacccacactaacagattatgacatacactattgcgcagacgagcttcgagaaatggctcgttttttctatgaatcaatttttatgattaggattgcatgatgggatccaacgtgtcctatacagctactgtacaagtaacattttcttttcctgtaagagagcatcttcatcacccatagctctcccactcagactcaagttcatacacatggcagatccaacccctctcctctcccaatcccacttggcc

SEQ ID NO: 13071 - DNA, 8301 bp, Vitis vinifera
  Intron number 1 from transcript GSVIVT01021218001 (locus G SVIVG01021218001) derived from phytozome v7.0 (chr-ID chr1 0; pos 2638295 to 2646595 reverse strand)
atccccccaccacccgaaaagactcgatcgagatcgtcgacacggaagaagagaagagattccgaaagcaacaacaccaacacccaccaccaccacagcaacaccgccaacaacaccatatcaatgacaaaccttctcatttctgatcggtacttgagtgaaatcctttcggagaagatatcaacacagagggatcgaaggcgggggcgtgtgggtgtgtggaggcctcatttagaaagcatctccgagacaccaagtgatctgtgacatatgtggtgatttatgattcttcttcttcatcatcttcttcttctcctcctcctcctcctcctcctcctcctcctcctcctcatgattcattctcatattttaaaagaaaagattacccacctcttcttcctcttttttttttccctttcttcccttctcttttgtacataagcatagaagaataatatgcaaaagtcctacgagggcttgaatattatatatgttgaatgcccacgaacagttcctgtagggtctcagcaccggagccggccataatttgcgtcacagtcaccagaattgggattgcctttttgagcttcattcaagttcgcttaagtgcatatatttatttatggggactgtaattttgtaatgtgaagagagaagaaagatttattggaagtttttgttttgttctgtgagaggaagaagaagaagaagaagaagaagacgaagaatgttatcgagagagagagagaaagagagatccaagttgttagtgtttgtgtttggcaggtatgtgtgaataatattgaaaggtgattttgctgcgatgattataccgccatttgaataaactaatgaccataatgccccatgatttccattaaggaaaatgattagcttcctcacaagccacatcaactgttcgtctttcctcccttaatccccatccaaatatccaatgtaatgcttatgttactcactgtcaatttttttcccctttccgtctattttagttctttccaaaagagaaattgatatacccaattttgttttttatttcttatttttcatttttctaattcataaattaaatattagagtgttattttattgatcaaagtcataaaattgatgttggattcgccttgatccatgatccaatgaataacccataaaaaataaaaaaacctagacccacccatcatgtattttgttgtatgggctcaataataaaaggtagttataattggtattaaggtgatcaaagtggctttaaggtagatgagaataatagtccccacaaaagctttttccaccaaatatagctaggataatgccctactagcttgcactaacaagtgggcatatgtctttaagtattttgttgttttggagatgattagatgatgccaatagcatcctataaaggtgaatacagtagagtttgacctttttcatctgctatggatgaaggaatagttgttgatccttttgagttttgacaaaggcctatcttctgatgcgtttctgttcttattttccactccctctgggccctatgaaaaggtccttccttccacatatcattgctatttaatctattgtcagatggaagtgggtcgggttagcccattttgctttaagaatgcttattttgctttgttctcgaattgagaagattagaaattttagctccatatttttatattttcatgtaattagaggttgaattttaggttctgaccaccatattattggatattaaaattttatgtagtggttatatttgattgattatatataatataagatatgataagaaataaaatatcatattctatctcatatttgattagtaacgaaataaaataaattattttattatttatcttatctaattaaatatgaaatgggataaataatgaatatattatcatcttttatcattttttatattattttcatataaaatacgtgaatcctgtgttaaagacataagatatccatatttcatgtattataatttttatttttatcaatttttttattttttttataaattaaatttataattaaaaaaactaaaaaaatatttataatatatatatatatatatttatttatttataaaatttaaatattattaaacataatttttttttatcattttaaaataaaaaatattaaaatatgatataatttgtattttaaatatgaacaaataatatatattccatgttattatttttattcatttcataaattaaatgtatcttgaatatttatcagatatgagaagatgtgaattacctaagtaaagtttcatacgttaacttgattttgaaaatatattaatatttagaatgtctgtaaatattttttaaaataaaatttcatatatatatttaaataaaggaaataaaaaacgcatcctacaaggctacaacacctgaattttctccacatttttgggcagttattggttgatctgagatcgacccataccttgaatggctcaaaatataaagagattttcttcatagtttatgtggtgtagattactagaaattttttttttataaaaagagaagtggaagtgggaaatggaagaagtaatgattcagacggcgcccctcaccatgcatccattataggggtcgttgtctccctctttagctttgatctctcttgtcttatcttttcccatctgccttacctttaattttaatagttaatgcacccttccttctatgtaagttaagtttttaacctaatctttttttcttttccttttttaaatttctagaaatgacaccttggacaaaatggaatgtcgaccgcggcacagccagtcgcagatgggaccatatactcttaacctaatgatctttgtcaccttaccaaacctatcattctttcagcttctttttttattatttattttttattttatttaaaaaaaaatatttcaattttaaaatatggtttgccgacatgctttttatctatttagggaatgagcctaaacgtactttcatctatttaatgaacattatggaccaagcccaagtgatttattattaattaactttaacctttgattgctatgtattatatagtacgtggaatattgaatattgacttgttcccaatcatagttggcctcaaatcttcctacatttagtcacatcatttttatttaaactcgacactagggttttaggctttaggcgacagtaatgtgaaattatcttggataaatagaaaaccaaaattattcattagtattgaagggtggataagataaaagtgtaaaaaggtatttcaagttataggattagggttttgctagagggtggatcatagaaaaatgtaagtaatagttgttcatggaaaacctaattggtcaagataatattgaaaggtgtggtcttacttagatgcacatggttttaagttcgaatcttgttactgataataccttgatttacttaatgttgattgttatgaatgtgatcaacacttcaagatttgagctctcataaagagttctaaaaatttaatcatagaaggtttctcgagttctgctacattttcaaagaaacgtttattaaaatgtattgtgtctatcacgtatgcatttagaactcattgttttatatcggttattatatattttgattttattaatttgtactttaatatcattttttgtatctaatttcatttattctttaaatttttttcatgcattttttatgttaatgatcgaaagtttgatagatgcaatttagtagccaccaaattttaccatttttgtatgattttacagacaaaaccaaggtgccaaagaagtacctatgaaccccgggaaaaatggtactttcacatctgtaaaactatacaaaaatggtaaacttggatgctgctcaactccatcatgctgaatcaacacatgtgaatattttaagttactttttcttatacaaatggaaaaagcaaccaatgtgagcatgaaatgaagatagaaaatcaaataggaggtccactagccaaaaataatgcattgatgtaagggttgaatagcttagagatgggagtggtcctgcaaaatgtgcacaactaacctcctctttgtttttggaattagacataaatcctttagaaagtgcctttatatctaaagcgcttggacactgcaacaccaccataactttttgaatgatctccaagtatcccactgagtggaccactcccacaaaccactaaggatgtgtagcatttagtttttttacattcagccattgatgtagacccatctctctactacccttcatccatcatctacttgctttgactttgggttgggtctaagcaaaatataaaaggtttgatgtgaaaaaatcactaaagggaagggctttttgcctcccattttatcttcattgtttgagccactttgatcacttttgagcttgttggattggggggattgatgatgtcaaggacttggagattgagataagaagttgtagacccattaaatagaatctttaaaatggaaaatctacaagtacttagtacttagtccccaccatcttcaagattttctagagtgatctttcaatcgattgttcttttgaatattgatggcctatattaatggacttcttcttcattgtggttgtggatgaactttgattaacaatacctttgaaaaatgacctttttgtttagaatgaagagaatttgggagtatataggaatcattagaaacttttaaattccacttcaacatgataatttatcggtggttagagaaaattttatatcaagaagtgacacttatttattttaaaaactatttcaaataagaaatgaagaaaggtaagaaacaaggtaaggaataattttgatatgcaatacaaatatgaaaaaaggaaaataatatatatgaaactataaggatactggatcggtattaatatttacgacttgaagtaatgaaaccttaaactttgaatggttgaaaattaaaaatagaatacaaatttctaatccttaaaaatcttgtttggatggttggaggagaagggtttcctttaaattaaacttattttgattggatgaattttaaagagaaataaaacaaataaaaaatccttagattatgtagggtttttggaaagtttgagaaataacatgagagaaacaaaatagagaaaattaataaaaggaaagaaaaaatgaaaaaaaaataaagaataaatttaaaattaataaattatttttatatcctatttaaaaatcattttacttatttaattttttatatagacaattcttaaattaagattatcattttgaggtgttccgaatttgttatatatatattcaatcaataagaaagttattaacttataatattattatattacaattagatttgctcacaagttagaagaaacgttccttcttgtcttgaaaaattaaaattttgtacaatcatcggttccaaatcgtataaatattattcgctttgagtctaaaaaatgacctttatatatatatatataaatatatatatatatatatatatatatatatatattgtgttatgagattatgagattaaatagataaacattttttataaactaatttcaaataggatggcaacttatttatcataaaactttcatggtatgtattagaattatgcatgtcatgcaactctgatgtagaccacataatatattgagtgatggatttggtgcttttggttccaaaatataacttatccttaagatccacaacaaatcgtaagaaagaggactaaatagtacgacgaaggagactcatcatgatgaatccacattatgtacactatgtttgaaactgcttggctatttgacagcattgtaggtggtggacaaggaagagacccaagggaaacatggaattgagatctgagcaccccatcgtgggttgttggtgggggtgggtttcgagggcagttgggacgcggcgttagtagatatgaggtaggtgctggttatggaaaatggaagatccaatcaaccatacctccattggaaacttttgtacaaatgttgcaaaatttgcaatataaggaaacgatacatactctgataatgcaacagaaagagatgtgggggatgaattgaaatgggtgctttaattatttggttcctttatatctagtagatagatatgtatcaaagcacatacacggcgagattcaaggcatggatataggttgaaaaactgtatcaaggagcagatcagatgcggccattcttcacctcactgtaacgctctggagttgactcaatgtttcaatttctttcacaacatcatatgaggattgactcacaaattgggggatctctttgtcaacttttatttttattcttttcagaattttacgcttatttcaaaattattctttaaaaataattttgagaagatattttattttattttatttatttattttaataaaaaaagctattgttttctatctcgtactgccattctttgtcgcttaaggtacaatagtccctcgtttgaaattttgtgggaagaaggagtctggcccttccatcgtgtctttctttggtccaatcctaactttgtcacggttgtgggaagaacagagaagggctccctgcttagcccctttttcaaatcatgagcccgcgcgctgcccctcactcgaattattttaccttgaatgccttttaagggcgaaataaaagacttgcactcgatccactatttattagtttttcctatcggcatcttggggatgtggaggtcaacgctttggcatcagatgacactctgcctctctggttgagtgctccaaatgtccaattttatttgattttataaatatgatcaattatttgagattatgattatataataattttattacgcaaattatgccactatgcaagaaaatcttcaatttttgtagaagcgaataaagacaaaatagtgaggaataagaaaataaggaaaaaaaaaagaggggggtagggtgggggagggcgacaaggcgggttagcagaaaaatccaacccaaactgttttaaccctatccataaaaagcgaggagtctcacatgagacactccactcgccgctcgccactctcccaacattcacgcgttcctctgcagtgcccgcatacggttctgcaaagacagagtttgcaaaccggagcctcttcttgcgtcaaacggaacagcatatgttctaatttctaaatactaagtcaccaataacaacgccatcaacatgactcctaaaattggaaattaaacagtcagtccgtaatggtccaagcccaagcctctccaagccgagccgagtgggctccccaattcccgacgcaagttaaccatgccaacgtaacctccacgcgctttcgcccccggcgacctcaccgtaccttcctacacatgcggctcacgcgtctgtcaacagccggcgcatcatcgccgctcatgttctccctcacaccgacgcaacttcttctccttgttccgtatttgcccctaaaacccatccctatctaccacaaacccaaacccacaaccacatctctacatctatctctgtttcaccgacccacctccatcaacgacgatgggtgacctcaccgattctctccccccctccaccgcccctcagcgttcagccccctttcgcgaggattgctggagcgaggacgccacttccactcttgtcgacgcctggggccgccgttacatagaactcaatcgcggtaacctccgtcagaaggactggcaggaggtggctgatgccgttaacgcacgtcatggccatgtgaagaaggctcgccggacggatgttcaatgcaagaaccgtatcgacaccattaagaaaaagtacaagatcgagaaagctagggttaccacttccaatggagccctaaccagttcctggcctttcttttcccgcttggatgccctaatcggacccaccttgtccgcaaagaagccttcctcggcttctccgccattagcccttcctttgccctactggaagacgccttctccggcagccccatcggcgtccgttggggctctgccgcagaaacgcccgatgccggctgttgatgattcgtattttcgccgcaactattcggccgttgcagcggcggcagcggcagaggcagtggacgaggacgaggacgaggaagaggaggaagaagagtcgaggtggagcgctgagcgcagcggggacgtag

SEQ ID NO: 13072 - DNA, 1138 bp, Vitis vinifera
  Intron number 3 from transcript GSVIVT01001175001 (locus G SVIVG01001175001) derived from phytozome v7.0 (chr-ID chr7 ; pos 1063411 to 1064548)
ttcttgctcattactgtagcatcattactagcctggtttgttatttattatcgatcatctttttctgtttctttcctgctcatttgtttgtgtgggcctattggtgggcgaataggcatcaccgacatctgattataattttgcatacagatgtatatatgtttaaattttttctgtagtcctgggttatgctagttttgtgtcaattgtttgtgccctttttatttttacattttccctttaggatttaagcttgttgtcataggtttctcctctactactagtttgtttcaaatccagtgaatcagcaactagttttttgataggcaaataagaattttcacaagatgcatacctaaaagtaccaaaaagaggatgaagcccacaggatgcattcaagaaacattcaaaaagaaaaatgttgagactgagataaggccagtccttaggctagaaccaaactctcagtgaattcaagaaggacaaatccctgtaaggctctgttgaattatggaaaatttgaaggaaaggaagaagaaaggcaaaatgtatgaagggaatatgactttaagctcaataaatttttttctcccatgtttcttcaatctaattcctcttttgtatagaaaatgaagcatttgaaaatatactaatttttaacaatgttctttatgttttatttttcctttataattttttccatggcaaaccaaaagacagaatttaagattttttcctattctttttcccttcctctgctacttgtgcaatacaaatggagcgcaaatcaccaatatcaatctctgtgaatgagaaactattgtctaattttcctccttaacaacagagaaataggtcatcaggatagattttgttgcacttctccccatttcttcatagttcatattcactcttttgaaacttctaaaaagtgttgcttcttcaagtattgtggactaagataatgtttaatttattttgtcttactccaacatatgctgtcgtttttatttatttacatattttcctttgaaccttgttgtgattaggcttatcgctgggtttgatgcctaaatcttctttaccaatgaggtgattattcttaatagcagtatatttgtgcaggaattctcactgg

SEQ ID NO: 13073 - DNA, 22314 bp, Vitis vinifera
  Intron number 1 from transcript GSVIVT01026088001 (locus G SVIVG01026088001) derived from phytozome v7.0 (chr-ID chr1 8; pos 24717907 to 24740220)
ccggtcttccgctcctcccatttgatataaaccaggtgagtttcagaaccgattcttctttctcttctgtgcgtctctctttgtttttctggaaagggttttttggagaatttcttttctttctcttttcttttacgaaataattttgctagacgtgcttggaaaatgttggtcttgattctttgttggaaaatgtcttcctggaaaatgttgtctgggataataattttttttttctattattatgggggtttgagaatttctttttatttttagggaaataatttttctagacgtgtttggaaaacattgatcttgatgagtctttgttcgttatttgttctcgtggaaagaattttctggtatacagaaaaaaaaaaatcggttttattatgggtgctggataattttgtttctaagaaaataatttttctaaatgtgtttgaaaaatgttggtcttgatgattctttgttagtttgttttcgtggaaaatgttttctgggataataattattatttgttttgttatgtggtttgaagaatttctttgttcttttttcataaggaaataatttttccagacgggtttggaaaatgttggccttgatgattctttgttggttgtgatactcctatgatctatctcttcgccatgttttactatctgaagttggattgttgcaagttttatttgtttcaatgaaaaattctttgttttcccggatgggtgtttggaaaatttcttggaaaatgattttcctagaaaaatattactccaagtgggtttggaaaaagttggtcttaacaattctttgttcatgaggaaggctgtgattctcatattactttgcaatgttttgactatctagaattggattgctgtaagttttatttgttttccaggtggttttttttttttgcaaatgacaaattctttgtttcttgtatgggatgtttgaatgattttctttcttttaaggaaatagttttccttagagtggagtgggggcctcatgtttggaaaatattgtctttaacacttgtttgttgataaagatggttttacaacttttacaacctaagattggattgctgtaatttttgtttgagctctagaatttctgctcaaacttagatgagatatgtgttggcttattttggtttgtgattgaaatttaccatattttactttaggaattgaggagaaggatggtgattaccatgaattaatttgttcatatttattgcttggtaatctttgaactttctggttatattcattgctctatcaattcctaataaatgacaaaaagaattctgtcagttaacctttgttacggtacattctagtatccatgggacaatttaagatcttgttaaattgtcagaatttatgctcatataaagactagttttttgctacatactctactttcttcttatctgcacttcctaaaaataacttgtgaatgagagtaatgcaaaaaaccattgtttgccatggaactgatttttaatgccttgtaacattgcttggtgtttgcactgtcttggtacttttgtaagaatcacaaagttcttagaatagtatacttgaaccttgaaattgatatatattatgacatgtcgcaccatggtgctaagttacttggttggtattgagttcatatggtctgttaagaattagcagcaattggtcaaagtaatattgaaactttaataatgaatatatgatgggactttttggtttttgttttgaattatgggcaattgtaatattagcatgctgaatgtctgatcgaaaaaatatactgatggagcataaaactagtgtcaaacaattggaaactagacaacttggtttcctttaacaattaactcaaatccatgatgagccatgcagagacaaacatctccttcaaatatttcatgactaacttttttattatcttggttggataacccataaggaaagagggtagtaaagagttaaaggcactatgaggatgaggaaaaccaaaatgataaaaataattaataaaaagtaaaaactgaaaatagaaaattgtttttgagtttttatgaaaaggcaatcatggattgtaatttatagaaaacatggtctaagagtggacgggtgggtggaaaaggaatggaggcaatataaaaggcaaaagagaatggaggggttgagctcaagtgggggtaagagtggattgtaatttatagaaaacatggtctaagagtggacgggtgggtggaaaaggaatggaggcaatataaaaggcaaaagagaatggaggggttgagctcaagtgggggtaagacaaggtgaggggtggtcgtttgctttttaacaatgcattgattatgtaccctaagtacaaagtgttgagctacaatgataacctattaagcccagtgttgatctataaggaaggcctagctagaactagagtagaggttgtgctggacctagagtagaggtggaaagataacaaagaggacatgtcataatgatgtgaggtgttgtgattttctaagtgatcgaatgaaatagacaccaataaaacctataactttagcaatgtggaaacacgtgggttggttgagaaggtcccacacatatatggtctatttgtatcttgttttactcgcttagatctcttggttggttgaatttttaggtagaagatttttccattaagattcattaaaaaacacttctcaagtacttacatcttaatttaagaacctgatttaagcattggaaactcttcattcttgtcttgtatcaggtcttagacttatcaaacttgaacattaaaaaaataaaaagagaatgattttgaaagttctaacacaactaaattggaaactctccattcttgtcttgtatcaaatcttggacttataaacttgaacatccaaagaagaaaaacaaaaagaatggttttttaaaagttctaaagccaactaaactaaacatgagaacacttgtgtgctataacaccaaagaactgaactgctacacacaatgaatctgccgaaaaaattagctctggggtactattgaatttctccttatgaaaccgacacatagagtcctctatcatattcaaatatgaccttttatgtgttttacaaaaccctaggttcaaggacacatggtgggattgctggagtcaaacaaaattaaacagctccaatgcatctccacttggtgtagctaccccacaggtaggcacaaaagactgaccagggaggggcatccacttgaagcacccaccacaaatgggcactcaaggtggcacaacaaccttgttttgtgttgtatgctgcaaatctttgctttgccttgctgcttgattgattctcactttgagattttgtgcactcttaaccaaagatgaattccatgtggaaacttctagttttggttgcttggtgatgcacctggaaaacattgcaaaaagctcaaagaactcgagaatacgccacattgggagatgacttaaactcgaggaaatgagattgctccaaaatataactaaatattgatagtaggagaagttgagagagtttactagtggttcgagatatagtgaaagttatggcctttttagagtgtgatggtaaacaaggatttatatataagctcacgaggagaaattgtaaatgaaaaaatatcatataaagaaaatgaaaacaaaattcgaaacttaaaataacattgtaatatatcttaaaataacaaacttattaggagaaataactcataatggaaagagatgaaagatatgcaaggaggtggaggctttgaagcttacatttgaaatgggggttacaaatctagagaaaatttttcaatacttaaaaactgaggccaaggctttctttacaaaagatttagaatcttgataatatacactattgagtattcaatgaatggtgaacaataaaaataactttttttattgtagcttcacacttttggctttttcttggagaatctttaatgtaggcgcacatgctaaagaaaatcaaacttttgacttaaaaattggatagagcttgtaatcttagacataattactattgttgaaaaattttatcctgacaaatctaattttgctttatgtgcaatcttatttgaaacataattgctttcattgaagaatcttatcttgaatttctaacgagggaggattccttccttcacaaacatagtcaacctctaaatcaacatcttcatcttgagagaggatggggactgtcttggaggagcttttgatattccttcatggtcttagctacaacatgttgagcttggatttgttgcttcttaagaaggaactgagggaaaggcttttgaatggtcagggcgatataagaacaaacattgtggaaaaattgatagttccttgggggtaatgaaaggtttctgaaaagtctcaaaaccttgaaaaaagatatttgggaggattagtaggaccaaaataattccaccaattgtggaacaaaaatggcaaggataacttaaacttggattgggaattgaacatccatgaatgatggaagttcttattctgaatgagaaaggcattaaaccatgccccttgataatcctaaaagttaaaaaatcttgacttaaagggtttggaaaattcccttgaatgatgattaggattactccccactatgaaactatggggatcttaaggggtacatatgattaggattccctcggaaaattctcttggataactaggatcttaagggtttggaaaattccctcagcccctattgtgaaattgtaaaattaggatatgacaagtggagtattgaaaccctaaattattgaatttatctagataactcttacagggttaatccataaggataaattcataaaattctattcctagcgatctctcttagggtttcaatattaagattttttttgcttataatgagaattgttagaaactagtgcgggattgacaacctccacaacttgttttcttaaataagaagaaatgtatgccctttggaatgtaatgctcattcttcttccttccaaaaaagaagtggtggtcatggcacgcgtcatgtatcttggcttgggttgtggcacttgtcacgtgtcttagcaggggctatgacacgtcacattgtcatggcatggttggtggcatgcattaggtgtctttgttctggccatggttgtggcactcgtcacatgtcttagcaggggttgtgacacgtcacaccgtcgtggcatggttggtggcacgcattaggtgtcttcgctctggccatggcaccatggcatgggtggtggcacgcgtgatgacacggacaatggcatgtgcgtggcccaaacggtgtaactcatcctagcacagccacgcgccacgcatcatgtgtacttaggccaccatgacataggtgaaggtggcatgcgcagcgtcatgcgtcctggcatgcgcattatggcggccacatgcctgatggcatggacggtggcatgtaagatgtggatagtgaccatgacacgcgtcacgtttcttggaacgggccgtggtaggggtcatgccacgtgtcatggcatgggcagtggcatgcctcatggtgtgttggaccatggccacgcaccatggcagtggtcgtgacatcttggcacacatcatgtttttcttcacataggtcgtggcaccatggcatattggtgtgcctcatggcacgggtggtggcacgtgttgtgttttctctggccatgcaccatgacaatggttgtggccacgtatcacgtttcttagcatgggtcgtgccaccatgggatgggtcatggcatgcctggcacggatgggaacatgcgtcacatgtcttggctcggggcatggcactatggtagggggttgtggcacgcatcatctcacaggcgatgatacatgtcatgtatggctcttggcacgcgtcctcacacgggttgtggacgtatgtcttggcgtcttcgtaggggttgtggcatagatagtggcatgtgtcacatgtcacgtgtcttggcacgggttgtaacaccatggtagggggggccatagcacgcgttatagcaccatggtaagggattgggctgaggccccatggtagtggtcgtggcacgtgtctcgtgtcttgactcgggctgtggtacgcgttatacgtcttagcacaggtcttggcatgcgtcacgtatcttggcaagggcagtgacacacgtcacgtgttttggcacgggccgtggcatgcgtcccatgtcttggtagggtcgtggcacgcttcccgtgctaggccatggcacgcgttgtgtggcactaccgtggcatacgtcacgtgtcttggcagggtcatggcatgcttcctatcacgagccatgataagggcaatgacatgcatcacgtgtcttagcaaggttgtggcacgcttcctagcacgggccatggcaagggcactgacacaacgtctattggcaaggtcatggcaccatggcatgggtggtgtggcatgcatcacgagtcgtggcacagttgtggcttaaacgggtcatgccacaacatggtataggtgtgtcttgccacgggccacagtacatggcatgtggatttgtgtcttagcacaggccgtggcaccatggcaggggtggtggcacacatcatggcacgatgatggcacgtgtcatggcacgggtagtggcacgcaagtgtctttggcttgggccatatgatagtggtcgtggcatgcgtcacatgtcctcaggccatgacaccatggtagtggttgcgccacgtgtcttggcatataggcgtggcatggcattgctaaggcacttgacgcacgccaccgctcgtgccaagacacgtgacatggcccttgtcgtggtgccacgacatgtgatgtgtgctacaactcgtgccatgatgagtaccacgacccctccttatctcctattgtttagctaaaataaagaattgcaatggtccttgcggatgctcacgcaatgtgatttcttcccagaggaatgtcaaagtgaagaaatccaaccatctaattagtgacgcgcatgaatggattaacaagaatcccactatccttgtctactatccaacgaaaccatagccaaaggaaaggggcttggcggaatcaacgggaaaagaagaccttgttgagcttgactctagttcgactttgtgaaatgactttagggggggtgggggtgtaggataactagaaacgacgaaagtgaaataccactacttttaatgttatttttacttattccatgtgttagagaggtagggagcatcccctcattttggacccaaggcacatccatgcgcgtcgatcctggtgaaagacattgttaggtagagagtttggctggaacagttccagctcctgactagtttgtgtaggagtggccaaactccttttcattgtcaagtccttgactagcaacaagctccctaaacttaaccaggtcggctttcctaaacttcgaagaagctttcaacatcacttacacgcctttttctcggagcaattcccatttcattatgctcaaactagccaacgtactagtcttgatcaacactttcgctacgatcatggacaaaagtctgtgacaaaatcctaaagtagaacctttgctcccacttgagcttctcctcttccacttgagtagtttcttgtggaattctttcaagtcttatcaaaagatccatcactacactcaaggctcatttttgccgacttctaagtgccctttgctaaatagagactggaataaacttttatttatgggtgttgggagaccctcaacccttttttattattagtaagatagattgtcttaaatttgtaataggatcattttaaacttggtttttcatttatatggaacctcttgaataagacataataatagagcagatctgtcaaagaatactttaccatgagctcccaaagcacgcttagtcaacagttaatctctagcacaaagtttaccagtatgaccatgtgtactggtttcattgtatcttgcctactcctctttaattgacctatttgtacctagctaaaatctataccttaggcttaagggtcctaaaccaatatcccattcttcaaccacagggggaccttttttcttatcatcatcaacaaactccaaaacatatcgtgtatcttgttctttaagcattcaaatgccttttggagagtttcagtagtttccaaaccattactttagtgaaatgatcccaaaccttttaagatagcttagtaggctttctcttacttgtaccctttgatggtaatgaggagctaagagtgtctgttgtcgttcttgttcgtgtgctacttgtaggagtaggcatgctactagacaagttttcttttagtcataaaaaattgtaaaaataaaaaagaaaaaaagaaaaaattaaattaactaatgtgtaatgaatagagaaaactaaaaatatagttttaaaaaagaaaataaataaaggaggatatttcttttaacatttcttttatactttactatttttttgttaattggataaaatttagaactatattaatattataagaaaatttctattatgagcatggttttttgtagtattcccatgactatggtggaccatcatctttttctttaaaaggcacaatgagtaatggagaaaggcaaaccacactttaatttggattcaattgttagatgttatcatattttgtcttttatttatatgatgcaatgtttgtaatatattaaattaattttattaattattcatttaagtagtaacattgttgaaagtttgctaatgctttcttaaggtaagagcaataaaagcaatacttgtacatagttttcataccaaagtagctattaaaaggattttatgtttttaaaattgaaatagcaaaaataaataattttaggaaaatccgtttagaaaattttctatgtaaatttgaagtttttggcttatttaagtaaacaagtatagatgatgatttggtgaaaccagctaaatctaattttaggttagcaaatttgattgaaggagacccaatttccaatgttattcacttgggaaggatgacttcttccataagggagatgttccatagtcaatgccttattgcccttgctatttatttaattaaatgaaaataaaaacatatgaatgagttactaaattgttctttttccaaagatttctttggttggggcagttaggaataaaaactagatatctttcatggtgagctaagctatggaaaaagtaaggatgatcctgatgctctcaacaaatttgataagccgctaatgaaactttccttgtcaaagataaacaaactccttggctagactatgacttaaacagattcctagagtaattgttctctaaactcattttttccaatctcaatcacaatagcataactggagagtgaatgaagaccaatttagaaggttaacacaagaaaaaaaaattgtagatgattttgtagatgaattcaaacttacacaacaacactaatttgttttgaaaaaatgatcgttccaagaaatgttttgtcaatttggagagaactttcataggagagtataggggcggattagagcttcatgtgtagttttccccttttcatataggtatgtatagtacgcaaaatgacattgatttaataagaccaatgtatgtatatgttggtttggttcaatccatttggattatttttttctaaaccaaacaccaacttaatcagttttgctactcttaaaacttaaccaaacattttcaagttaaaaactaaaccaattaggtcggtttggatcggttttgtgggtttttgggatttaacttactttcccactaaaaattcccttgaactctttaggttgaacataaagaagaatatgaaagacaacttcttcctcccaacttcccttaggtgaaccttactaatctttccttataggctccaaccaaacccaacttaattatagtactatcaaaaaggagattttaagcattgttttatatatcttaaatttcaaaatggtctttcaaataaaaaaattttagtgtatgttgattgcaaatcaacaaaatcagttttgcagaaagatattaagaatatagcttccaattatatttttgctagatgacaagttaatttaaatattttatttttgaattgaatattaaaggaaaaaaacaactcagtccttcatttcctcaattatgagttttcgtaggattcacgagatcatagcccctaaaaaggcaacccaaccctttaaattatgttatcaacgttctaaattcaaagctcttcaaagcaacttaaagaatcctttagtgtttcaagcaccgtgaaactcccttagagtctttagattgagcaagaagaagaaaaacaactttctctttttttcgagtattccttctccttgtggccctatcgctatcatttctagtaagttcttagctctttatcaagatcttttggatcaacccaagcctatgaagaaataaatttcccatttattttagggtcttggaccttgaagtaggtcactcaggcttctttctctcaaaaggaagttgcattttgtacttctttaggtttaagaaaataagttgtggaagttgccaaccctgcaccaatttctaaaccacacctttagcaaaagaatttaaatcaacctaatatgattattgaaaaaaaaaaattaagccaaaatccaacgatctcttaaaaaatcaacaatagtatgaatttattgtggttgatactaattctatcaaaattaaacatcatctataaatttgataattcgaagtttggatactccacttatcatatccttaaagtcctcacaatttcccagtagggaggtaatcctgatatcctaatagaattttttaaaccttctaaaccaaaaaattttaaatattgggattaccagtgtgcttggtttaatgctttccttatttagaacaagagcctctatcattcatgggtgttctatttcctattggtttgacatttggtagagttattttggcccaaccataataatcctttcaaagtctattctttagggttttgaagtccttcaaaaaaattatgttcctcgcaaattagcatggataatccaattgtcattgaagaagtctcaatagtttttccttcactagaaagaacttttaagacaaaatggtgggatggattgaagaatgctgcttcaagcctaaatattaaaaattttattagaatcatgcccagtccctaatcttggagaatatgcctctgttactcattaagaccttaaatatcaaaatctcaaagacgatctctcttttctctcccaagaagaagatattgattcaaaaaagaaataaagatcaaagtcttcatcaaacgactatcactaggaaaatgaaaatgattgcgaatgaatccttcctcccattagaaatcaaagtaatccattattgcctttaagaaaagctccactaaaagcaagattcgacttagactataattgcctttaagaaaagtttcatcaaaagtaagattcactccaagttttcaaacaaaagtcaaaagtgctatggtaaaaagtgaattttatttactattcaactcacatgattcttaagatttctatttaagggggctttaccttgggttcgaagatgcagttttcctatccccttcttcataaatttataatccccttattctctatcctctttgaatgtaagcaaaagaattctcatttggagtcttcttgtaagttatctctttcttgcaagatatttctttaagatatgaagatgctttcatattaagttttaatattcatggttgcttattttatctatatcagtctatgttttctctatattttctttgaagttagatttttagcatcatttactcactcactctttaccacattgtgtgtgtgtatgtatgtatgtatgtatgcatatatacatgtatatatatataaatcaagaatatattttgtttaatgtaagaggtataattctaaacatcatgatcttttttaccactttgtatgaaaaatactgtgaaaagagagaaaagggagaatccctaattttttttattaaaaactaataataatacacattggacttgggtatatatatacatgctagtgggacccacaatacaataaggaaaaaaaaaaaagtaaataactaactaactatatacactatctaacactcccccttaagttggagcatatatgttatatgcaccaagcttgttacaaatgtatttaattttaggacctctgagagatttagtaaaaatatctactagttgatcatttgaattgacaaaactagtcgccacacattctgatgcgatcttctctctaatgaagtgatagtcaacttcaatgtgtttggtcctttcatggccggggcaggagaaggcaaagggataggaagtgagtcagcaggtacctcggccaaagaagggggaacagcgacacgatgacggcgatgataaacctgaagtgggcaggaagacactacatcaggtggggagataatgggaattacgacttcagaaacaggaagagactcagaggtggagaagaatggtgagtcctcaaagaaggtgacatcagcggagacaaagtagcgatgagtctcagaggaataacaacgataacccttttgaagtctggagtatcccaagaagttgcattttgtggttttggcagaaagtttgtcctgtccagaagtgagaatatgaacaaagcaagtacaaccaaaaacacaaggatgaaggaaataaagtggttggtcagggaaaagaagggaatgaggaatctgatcgtgtaatacagatgagggcatacgattaatcaaataacatgctgtaagaacagcgtccccccaaaaacgaaaaggaacgtcactatagagaaggagagtacgagctgtctcaacgagatgtcgattcttacattcagctaccccattttgttgaggagtatgagcataagaagattgatgaaggatcccatgttgggacataaatgaagtaaatggtgcagaaaaatattccttggcattgtcactgtgcaacacacaaatagaaatatatatatatatatatttctaagtaaacacatatattaacaaaaggcaaaaacgccgcatagcatacaaggagtatatgaggcgatgaaggcctcacaacaaaagacaaaagagacaaaaacccactaacccttaaatggaggctaaccactccaagaatcctataagggagcgtggctccgcttcactatacaattttgcccacccccacacattacaaacaaaagaattcttaattttctgaatagctaactcccccctcctaaatgttaatctattcctctccttccaaaccgttcaaaaaataaataacggaatggatctccaaattttctccctctttttacccacaaaagaacccttccagctaagaactatttcctttacagtttctggaaagacccactaggcaccaaacaaaccaaggacaatctcccacaacactctagccactgtacaacgaatgagcaaatgatttccattctcctctttgctaccacatagataaaaacgattagggagttgccatcctctcttttgaagcctatcaagggtaagaacccttccccaagcagcttcccacgcaaagaatgctaatttagttggaacattctccaccaaatgccatttttgggaaacatggagacgctagggctgatcagcaagctatacgcttccttaacgccaaacttcccactttttcctcccttccaaaagaccgagtcctcctccaaggtgattctttgactccttaagacttggagtaattcgcctaccacgtccaactcccaatctttgaagcctctaataaaccttagattccaatctccttgaccagaattctagtcccacatatcccccactatggcgttcctttgggcagccacaacaaagagttgagggaaccttagagacaactccacatccccacaccaaggatcggtccagaacctaattctggtgactttcccacattaaaagccatattatcctaacactaatcagattcctttagaatttcctttcaaaccccacacaccaaacgccccatttgccttcttagtcctccacccaaattcctcttgcccatactttgccataagcacttgcttccacatctcgtccttggcccgagcgaatctccacacccattttccaagcaaagctttgttcaaggggactaacttcctcaaaccaagccccccctctccttcctcacacaccctctcccaattgactaggtgggcttttctttccatacttccccctccccacaaaaaatctctttgcagcttttttagccttcttgccactattctaagcatacggaagagggacaattgatataaagacatactagccaaagtactctttatgatggtgattcttccacctttggagatatattgccgtttccaaaggtccaatttccacctcatcctttcttccaccccatcccacacgcaagaggctttattggacgcacccaagggcagccccaggtaggttgatggcagttgacctaccttgcatcccaactccacagccatctcaagaatctcttccacctcccctactggaataatttcacttttagccagatttatcctcagcccctagaacggcttcaaaccaacataagatccagctcaagtaggtcatgtcttctttctttgcctcataaaaaactattgtgtcatccgcaaagagaagatgagaaatattggcaaccggcccactacccctccgaatgttgcacccggaaatgaatcccccttccacagccctccgaataagggcactcagaacctccattcccatgacaaacagatatggggatagagggtcgccttgccgtagcccctttgagctagaaaaaaacccagcaggcaccccatttactaaaactgaaaatttagcagttgagatacaactcctccacttagccccgaacctcattttttgcaaaaccctcatcaagaaatgccaattaacgctgtctatgccttttcaatatccaatttgcagatcaggcctttctctcctcttttttgccatgaatcgatcacttcatttgcaattaaagatgcatccaaaatctaccttcccatgacgaaagcattttgatatggggaaaccactttaacaatcacatttttaatcctattggccagcaccttggccaatagtttgtacagcccgcccaagagactgataggcctgaaatcccccagctcctccgcctctcctttttttggcaaaagaaccaggaacgtgttgttgaggctcttgagaaaggcattttgctcatggaactccttgaacatctctaaaacctcctttttcatgaactcccaacagaattgtcaaaaaaccaccgtgaagccatccggacctggagccttgtccccattcatgtccattagggccaaatggacttccttctccatgaagggaagctctaaggtatccgcttcttgctgactgatctgattcaaaattaccccctcatatccgccctccactccaagtcttccgttagtaactgtttaaaggcgtctgcaattcctatccttacttcttgctcctttgacagccaaaccccactgacttttattctatccatggtattcctccttcggtgtgcgtttgccattcgatgaaaataacccgtatttctatccccttcccttagccataactcccttgataactgtctccaatgtatctcctccaaattaacccacttagcatatccttcttttgcttcttttttaatagaggtttcctcctctcgctttccacttgatcccaatattccacttgttgtaaagcaaccaatttattactctccaaactcccaaacacctccctattccagatttttaagttgtgcttaatcaccttcaattttgtagccagcttatagctagcccttccactgaccgacatctcctgccaccagctccgcataaggtctttaaacccttccactttcaaccacatattctcgaacctagaaggtgaaaggcctcttcttatgccacccccctcgattagaattaggaaatgatccgaaataggtcgaggtagtctcttctggatcacattgctgaactgatcaagccagctgggagaaactagaaatttgtccaacctagcccaggcttgattatgaagccctccactccaagtaaaatatcctccttgtaggggaaggtcaacaagcttaaggtcatctaaaacctgagcaaacctcctcatagctgaggtggttctcttgtctacttctttccccttgggataaaataatattaaaatctccctctacacaccagggttctccccaaattcctctgattgccccaaattcatcccaaaggcactccctatcctctttggtgaaagggccataaactcccgtaaacacccagactacctcattttcaacatttctgaatttacatgaaattgagaattgacccttctctcactccaatatttctaaggaccttttgtcccagcaaatcaacacacctccaaccgatccaacagcttttaaagctctctcccagtctaaaaatctccctacccctaaacttttcaccaccccttctgtcattaattggatttttgcctcctggatacagagcaagtccaccttctgtttcttaacaaaagactttattatcctccttttattattgtcgttcacaccccttacattccaactcaaaagtttgagattcattatacaatcgttagttgaccccctctacccgttagatgactgttcttcttaacattccccttgtaattgattgaacactccaaccttttgagctccctttcgaatttcgatttctccaacatccctttgctgtttatcctttcccgtctttttctaatcttgataaaaaaacctaggatttccttttctaggccttctgttgaaaatcccaaaaacttgctaaaattggccaaactactctcctcccaattaatctccttctcacccctgagatcttagggctcggcctgaactgaattccactccaggttttgaacctctatagcggcgcaattaacctcaaccaaatcccagcagccctttccactcactgtagacccccctgcaactgccaagctcaacatgttttcttcctgaaggttctccctcatctcccccgagtggtcataaaactcccccttcggagtccgacaaaaaaaaatagaaaaggaaagagaggaccccgcaacccttaaatcccacaagtttgaatcaaccccataccttgaagcttcttccactatcgcacactctgccattgaactctggacgaccggctgctgcttccttctttcctccttctctcggcaccttatgaaatccatctccagattaaaaaccagacgggctgcatcacctctgtagagttgggcctgagaaggcccaggactgtcccctagcgtgattgcaagcccatgagacaaaagctccaacccatcggaggcccgccccctcagacggcccacacgctagccctacaacaatcgactcagccccctttaaaaatgacgggccttgcacagatggcccatcggcccacttcaagcccacgggaccttcaaccgggccaaacgaactcagcccatcacccgcggatccagaactatgacgggaccacctgcccgagatgggcccgattttcaaaatcttctctgccctcccctcccacctgccctcccatcgtatcatctaatcggcgttgtgccttgggccaagcgtccgacatttgtcccacgcgcaaccctgcgcgtgtatctccatcacccctaacctccccattctgccgtccaaaccagtctcgattgtccccctatttcttcctcagcgacgacgagatctcctaccacaaaaatagggcgtagacctccccctcaaccccgatctccaacgtactcggcaaatcctccccattcgtttttatcagaaccttggcccactcaagatcctccttcctttccgttgaggagtcgatgcctaagaacccgtcgcacgcttccctcactctcctcagaattgacggaacccataacgaaattgagagacctagaatccttacccaagcttcattcctagcttttttctctgttgaacatccaaatttcggactccactgctccaatcccaactgaatccctcccactgatctctcccccgaggctaggaccctcttagcttcctccacaatctcaaactccagaagaacacatcccttacccagtctagccatgcctaatttacctttcaacccccatgcacttgccactgaccaccctaacctctccaagtcctcttctcgtgctgatctaggattccattttcctaccaagcaatgcttcaatctactcacattactccagttcctttaccacctccgcatacgacttgcctgtgaccctcacttcttggttattttcctttttttcgaaccaaaatcccacattccgcaaggactccaccataaaaacccatccccccttcacccccctagcttttggaatacaaatgctaaatctcctcttctccatatcggttacccctaggcggatgaaacaccctaccctgttaacctctctcaccagagagtaattcctccctttttccttccaaccgctttcccatcttccttctttcccatcccttatgcactgaatcagcccttctataaacaaccccacactcgccgggcccaggtggacccaagacaagatccctcccttgttttccgagatgataacttggatcttgccttttctctcctcggcttctacttcgaacaccttcgattccaccacaaatctgcttcccttcctcttcccacaattctcagctcagctctctccctcatcgccttcgctcgcgtgctcactctcgctctctcttatgaggaaattttttttttttttttttaacacacgaatagaaatattgaactgggtttggatttcagtataaaatttctggaaaatagagagtaacttagctcgatttttcattaaaaataaccaagtacatcgagaatagtcatcaatgaaagtgacaaaatactgaaatcctaaagtagacacggttcgacaaggaccccaaacatcagtgtggacaagttcaaaatgagactttgcccgattattcaaacgctttgggaacgagacacgagtatgtttcccaagctgacaggactcacatgcaagcgacgacaaaaatgaaaaaggagggaccattttttggaacttggatagactagggtggcccaggcgactctggatgaggaggggagcatcagtggaaatgcaaaatgtaagagttgaaggctaggtgaggtgatagaggccttgagactcacgtcctatgccaatcgtcttccccgtactccgggcctgcaaggtcacaaatttatcaaaaaaagtaatagagcagttaagagtacgagtgattttgctgatggagataagattaaaggaacactcgggagtataaaggacaaaagtgagaggtagagaagggagaggatgtgccaaaccaatgcctttagtcacagtttgagaaccattagctaaggtaacaataggtaaggtagaggtagtagtaatagaagagaaaagatccttattactagatatgtgatcagaagtgttagaatccagaatccaagatccaagagaagatgtgtgggtaagatgggccgaagcattacctgtctgggcaacagaagtaacagaagctgacttggtggcctaatagcggagatagtcatcatattcactgtcagtgagggaaataccttgagatgtggaggagctcggaggctgaggcggctaaggatcagatgactgggccacgtgggtagtgcggggaggctgcccatgtaactgataacaccgatcacgagtgtggccaagcttattgcaataggtgcaatgaggacgttggcctttacctcggttaccactgcgtcctcctcgagagttagtttgagaaactaacacagaagaatctaaagtgttatcagatggcaaagtcaaagtctgagtggaggagatacggaggaggcgagcaaacacattatccaaggatggaacagaggaactaccaagaatctgatcgcggacggtctcaagatctggttggaggccaataagcgtaagaaccatgaagaacttgtcaatctgtattcgttgatccccaacattagtagtaagaggcatcacggtcaagaattcctccttaagagaggcaatctagccactataagttgataaatccatgtcttgttgtctgacattgacaatagaagaagccaccttataaagacgttggatatcattcgtgtataaccctttcgcctgattccaaaatttaaagcatgttttgtaggcccgaagatgaagcagaatcttaggatcaactgattgccataacacactacataactgtgcatctattttcctccattgtactttgtcaaccttagggatatttgcctcctgcgtaacaaggtgatccttataaccttgacccataaaccaaagctccatagaggcagaccaggacaaataattttcactgccaaccaatttctctaaagtaatcataggagatccagatataacagaggaaaaaatggaacttttagtagtcatatctacttatttggattgaagagagtcttaatacgacttcagatcgcagctgaaagaagagaaaaccaaggatctacggctatgagagaccaaatagtaaagaaaaacaaacgtggcactactagaagggtagaagaacacttccgaagacacgtgcagggctcggggtggaggggaagtcaccggaggttgtcggaaaggttgtttagagggtcggtagagacaaaaaaccctaaaaaatgcacttgtagggctcgaatgacacaagcacaaatggagagtggctagacggcgtcaggcgaggttggaggtggaagcgcgttgtcggaaattgctccatgcgccctcacgtgccggcgtgtgaggtttaggccgctggagaagaaatgcgcgtgactaagaatctccctccggtgctttgacaaaacttgaagatctcctctttgtgcacctgatggtatggttggtgtcggaaaaggtcttcgccgaaaaagttgccggcggtgagggttttttgacagcgatacggttgaccagaaagctttaggagatggggaaggtcaccggaatgaaacatgatcactgaaaggtttcctagaattgattcacagataaaccagaaatgattaggtttttttttctccctaggctctgataccatgtgaaaagagagaaaagggagaatccctaatttttgttattaaaaactgataataatacacattggacttgggtatatatatacatgctatctaacactccccctacaaatacaataaatgtatatatatatatcttttaaaattgagaaatcaagaatatattttgtttcattttagaggtataattctaaacatcatgatttttttttaccactttgtatgaaaaatgcgacttatttattgttttagggaaaaaatattgaatccattattgtctatgttattatttgaaacggtcactgaaaggttttccagaattgattcacggataaaccagaaatgattaggttttttttctccctaggctttgataccatgtgaaaagagagaaaagggagaatccctaatttttgttattaaaaaatgataataatacacattggacttgggtatatatatacatgctatctaacactccccctacaaatacaatacatgtatatatatatcttttaaaattgagaaatcaagaatatattttgtttcatttaagaggtataattctaaacatcatgattttttttttaccactttgtatgaaaaatgcgacttatttattgttttagggaaaaaatattgaatccattattgtctatgttattatttgaaagtctttctttttctttaaataggttcttattccatctgagagtaagacactgcactt

SEQ ID NO: 13074 - DNA, 3039 bp, Vitis vinifera
  Intron number 2 from transcript GSVIVT01010960001 (locus G SVIVG01010960001) derived from phytozome v7.0 (chr-ID chr7 ; pos 2628381 to 2631419 reverse strand)
aggtgtcagaacagtgcaaaaataggctggtagaggtatttctatgatgctcttttacatgaatgctcataagtttggcttcttgtacttaacaaatatggttagatagatgtgatactaaatactaaaagtacatcaattttatcaaatatcaacaatgatttttcttcatgttcatatcatttagtcttttagagttacaaaccacttttaaaaatatatagttgaaacacttgactatcaagggattagcaaggtagattacacgttataacctctcttttttgcttcgtaagtgtcataattgatttattcatctgttcctgaagcagataaattttgattttccagataagttgtttttctgatgactatgctggactttcaagaatgatagaggtcataaatttagatctcactaccctgagatatgtctcttgtaaatgagactcttcaagtgattttttgtccaattaataaagggagtagccaaattatgataataaacctatgatgaacagaacaagctatcaatgctacaatgtgtctcagtagaatatttcatctattttctttatattttcagaatattaataattgtatgctttcctctattttgttggcattcttttattttcagtagtttttaaatgaattcttaacaatatagcatatagcacctaattttgtttcggcgttcttgcttccatccttctgcttatgccttttctcctaactagaagaaataaaccagtcttctacgaagaaaagagaatatgtactttcccattgtcacacattttgagtttttctttttgttttccagctctttgaattggaaaactccattttctttatggattaatatgataggtctggtggcaatttggccatagagatatatacttgcgaattcccttatttttcaagtgatggactttccagaggttgaccatctaataaccttgttagtttagtaggaataatgggaaattcaccttgataatttggcttacctttttaaggcgatcatgtaatccagatctttggctaaacttgatattttagttgcttatgattttctggcttagtttcgtattcccttgtgttctctaggacttcttttgaaactgtctttattatggaaaatgctaaagaaaatcaaatatagttaaaattaagtagaaacttatgcattgtcaaattatctcatctttatataaaaaattagaataagtgaaatcagtttgaaataacatataaaaatactttattgatattaaatctatttttttattttccttctgcatttcctctgattttctttccattgaattttccctcaaattttccagaaaccaaatatagccttaggttcacaacatggcagtaaataaccttgctgccaatagcaagcaattgtgtgttaaatagcagttgggaaaccacaaatagcatgctcttggataatttacaagagagtcagatggggtcttgaggttgatgaatgcaaaatctaggtataccaaacatgactgtattttagagtttgaaggattgtatttccaacaagttgatgtggaggtttgatgcagtggtttgttcttgtccatcgaagacatatatgtcaacaagattgtcctctgcagctaatgatgtcattcatacaaatttaggtgaagtgaaaactgatggttgtcaactttaatttggatgaagatggagtaattaattcttttgaggctcccaaggagttaaatgattgagttactgctgtttcagattggttagacaagggtatcatgtaactgagcattagggttgtgtaactacaatggaaactgtaggaaaagttcagttggaatcctgacattgtcccagaactattgttaccgaatgggtttccacctatgtggatgtttccgtggaataggcttcttttggctgataattcagaggtcttttggtctgagtttttgcacttggaacagattgtatgggatttttctagttcaaaaggtctattttcagtgactttagcctggtgcatgactcaggttacaggctacagaaaagagctactccttcctcttgagtaggaaaagtaggctcacaaaagggaactgagttcagatctgctaaaagagctgttaatagcttgcttaaagtagttctggtggttctgcctctgtggttcaactgaccatgcaagttatcacttgtgtgaagctgcaatggagaaggccttaattcatatttgttgcttcctattggtcactaaataggctcttacatcttctgatgaactaccctgtaagcctacagaaataagtttcctctagtacttatgttggatttatattgctttgtaggtttttggtttgtaacaagtgtcttggcacctgttgcatgatttgtagtttttacagccactattgaattgccaccccgtcttgactgcactggtgtaattagaagttcttgctctgtatcttgacttgatagggccaaaactgtttcaatctttctttcttaacacacgagcagacgagacaaaagtaagtgccaaagtgtatgtctgagtttttattttgattgtatggtgatagaagaagtgatgaaggtcatgcttaagtttttagttctgcttctgcataaactaaggttgcttcaccttggagattgatatttggctttaaaatattagagatgataactagaagctgatgcagtcccctgtcaaaaacatgtttatgtcttgacctatgatataggttttattagccacatatgtagcactgaagcatttgttattccagtaattgcattccactggtctatttttttagctcttcactataacttgatgattgctgcaatttatgtgcatcctatagtagatactcaggctgtacttgtccaagtagatttatttttctatgtttgtatcgggaatatcaggaatgccaagtccagaattcatgtaaattatgcattgttgcaggtctccagggcttacggggagggaaaatttttgct

SEQ ID NO: 13075 - DNA, 2578 bp, Vitis vinifera
  Intron number 2 from transcript GSVIVT01016848001 (locus G SVIVG01016848001) derived from phytozome v7.0 (chr-ID chr9 ; pos 1920654 to 1923231)
catcattggcatatcttggagattgcatatttgaggtgagtgatgaattttacttaaaactattgttacttttatcactgtttaaaattaatgcattggactactttgtgccgaaattacctttgaagttccataaaacttgtattgcatgtgtagttatgaggaagctgtgtttctatgaactttacaaactcgggattttgtttaatatctgatacagtaaagatttctcatagaagagtataaataataaatactgcataacttcttggggttgatgggtgtacaagctgcactaacaaatgcaatcttgtgattatcatattctcagtaccttagaaaatctaaagcccataataactgttccaacatgaatggagattgaaaatgctctatgcattcacatctagttggtaaagagtgagttccctatcataattgaaccatttgcatcccccagtcaaaacccatgactttgtatagaggaggagcatatttaggacatagagatcccttttattcaactcgaagaggtcttacttagatccttgtttatttgcatgtcttttttttttttttctgataagttcgtttatttgcataccttgtacttaaggattttgtaggagtttctccttggggtgtagtgggtgttgccttctttagttagggcgacacttttggactaggatgggtcctgtgtggcaaagaagagaggggaagtgtgaagagcgggccccttatgtattttttggacggtttgtaaggcaaggaacaaaattgcgtttgaagatgatgtgttttccatccaaagacttaaaagttcttttgtttgttttctttgatcgtagacaaaattgttcataaaagatggtcttttgatgttagttggtttcattgattggttgggctctcattgagggtggtgatattttttgtacctcctttttgacagctgtttttgttccagctgggttggggtgggtgtatccatcttgtatactttgagtcgccattttggtgcctctttttaatatatatatctctctttacttatcaaaaaaagaaaaagaaaaaaaaaggattttgtaggagtgtcatctgttaattattcaggtgctgtgtattgtggtctagagcattattggccttctgccttagcatgcttcatgcattttttggcattagccttcttctgttaaaacaaaattattagttgtaaaaaaatctcggtatgcaagataggggaatttcccaagttaagaaatcttttggtgttgtctcatcagggattgacatcttgctcatgttgatcaccataaaggacataaagttcccaaatgactttgcggctggggagaatgtgtcaatggaaggaaaaaaactggattttcaaaaggtagtacacatgaagtaagattaagaattacttcccattcaactagagtttagtaatgttggagaatgatatatattgtgggtacaaattctaacagattaagattttaggaaaactgataatttaacatagtatcgaggcctctccttagcaagagatcatgtgttcaaaccgtaccatgtgtttaatttattaaacccacatctatgcccaaaggatgctgtcttgtttgtctctccatgtgtggatatctagtccaacatggtattagaactatgttggagtatcaaagctctaattaaatggtggtctcaggttcaagttcaatttatttatctacttgttgtgatcactatctctgattaactagaggatttaggttcatatcctcctcccatcaatttaattattgggatcacaaaaagtgtgatttgtttgttgccattgtgatctgcctcccacagcaggtatagggcctcacacgagggggggtttagagcatgatatacactatgagcccaaattttaacagtttaaacctttaggaaaattagtagttcaacaagtaaaatatagatgcattgttgggtgaaattataatggatgaacaattgttgcaggaatatatagtgatgtcatagaaagggcagtgttcctaccatggggcatatggctctgaaggcatagaaatctctagttattggaaaaaccatcttatatttgagatggatacaataaaatttgtagaatataacaatgtaaattaccaaaacttaaaatcagattatactggttacgaggtgctaatagatgtgtgaataaaacaggaaggtgattacatggagttgtccaataaaatgggcaattacattttcataaaaataattggtagttataaaataatggtgactgaaaagtaagacactgagatctggactgatcactttaaggttaaaaatatataaatttacaggttgaaggacctcactagtctctgcctatgaatgccctctttagagaacaaattctcctcctttttctcttatcattttctcaggaagcaagtacatctatataaaatataaatatacttgctaaaatgttgccgtgttgctcttttcctgaagttctgtattcctactcatctcacacctgttgtttcttaaaatttgcagctat

SEQ ID NO: 13076 - DNA, 8408 bp, Vitis vinifera
  Intron number 5 from transcript GSVIVT01027217001 (locus G SVIVG01027217001) derived from phytozome v7.0 (chr-ID chr1 3; pos 18055057 to 18063464 reverse strand)
aagaggtaatttcgtttatctctatcctctttcatgctgatcaaatcatggtctggtcgccatttatcatctgtcttttagttggcataagttcgctacacaattattattattttttttttatcagaaacaaaatatatgtattaatagagaaaagagacatgagaaggatgagaaatcctccccaataagtacaaacctgatcaaaagaacgaagtaaaccttcactaaccaaggaaggctatacaagagatacaaaaggccgcatgattgaaagaactaactattcataaaaaaaaatgattgaaagaactaacttaactaagtaaacctccactaacccaatgagggctatacaaaaggaatgaaaggcctatacaagtaaaagaatcctgaccctataacccaaccctggggtgtacataactgaagccaactaagctggattacactcaaaggataaggtttaaaatgtctgtacagtaagcccaaaaagaaacatgaaaatgaatttgatcccacatcatctctgccgttttcgaaatgtcctcgaaaatcctaacatttctcctctccacacaatccataggagagaaagagatgcgatcctccaaagagtcttgcctcttatagaattcccaaaacacttgaaggagatcaccaacatatcgcaaatactgttaggctgaactcactccatcccatcctatgaaaagattctatgccacagtcccaaagtaatcagacaatgcaaaaagagatgatcaatcgtctctctgctcctacaaaggatgcaccaatctgggctaagggttttgaaaagtcttctcaattgcaacatgttattggtatttaccttcttatgagccattaaccaagcaaaggccctggccttagaggggacttttgagttccacaaaaattagctaggtagaaaggaaaagaatttgagacactggctaaggctgaaaaaaaagatttaattgagaaaaatccgggagaggacggaatccaagctttcacatttggaactaaaggagtcaaatgagcaagttaggctttttaagttaactggttgctgtcccatgtaatccatataaattttaaaaaataaatattatactaataacaagagcaatggatatggtcctaaagttattaaaaaaaatatttgcagaggtggagattagaatgattcacaatgaatcattctaccagagatgttctttagtgaataaaagaagtcaatgattatgggtactattaattcttgatattgttatctttagagatataaatttgatatagggggatgaaaaatacttacaatgaaagaaaactaatgaagattggagatgccatttgaacaaatatctattgcatcttaaaacgcttgacaacttgattacaagatcatccgttgataatatttaaatgcaaatagtgaatatgtaaaggttgctaattaaggagcttatttcttagttgctgatttttctggaatggtgctacttgatctgttctcttctgcatctgcaaatcactgagttcatccaaaatttgcatccaagcaaaccatgcaacattaatggaattggggccttacatataaatatggatgggaaaggcctgtcactacatgtatgtaatgcaaattcaccaaaagcagtggaaacttggtccaaaacaaggatcttgtgtcatcagttgaacaatgtttgaaggcttagactattaataaccaagaagttcctttgactttcgaaaatcaatctcccttatgctaacatgttaaaaagaaacaataaaaaaaagaagaagaaaaaactgcaattattataaatcaggtgggtggtgtatttagctaatcttattagcattccttagttctgtacttaatattagtggttaactcatgagaaagttaatcttagtgtgtagttacagtagtggtaccacagcaagctattgttgtgggactattccagctacttctggtagttacagtttgcatttttgtatcatgggacaacttaagcttattgtagttttgactgaagttactagagttttatttttagtttctcttatatcttgttagggtattttcttaagttgaaatccctctggaagcttttagcaccatagattcctgttgaagagtttcttttttcttcttcaaagcttttctgcaaaagcatccagtccatggttttatttggaaaagctttttcatctaaagtactctatgttaaccaaacacgctgttaagtcctttaagtataaaaaagaaggggtagttttcagaattgattttgaaaatgcttatgatcatgtagattggggttttctggaccatgtactagaaatgaaggggtttagtcctagatggaggacttggatgagaggttgtttgtccttggtaacttttgcaattgtggtgaatggaaatgccaaaggataggtcaaagcaactagaggacaaagacaatgggatcctctatccactttttctctttgcctttgtagctaatgtgttaagtaggatgatgatgagagggtcttccccttgggggagggggggagaggaacccaaagacgtgttttttgggatccaatgattgagagaatattgcgaagattaaatgggtgaaaaaaggcctatttatctttaggtggaaggataattcttatccattcatgtctctcccatattcctagctatttttttatcattgttcaagattcccgctatagtggttggaaaaattgagaaattgcaaagggatcttctttggttagggggtgggagattaagagagactatcttataagctgagatttagtatgtaagcctaaggtggaagggggattggggtttgggaagatttctctaaggaattgtgctctattagggaaatggcatcaagttattctatagttttaaaaagcttaaggcgtacaaaggcacaaagtcctcttgaatcctaaggtgtaaggcacacctaaggtgtgggctttagtgaagtgaggcgcacctattttacatatataatttgatataatataattaaatttaaagaggctcgaaaaggtatgtctatttttccttgatttttcctttcttcttcttcctcttcttctcttctgctctcaattctcacattaggttgcaacacacacgacatgagcaaaggcaaaggcggctgattagggcttttttttgggtttaaatggaatcaaaatgcagcttttctgaataactccctaactctagattattcttatgccaaataattccggaatcttgaatttgttgctaggttatttacaatgagaaaggaaatgagaggagaagtaacaaatttgttactttcaaaaaatgatgaggaaagcatacaaccctttctaggacaatgcaaattacaaaacttaatacatgttattgagttatattctttcatacaagtcataagcactcacattgaatgaccattttgaatatttgacattgttgtgctaacttgttaatttgaaaaccctttgtggaagattatggccatattagttcttagtttcttatcattcaataagcatcttgtgtttcataaaattaggtgcaatataatccttatgtaggggtcatcctatctaacttttaggcattaagattagggatggcaacaaggtgaatttagggtaggtcacccctatcccaatcctttccctattaattaaatcaatttccatccccatcccaataaaaaaaattaaatggggtgaggtaaggtgggtaattttccatactcaccgcacccatttacttgtgggtaattttccatactcatcactctcatttactagtgggcaattttccatactcaccatgcccatttacccttttttttttttaatatatatatgttaaaaattgttcttatattaaaaataaatgtaatttgtaaacaaataaatattataattgtttataatttattttaatgagagatacatttttttattgggggaattatgtaaccatgaattgtccataaaatatggataaattcagaatccaaaaaagtcacttttatggggagtacattttggggaaaataattctcattccatgtactagaatagtaactttttgcatgtttctaagagtgccctccaaccaattgaaggtgggctaccacttatataaaactaactgacaagtacacttgattggacccacgtacgtagctgtcacatcacacatcaccacttcagcctttacatcaaacatgtcattcgagatagtaacaaaatttttaccaaaaagcaacaatgctagtaactaaaagtaccactacagatagaaggatgtactagcctatttataattcatcaccactttcgcttgtatatcaaatatgccactaaagatagcaacattgtttttacttaaaagtaacaacgttaataactaaaagtatcactatagatagtaggatgtactagcttattaaattttttattgtcattgctatgagtttgacagtgattattaaataatatgctagaaaaatacacataatgtaccttttaaaaacattatttattaaaataaaaacaattttatggtttaaatttttaattaaacaaaaatgtacttttttttacatatttaataaaaaacattagtcttttttattttattttaaatatcattgtattatgatgggaattgtgaatttatgtttaaaattttaatgcaaacactttaaaaattttaattttacataccttcaaatattgcgtttaaaattaaatactcttaaagaatgatcattactaattttttgttggatgaaattaaacgtaagttaatattttttaatattatttttctgtttttattttgaagaaaacaaaaaatgtagtttttacacatgtggacggtgtttttttatttttagtttttttaaatttaggtttaatgttctataaaaaattcagaaaaaaaaaatgagacccataatataaaaattataaatattataaatataaaaatattatgaatgcgaaacaaaataaaatattatatatatatatatatatatatatatatatttgaaatcaatattatttaaaatattagtattcatttatttatttattagattgttaattattataggtgagtatatttttatattaaaaactaatttattttaattcattaattacacatgatgttaaaataaaaatttaataaagaaaaggaaaaaaataatgaataaatgaataaatgaattttacttttaaaaaataaagtttgctctttaattaagtagattttaaaaaatagggacaaaagatgagaattattacaaaattaattaaaatcaaagtattaaaaaagaacaaaatttaatttatttaattgtaatataaaacttaatttaatttggtgagaaggtgagaatggcggagaagggaaaaaagaaaacaaagaaaaaaaaaaggtgggggaggctaaaaaattggcccgttcaagtgaggaaaaaaaagtcaaacagaaagaaaaaaaagaaaaaagaaaaaaagtgagggagcccactttcaattgattggagggcaattttgcaaatatacataaagttactattctagtacataaaatgaggattaatttccctaaaatgtacttcccatgaaagtgactcttttgggttctgaatttatctgtattttatggataggacatttttacatgattcccccttttttattttgtgtttaaagagaaagaaataaagaaataaattaaattattttttacttaattatatatatgcatatatatgtgtgtttacttaattatatatatatatatgtgtgtgtgtgtgtgtgtgtgtgtgtttaggatgggatggaaggtaatactcgaatttgccccaaacccgctatgagttaaaaaaaaaaaaaaaaaaaaaaatcccaaacttgcctttaatttgtttaggctttttgtaaacctattctattaggagtgggatgaggtgggtgcccgaaacacttgccccatttgccccattcccatccctagttaagatatgctttagacgtggatgattatcaccagagattcccaatattgagcataacttaggctttcctctgtttgcataaataatggaggtttatatctagttgatgcataaaagtattcattagggcaggtgagagagaaccacaatgtggtatgtccttcatataattggaataacaattacctttgttgtttaagatatgggtttttagaaaggtggatattagatcatagaaggatgcattctcttctcctaaatgggattgcaaaataaacattaaaagcccctgatctatgttgtcaaaagactttccaatatctgacttcattagtttattgactcagttccagctttggattttagtaaaggtaataagggctctacctttcctaaactagtgagattgacttaaaaaaatatcttcaaagataatatttaataaatgagaaagcacatccataatgatgatattggtcttgttcggctgggtaatggctcatatttgcccaggtttgtttggtttaggaatccatgagcgatacattgagaaaaactgagaagtagagttcaattcaagatatcctttttcatgtcttgcaattccctgtcagcattagttccttataagtggacctcgttcccaaagacaatccaacatgttcattatcttatccatcaaaccattctttttaaaaaacaacatttttcttcccttagaagagccacaaatcttctctaccttttgacttagctcccatttcttgtcttttcttctcagctggttttgaacaccatgtaacatcatcttcaaccacctttcagtgcagccacaaaagaattgcttatacaataaacaggtccttatataatataagacttactaaaagacttacttctattcattaggccagcatgaaacaagaaagatgtgcctaaggcagtatgaaacaactttgcatgccaagagaagaagagagatgttcgcaattactaccacaagaaagctgaactcctaccctatctctaaaggggcctgtcacttcatttgtaccttctttgcttaggtttccaactggacttaatggcctttccacccactgctagcaggagcaaagtgcttgaaaagcctgctaagaaagattgcttctattggcctttctgtgcaacagtccaccggtagtggaaaagaaggttaccatacacacaagagtctttcagtttgtacagaatctgtttcttatcactcaagtagtacaacagagggaagccataggcctttattctgtacgtggccatacatagcaacaactctctgtttttcattattgactccatatgcattgttacagtccgttagaaatagaatgtgctactgaagcttattgcatattattgagtaatattcttccacagaatgcattgctcacattctatattatcagcctgaatatttcaaactgtcctaacaaacggcccacttaaaaacctgtgctctacagaagattttgaccatatttgttcaaatgcaagggaaggcatagctctttattctgttataagacctacctagaaacaactttctgcttttcattcttctgttattagtgatctcttagaggtggtatgtaccatgaagatataggctaaactttgaccatttttgtgttgagccttcttggaagtaaggatcagatttgaagtgattattctaagaagaaaaacaacgcaagaagggtctctttataacatgaccatggttcatcccacaaaagattatttaatgtacagagagtagcataggaaaataggcagataaacactagtgtggctgacttcactttcttgaatgtgtcactgtggatttaatgtgcagagagtagcataggaaaataggcagataaacactagtgtggctgacttcactttcttgagtgtctcaacagtggaaacacccttgtctgtgtcataattgttgcattgagcattcttgaaagtaaacagatgctgtttttttcaagtgattattcttaaaaaaggaaaaaataatgctagaacaatgatctctttcgaacattgtttgtcacactaaagtgtatttaatgtacaggtgtaggaaaacagcagattaactctagtttggctaactttaacatcttaaatgtatgaattttgagtctctgaacccacctgagtttataaattgtgctaaacattctattcaagaggctgttgcaaattgctttgcataattgagttgtgctaccaagtgtaggtgtttgctaggatcaagtcccttgccctcaagcc

SEQ ID NO: 13077 - DNA, 9102 bp, Vitis vinifera
  Intron number 3 from transcript GSVIVT01028383001 (locus G SVIVG01028383001) derived from phytozome v7.0 (chr-ID chr7 ; pos 6878519 to 6887620)
ggttggcagcctggaaccattgccagggtcccagcagttctctttttcaatttggagaggaggattgttcccagatgttcagtggcgaaagttctgttattgaaggggttggtaaagaaggatttgtgtttaggcacttttctgaagctcactgagagggctttcatagataggttcatcatcaaatatcagaagtatgttcctcagttgttagatgtatatcatggaaaagtgggctttcaggaacttggccttgtatcccaatgaagcagtagcagcatttggactttgctattgcaagtaactatcattccttctctactttatttttgcatatttgattgcaccatgtcaactttacagttccaactaactattcttccttctttagactcctactgagtttccaactcattgggtttacttgattccagtggagttgcagtttttttgagtgttgaaaatgtaattgctctgagcagcttttgaagttcagggtgaaactcatgtgtggggccgggttgaaaacccctattccttgatggatggtcttttaaagctgaatcaattatatatgaatttggctgcatgttctctgttaagttatagtcattaggtgtgagtgacatgatacatagtagggggaccaaggcctgcaataaggagtactcacaagactcaccctaaatcccggcctgcataagtatggaaagggccatgcttggaggaggtgctgggttgccctacagagatcatcttcgcagggtttgagtcatcctcggctgacccctgggccatccttagaataactgagctgaagttaaattgaggtttaacctgagtacattcctttacaacgaatgcattccctctacttatatcttcttctcacacattgcttgcacctcagcactgatctaggccaccttcatccgcccccttgaattttttaaatccaactctaattcaagttcaaaccctagctctggtccactctagttcatgcccactctagctctagctcaaaggtctaaatacttataaattgaaaataactgtttatccaaatccaccggtgataatttcaactttaattaactcactttgattcattctaatgctacaagaagtttttattattctactttacaagatctcctgtgaaatcatctaattcagtacaaacttatatgtaggaataaatcatctatactcttttgagtttatgatacatttatatctaccaatcattcacaaaattgatttcccaatctcactggatcaattcatggtgggcagttcatgctgtatcattcttgtagagggtggcatacacattagatttagatgtgtttgttggggacacccaccatttcgaatgccccttctctcatctccaactaccacaactttagcaattggttcggcatgccagcatgaacccacctacagtagcctttcacaatcacacttcacttctgataaaaccatttccatgctcatcctcacctaaaacccttagaaaactattattatcagtttctttcactatatttatcatttagctcgaggcttttaattaatcccaatctcaatcacatctactatatccgatgcaatatcccacattagatagagagaaaaaaattgtgtatggatataattaatcgtgtataccaataatatcatgtatacatatcttaaagtcatacaagagggagcaagatattagtggtgaggctttgctcgtcgaaccctacaataccttggaacacaaagtcatgcttgcaagggggtgacaatatctacacaacagaaatatttctatatctcatatttggttttaccataaaaaaaaatagtaaagaaagtcaagtatgattaaaatgaataagaaatttatatatttttaaattatttaatctttatatatgagagttgaataagttaaatgagtttgaagtaaaatataaaaataatttattgaatttaaattattttttattttctttcactttttctttcattctacctttcttttccattttctttcatttgcatattccctaaatttttcgacaaccaaacataatttaggaatcttttaacttttttttttcttcagaaggacgctgagttatagttgcattttcttacaaaaaaaaaaaaattaaacacacaacacacaaatagtggtcagtgagttgacaccaatgagaagcaacttgaatcattataaataatcaaaattttcataaatatcctactaatgacatatatataagtaatcttgattcatattcaactaaaaaaatatgtattaaaaatttgcaataagaaaatcaatagaaaatttcaacttgcatcgaacaccagtatcaaattttttaataagatgagtaacatttattgagtaatatatcatataaaaaaacatatgttacaaatattaaaacaatcagactttctttgcctaattatttgactttttggtatgccaaatgaataggagaataacaaagaaaaaattcactagcatataaatagattacaatgaattcattaatatgcaaattttttcaacattgtttatcttcaaatagtcctaatgaatccttagcaaagctttataagctttgtatactctccatgtattgatagatggtatcccaaactctattatcattggacattacaagtcatgttagaagctttaccttgtaattagtcatcttcctttggaaattgcaagaaaacatttttatgttattatcaatatatcatgtctcatatcacaagattgccaattatttaatatgaaaagaatatacaattatattatataatgtgtaaataccaatgccaaaggaatataaaaagacacttctaacactaatattttttattataaattcagttacaacataaatccactactaacaacaaaattatactaacactacgatgcattataacatgatctaatttaaacatttataagttatttatttttatagaactaatagttttgggttatcatgctatattccgtaacatgcctgattactactcaaaaaccacatattttagatactaactttcatgagtttcacatcttttaagtagtaattatgcctaatatgcccaagtaatacattgctacccttgcaagagattctaatggttctttgttgagttttggagatattttaaggtgatttttgaagcatggagtgacaaatggaaaatggaatggaggaggatacataatgtggatgaagaggaagaggaaatgcacttggaccaagctttagagcttaattgaaggtggtggagatggattaaacatgaagaaatgagagaaattgcaaagaggatccggaatagcatgattttcgatttcgcacagtcatgcgaaatgaaacagagagagtatggctgcagcacatgaggaaattgtgaagaagtgatttcgcatgaccatgcgaaattttcgcacagtcatgcgaaacactccagaagaacgaaattccagctgattgattcttcacttcgcaccatcatgcgagatcactaggggctcgtgcgaaagtgcattctctccagattccttgatgaagaagcatccaaaagacctctaaaatgttgccaagtgtcctttttaccttggcctataaatagaaacgggattttctcatttaagaacttttgattcattttctaattgtaataacttttcatacttcttctctctatatacaattctccactttctttcagtttctcttattttctcggtagccaaacatgtcttgtgagattaaatctccaagcatgagtggctaaatctcgtttttcttggaggagggaggatctagaggcaaaatctatggtgaattagagaattgagcttgaattgctaaggtaatttgatctaattgattgattaattgaaatttggggatttttctcttcaaattgtcttggatgattactacaatgcaagctaggtagattcatcaaattcttaatgctagatttgatgagattgaatagttgcattgtgtgaatcattgaaagataatttaagatgaattgaatatatgattcaaattgatctcttagattagattacctaatttgaagggaaattagatctaaatctaaagctaaatcaaaaatcggtttagatgaaaatttaggttttcaatctaacttgatgaaaattagatcttaacacctattcaccatggaaattgctctctagaaaatcctaactccgagaatctcacctcttataaattttcttctcttttaaacttcattttcaattcaatttgaatacattgttaatttggaattttatcatgcaatttcaagttgatttcactttatcacaatcatttcttatcatctcattcaagccttaatcaccaagaataatccatccttgtggacgatacctaaaaaccactatgctacagtagtttgtactaaagccactttttgatcgagtacaaattgctatagaagagtgaattaagttataaattttgttttgatccaacaaacgacaaaatctgagcgatcaatgccttatatcacaaaccaatcttaaaattcaaataaagtaacaatttgaatttgcaagccaaataaactcccaatgataataattgaaatattaattatattaaaacaattatgaaatgatttttttttacttggaagaataaattttatagaaaatataattcatcttcatttctaagagaaattaaaattattattattttcttaaaaagaacaaatttataatcacatctacaaatgttttaataggcaaatctatatctcatttattttcttctaatgatgtaaaaaaactatttccataaaggaacatcaatataagaaatttccttatgtaatattagtacagcctagttagaaatgagtccttaaaaacatgacatgatgtaataaacatgtagatttttattatttatttaataaagttccagttcacttttatctatcatattttcatgcattatgctttataagcactcttatttgtatcttttgcattgtactatatttgagtgtattaagagttgtatagaagatccaagtcacaagttccttgcaaataaattacttgttcacaattagttcgtgggtttaggtaacccattagagaatgtaatgcaccaccttttgattggaagaagggttggtttttactatcaaaatgagtttcttatgatgaacgtattagtgtgtatgattatatattgataagacatactgtgagtcataacttaaggctatcaagtagtcatgatctcaccaagctgcttcattatgttatttttcaaccttgagagaatattgaacttatgctaaatttaatagtggctttaacttacgggtgagatcgtaagctgatcatatattctctatgaattaggtcattgttgatggaagtcattaacaatttgtattctcaatagaggcctcatgatatcttataggattgagatagtgtgtccccttaatgatcctaaggaggtgtgttcatgaaaactatgactatagtagttccttaagtggaacttgatattagctcttagagagctaagacatgttagttaaacgcactataggagggtttgtaactcaaggatagtagaggtagtcttgaaagactgataactttcatcttgttagactacagacactagtgcatggggagattgaacgcaatgactagtaagtcacggacttgaacacatggtgtttagttgttatttacataagatactaaagtttaattgattctttgtagtgggatgttgaatcaatttcagaattggattatgagagagtcagtattcctatgagtcctaatgttcctcactctaagttcatatactttgttggcatgagttataagggtcagattaactctaggttcacttttgtgcataagggtgttttggtaatcatgtaaggttatgcatgagtaagtgaacaaagtccttagatttgactaattgattaattagtaggtcctattgagttaattaattaattaagactcattttttgctagattaagtgattcaagccttagtggtctcaaatcacttaagcttagtggaaaacctaataaataccctcttagaggttggagtttcaataacttttgctagagagtcgtcttctacttctagagagagagtcatatcctctactttctcttccatcccctacgaaaatgtgttaagatcaaggttcaagtcatcggacggaagagtttgggttcacgagacttctgcaatttcattctcaatcttcaccgcatggattcgatttgggaacatttaaatgtaaaatatagtttttgttaacactttctgaatccttataaagttttttccactatacataagatttagaaaaacctaagatagttttgcatgttcctaacttgatttgagtttgggaaacggagagatctaggattttcccatcaaccctaaaattagcaatagagcctaattggtagatacatttataactgatgaaaaaaataataatgatgacataattttgatcatctatacatattagaatttgaagttcatttattatcatgctaactaatgcccccttcatacatctcaatgaccaataacacataaaacgattataaaaacccatgctgaataaatagaaaacaagagaatcaaaattgagttattatttgttcatattgagttgtaaacctttgacaaggatgagaaagcaagaacgtagaagcaaaaactttacatgaaatgttttatttttatgtttttgaattaacatgtttgcattaaagttttcgctaatacaacaaattggtattagagttctagattgaagatctctaaaagagtcaaagataatagaacacataagacaaagacaaaatgaattttagtaaaagtggagttgattactctccttggaatgtgatacaaagagagcgtatcatgtagagattgaagattgacttaatggaatttggtcaaaggtaaagattattgggtagtgtcctaaattcttaattaataatggaatttggtcaaaggtgaagattattgggtagtgtcctaaattcttaattaataaagatttttttttataaataatattgtgtaaaatatttatttaattgatatatcattgtaatattatatttccttatagaataaggaaagttgttaaaaatatctttataaatattctaagtcattggggaaaaaagttatgagatgaagatgagctcctaaatactatatgaagtgaatagagatgtgagaaataacaagaaatatccaatgataaaggaggctcgtggtggttcagggtatggatataaggagtgaggaaaaatcaattttaatgatctttggttaatttttattttttaacttgaactcaatttatattatactcaagctcaagttcaaagaaactcaattttatattttataatatttataatttatattattttaaaaatatattttttagattcttaataaaaaataataaattataattatattttatgcttttttatttttttagaaaaatagataattttattttaatattttttttttatcattatcttgaaaatttatcttgtttattatttaaattttggtatcgaagatggtgttgattgattattagtataggtggagtttgattcttaattgaagtggagtttgaggtagtgaacaacttgacaagttgtagtcatagatatagatgctactttgatattcatgaatatgatattcaacattttaacttgaattattttttaggattaaaagaataaaataactctcaatttataaacttaacccttttcaaaataaaatatactatcaaattattattattattattattattattattattattattttgtcgtaaaaatagctgttttttttttttttatttaaaaaaacctacatgtacatcatgaaatgttgaagggcacctaaaacggctacatcacatctgaaagatgagaagtcgaaagcgctaacaggggaagggatgggcattcaaaacaaaattaaatttaaaagtttttggatgatttcgtcttttaaaaagagttccatctggttttatggccttctggtttcctgcattttttttttccttcttggacgaagtgtaccaaaacgcactgccttttctaggttttatgaccgttggggaggaggcaaagttctgccatctgtttgtttctgtagaaaacaattttggggaaaattttctgcggaaagttttcagggatagccaacattggtgatcgtataaagcttcttccgagaaatgggtagtattttcctccgtggaaaactagtgttactcccaagctggaggcgcattgggggagcgtcaatgacccaactgcactttcttgggaatattactccatttgtcatcagatgtttctcatcgtccaaacagcattcttttacagtttcttacctcataaactcatgtgggttgtccacagaaagtgccatttctacttccaagaaggtacaatttgaaaaccctaaaaatccagactctgttcttacccttctcaagaaccatggatgcaacgatacccatatctccaaaattgtagccaagcttcctctactgctcttagccaatcctgagaagacccttttgcctaaactccagtttctaggttcggtaggcctctcccatgtgaatctcgcaaagattttggcttcaaacccaagtatattgcacaggagcttggaaaataatctaattccgacttacaatctcctcaagggtgtggtaatcggcgatgaaaatgcagcaaaggctgtcgtgaggcattgctggattcctagtgaagatttggagaagaccattgctcctaatgtcaggcttctgagagaaattggagttcctatggcgcatatctcattcttagcaacctttttctctatactggcccaaaagagtgataagttcagcaaagatgtcaacaaagtt

SEQ ID NO: 13078 - DNA, 3010 bp, Vitis vinifera
  Intron number 2 from transcript GSVIVT01031995001 (locus G SVIVG01031995001) derived from phytozome v7.0 (chr-ID chr1 3; pos 23686416 to 23689425 reverse strand)
aataaaaaataaaaatagaaaatctcctcaaccttgtgcttttgtgatcaaaatatacctaccttcatttttagcatgtatatagatatatatttcttaaaaatatatatatttctaaaaaaaaatagtgatttttatgtgctttcactgaaaatattaataaattgtattaataataataagaaatgaaattaatgattgtaattataaaaaatattattattactactaaatactaataataaaattaataatattagaatattaatattgaaacaaatattttttttattataataacaatcgtagcaaaacaaatgagtatattaaaaaagaaaaataattaaaagaaaacacataaaaaaggaggaaatgaaaaaaactaaaaattaaaattaaaattaaaattaaaaaaaaaaaaaaaaaaaaaacctagaatatgctatgtggcttttgtttttttttttttttacggacaattgtgttttaaacccataaaaacttgataattaaggtgaattcttccaaccacccataattgattacaaggatgtgagataataattgacaaaaatactcatttgactcatttttgtctttattctaccacccttcatatgtcactattctttcttatttaaccatttttagatttttcattatttgtttaaactcttttataaataattgaaaaaccaacattattttttatttttaaattataaataaacaaaatttatattaatgattcaaagactactttggaaaatactttctaaaaaaatattaatttaaataaataaaaattatcttttacatttatttttatcatattttagaagtaaataatttaatgattaaaacactgtttaaaataaatatatttactattttaatttcttttatattaaaaagtattttaaagttttttttttactattataaaataaaaagtttaattttttttaatcttctttcttctttatttcaataactttttgaacatgacttttagtaataagttatatgaaatgttacaaatttgtttcctaaggattttttttttaatcatttgaattaattaaaaaattattaaaatgagaaaaagaaaaagaaagaaagaggatggatgaaaagtttttattttaaatactcaattaaaatgttttcatataacctaattttagaactgaattatatcaatacatagtagagattgaatttttcttatataaaagggttgaaatgtatatttacttattttaaatgaaaacaagtagttaaaaattatatggattatatttgaatttggttttaaaatatttttctagtttttatttttaaaaataatttttattttatatattgtctctttttgaaaatacgtttaattaaaaaattaaaactattttaaaaaacatgaaaattgaaaaccttgtttagtactatttttttatatgaaaattaaaaaaaatcatttattcatttattgagtcactgtacaattgtattacactaattgtacaagggaaatgtattaagcgtacaaaggtgtataagactaccctttgtcaaatattacaatcaatcgaaagggaaagaatggcgttatatatctcatattctagaaatatttatcaattatgtgctatattaatcaaagtgtcattccaccaatatacagtcaagtaattcttttgtgcatgaacttattttcttcaaaaaaatatttatgttccaattcatttgctagtcctgtttatttgatttaagattttctttttcttgaagcttctagcctaaaacaaatattgaagaaaagcagaggaggattgtcttattctaatggtactcacatttttcatgctctgtttaccaaatgaaccatttataactatcgaaaaattaagaaaaaaaatttaaaacatggattttttttttttttcatattctctgttgtttcttatatacaaggcagagagcaaactcaaggatgaattctagttagctactttattagtgtgtaatttaatttttatttttatttttattttgctccaatataccaaattataagatttataattgcatattatgattcaatattttatttaatgctttttaaaatgattttatggacaattccatgtttttaaacttgtttaaattcgaacatggacaactttaatggcttgaatttcaaggcttttaaaatgattttattcacaatttcatttctttgatcaaactcatttacatggaagtaaataatttaaattatggatttgataacatctaaaacatttttggttcctcaaaagtgttaaataaattcctcatagatttaggtttttccatcaatttttccataaacaatcaacaaagagaaaaagtttatgacttttcctttaaattttttgagaaccagaatagttttataattaagaatttcaaaaagttattcaattcaaattttatttttattttttactctttcctttcttatggaagaaaaagggaatcgtgtgtgctaaatttatcaaaccaagctaatcatcatttttggtgtttttttccctttcagtgttttgtaataagtaaataggatggcatagaagatttcttatgacaaacgaagtttgacgatgactatggaaaaacatgtaaggtaaacaacaataattttaggccaatttatttttagaaatgagatcatttagaatttatgtgaagtatttttatgatactgaattaatcaaattttttagatgtttgaactctcctttggctcagcagcttgcactgattgggagtccaaggaaaaaaaggaaaattggtctattgtgtgtgctaaccaagaggacctcttcagaaggtgagcaataggcataaatctctttttgagatagttgatgcacttatttctgtctcaattttgatcatgttttcttcctgttttgacttttccaaggaagtagaatctgaagaaaggatagattgttcagatttt

SEQ ID NO: 13079 - DNA, 11196 bp, Vitis vinifera
  Intron number 3 from transcript GSVIVT01014124001 (locus G SVIVG01014124001) derived from phytozome v7.0 (chr-ID chr1 9; pos 583289 to 594484)
cagaaagtgatagaaaccatgatttacgcagcggaaacaaatcatgatgaaacaagcatggaggcaagccaaaaccatatgtaaaagactgacctttttctctgctgaaaacgcccacaatctcctacaatcttctgttgtttaccttatcaatttccggactatgatttctgagtgggcaaaaaaaacaatagctagggttcgtcactctcttttctgtttctaatatatatctcttcgatgggaagaagaccgcttttttaaaaactctttttttctgtttctaatatttatctcttcgatgggaagaagatcgctttcttagaaactctttagcacataatttgcttcaagaaaaaagatataagcgtgactccctttcccttaaaatgctcattttaaataaattagattatctatttttaattaataaaatttaattaaaaactaatctatcatttatttaaaacacataattcatgtatagtccaaacaattaaggcacaacagggaccgcaggaataaaattaacaaggctactaattataataagaattcatacaggaccagtatattctcattataattaatcacaaattataccactaaaaattcatgattgaactccttattaatcttataattccattacataataatttatgtttcccacgttaagattacagatgctatttacatcaaacaaattactgacaatttatttgagcaacaatagatcttcaagatagtcgcttaacttaattcatgtgtcggataaaaatccacctgcagggtttacactatgaaaccttataagcttacttaaagtgcatcatcaatctctataccgagacgtggattcaatcattatttaatacatcgcaaacataaagcgtctttgtccaactcatcgagtcttatcgctccaataaatgaaactcactctttaatgaatcaaaacacaagatattttatatttgcttatattaattaaatcatgattaaaaacataaatcttatttctaatgtcttagagaatatgttttaacagtcagtacaaaacatccattctctacttggtccagttagttatatatagaatatactaacacaattattattaaattatgccgaaagattaatttatctaatgcaaatctccaattaaatacaaagaaataattgtttatagaatgacatcataataacatactattaaattcacgcttatgcatggttaatagtatatctctatcagtctcccacttagacttataaccatgcatctgctactttaacctccattccttctacatgtctttcaaaagtcgtggacgataagctctttgtaaaaggatctgctaggttgttttccgatgcaatcttcatcaccaccacatcacccctttgaactatgtctcgtatcaagtgatacttacgctctatgtgttttgcccttttatggctctgtggctctttcgagtttgcaaccgccccgctattatcacaataaagtgtaataggcgattgaaccgaaggaaccacacctagatccaaaaggaagtttctaagccacacagtttccttggctgcctcagaggctgccacatattcagcttccatggtagagtcagcaacacaagtttgcttgatactcctccaactaatggctccacctcctaagacaaaaacatttcccgaggtagatttccgagagtcctgatcggattgaaaatctgaatctgtataccctatgggcacaagattttctgactggaaaactaacatataatctctagttctttttaagtacttaattatatgtttaactgcagtccaatgttctctccccgggttagattgaaatctgcttaccatgacaacagtaaaacagatatcgggtctagtacacaacatcacatacatgagacttcttactgcagaagcataaggaactgccttcatgctttctatctcttcaggagtcttaggagactgatccttagatagaacgattccatgtctaaaaggaagaaaacccttctttgaaccctgcatgttgaaacgattgaaaatagtatcaatataaagtgcctgggataagcctatcatccttttcttgcgatttcgcataagcttgatcccaagaatatgagcagcttctcccaagtccttcatatcaaaacgctgagacaaccagtccttgaccgaagtcaacatacctatacaatttcctataagtagaatatcatccacgtatagtaccaaaaacaccactgtggaccctcacccgatccaccggaccgacgcgactcgcttttaaaagaaaagaaagaaatgaaaaagttggtgtattctagttttgaaaacccgcccttggtgaggaacggtgttgtttggagtcgccacttactttttatttttgtttttaaaatggggaaaattaagtaagaacaaaaacccctaatgaccccagtatggaaaaagcggtctacgaaaactagattctgggtccggggatcaggttacccgttgggaaggtacctcatgcgaggtagcacccctctaggtccgaaactcggtctttactaatgaattgggtatgtgggagcatatgggtcaaaggtcaaatgaaaccctaggctaaatagatgtcatgaatcacacaatcctaattggtatttgacatgcatatgaattcaaccaaacaaaacgatgggtgcatacctgtggtccctagccaagcgctgcataaaaggtcagccaaacacagataaacacataacaaacattcaagattaagcaccatgcatgcatatgaattcaacaaccaaagccaacgatgcgtacttgtggtccctagccaagcgctgcagcaaagggtgagttagtcacacaacaatgtattcaaaatcaagcatcaaagcttgtgccaaaaaggaggatagctggttgaaatgaggtaagggactccccaaatgtcatacaaatcgaactagactcatctagaccacaccacccataacttcaaaattgcccatactaactgaaatcaaatactgacttaaaccttcaagatggctctcaagtgccctatagcaaatgggtttgagcccccatggataagggctcgaaaaatgccaaaatcgagggctacctaaagtcctccagcagaacaggtttaactagttctcaactggtacaacccattgagaagaattcccaaatttttctagaaaactcctaaatgagtgaggattcaaacaaaagaaacgacactcaatcccgagcccggatgagtgagaaccagacaaagaaaggcaggtgctccttatggctgaaagaggcagccagctatggtgctgaaccgattgaaccggttcccaaccagtacatccggttgataaaaaatcccaaattcggtcattaagttcctaagtgattaaggaagcaaacaaaagaaacggttctcaatcccgagcccggatgagtgagaaccagacaaagaaaggcaggtgttccttatggatgaaagaggcagccaactatggtgctgaaccgattgaaccggttcccaaccagtacatccggttgataaaaaaatcccaaatttggtcagtaagctcctaagtgattaaggaagcaaaaaaaagaaacggttctcaattccgaccctggatgagtgagaaccagacaaagaaaggcaagtgttcctcatggctgacagaggctaccaactatggtgctgaaccggttgaaccggttccaaaccggttcagccggttggtaaaaaaatcccaaattcagtcagaaagttcctaagtgattaaggaatcaaacaaaagaaacggttctcaattccgacctcggatgagtgagaaccagacaaagaaaggaaagtgttcctcatggctgacagaggctgccagctatggtgctgaaccggttgaaccggttccaaaccggttcagccggttggtaaaaaatcccaaattcggtcagaaagttcctaagtgattaaggaagcaaacaaaagaaacggttctcaattccgaccctggatgagtgagaaccagacaaagaaaggcaagtgttcctcatggatgacagaggctgccagccatggtgctgaaccggttccaaaccggttcagccggttggttaaaaaatcccaaattcggtcaggaaattcctaagtgattaaggaagcaaacaacaacaatcatgtgtggcctttattgtccacacccaagcaatacaatcttcatatcaaagggaagaaaaaatgatgaggaaggagaaaaagcatatgaagacgaggaagataagttgtaagtaaagaaaattcagcatgcttaccttagaatctccaccaaatatgatccgtgcatgccaatgatgacttccaaaactgagaggctgtcactctcctcttaaaaaaaaaccacagtgctgaagcttcccccacactctcaactcagaagatgctactgaccttttgtttttctcaccaacagaatttcccctctccaaaatgtccaaggtcctttgctctcctatcctctcaccttttatactcatacccctcttagcatttgagcctcctgggttccttcccctttagcaccgaaattcccttcatcagcatgggaaccacacccctcattacttctcttagacttacaaggccagctcactcccttcagttttttcagcttgcttcaccaccaagaatccatatggattcgtggtgggctgcaaggaacccaaaccaaggcctaaaatggacccacaacattgcccaaaaccaatctggagcttatgggcctgatccatgtaggatttgggcctcaaaattactagaattagtgttttacctcagctgactcaatgaaccggctgaaccggatgccaactggtcgacccgatggagaaaaattctgaaaatttgacagaatgttcctagtagagtaaggaatccattaaaaaaacggtgcatgattccaagttcggaagagggagatatgatcaaaacaattaccaaaaatcagtgttctacaccggctgacctaatgaaccggttgaaccggctgccaaccagccgaccggttgcaaaaaattttgaaaattttacagaatgttcctggaagaataaggaatccataaaaagaaacggttcttgattccgagtttggatgagggagatacgatcaaaacaagcccgagtgctctgaacctcaacatgcccctataaaccccaactaagctaaaacattgggatgaccccacttccttcctatagcgtgatgtgaacgactaggaaaatggccatggtgaccctcgtaaatgaaccacatatgcaccacaatggaccacacacaaacccacacgaggctcggacaccgactaagcccaaaaggggccctagtggtgtcatatgtgaacgatgggtggatatgacactagaaggataaatgctagtgtcgagggacaaaattgagggtctacaaccaccttcttaccattccacttcttatacacgcaagactcatcatgacactgatcaaaaccaaaagtcttgatcgtctggtcaaaacaagtattccaagatctagatgcctgtttaaggccataaatggacctattcaatttgcatagcaaatgttcttgcccatttgttatgaaaccttctggttgcttcatatagatgcattcatcaagacttccatttaagaaagctgttttgacatccatttgccaaatttcataatcgaaataagctgcaatggataagagaattctaatagacttaagcatggctactggcgaaaaagtttcctcataatcgatcccttctttctgagtataccctttcgcaacaagcctagctttataagtttgcacttttccgtctatacctctctttttcttatagatccacttacatccaatgggtttcacccctttaggtggttctacaagttcccagacttgattagagtacatagactccatctcatatttcatagctaccaaccacttatcaacatctttatcttgtagtgcatcatcgtaacatactggttcggtattcactttttcagggattctatcaaaagcttctcccaagagtgtatatcgaaccggtggtcgtcttgttctctcattacgacgaagtactacaggttgttcagccacaccttcatcttgctatggctgtaaggccgacaagtctatgactggtgggaccacatcctgtacttcatcaatatgttcttcaaacggcacatgtattggtgcttcaacattttcttcatcaccaataggcaatgaaatgtcagaagtttcaaattccggtccactaacatttctcccaccacgttgaggtaacggaatgtcagctccgaccatgaatggttcaggttcatgttctgatggaaaatttctagttggtatgctgtctcttctcaactcatttaaggctaattggcttttgggaatatggtttctaatatagtcttcctcaagataatgtgcattggtgctaacaatgatctttttatctttaggactataaaataaaccacctttcgttcctctaggatatccaataaagaaacataattctgtttttgtttccaacttatctgttttccctttcaacacatgtgctggacaaccccacatccgaacatgtttcaggctgggcttacgtccagtccacagttctgtaggagtcttaggtactgacttagaaggaactaaattcagaatgtatgctgctgtctcaattgcatgtccccagaatgaaattggcaaatctgaataactcatcattgatctaaccatttccataagtgtcctatttcttctttctgctacaccattctgttgtggcataccaggtgcagataactgtgaagtaatcccttgttctgataaaaagttaatgaattccctagagatgtattctccaccacggtcagaccgtaatgtcttgatatattttccatgtcgcttctccgtttctgccttgaatgctttgaatttctcaaaaaattcagacttacggcgcaataagtaaatatatccataccttgagtaatcatctgtgaatgtcacaaaatactcaaaaccacccttagcttggacactcattggaccacacaaatcagaatggattaattcaagaacatcgttggctctattaccctttaagggaaaaggtctcttagtcatttttccttctagataggattcacacgttggtagtgcctccactttcaatgaactcaaaggtccatctttaaccaacagagaaattctatctaaattaatatgaccaagtctcaaatgccaaagataagtatagctcaattcaataggacgctttcttttcaatggagcaacaatatcaaagttatttacttcagaattagtaagttgcagttcaggtgtaactttaagaatatataaaccatcaattaaagagccagaacatatcattgttctctaaatttaataacgacagaatcatcataaaattcattaaaacaaacagaatatctgttcttactcaaactagaaacttaaatcaaattccttctaatcgaaggaacatacaagacattctttaaagtcaatgttctattattcttaaaattcaaagcaatgtttcctacagctaaaactgcaacttcagtgccatctccaagaaaaatgctcacttcccctttacttagctggcgtgtttcctgaaacccctgcaatgaattgcagacatgattagtggctcctgagtctacacaccatttgtgtgtagtcaacaccgctaaacaagtttcaacaaccagtaaatgaaaaggagatgtaccttgctttttcttggctagccatgtcggacattgtagcttccagtgaccaggttgcttgcaatgaaaacacttacctttcggttttttcacaacaccatttacaccattagcagcaccgttgttgttcggcttaacatttttctttttcttaccctttttctggacagatgaagaagctcgctcaatgttaagcacaacaggtgcagctccttgcttaataatagtctcagcagctaccagctcattcagcagtttagacagagtaaaatccattttattcatgttatagttcaaacgaaactgctaaaaacagggaggcagagtgttcaagaccatctcaatctgagtagccttgtcaacttcagcacctagaacctccatgtcattcagaagactcatcatcttcaaaacatgagttcttacttgagttccttcctccattttagaagtcaggatctcccttagtgtgttctgccttactgcactagtttggtctccaaacatctccttgagattttctaagatgtcataagctgtatccattttctgatgctgatgttgcaaaacatttgacatagatgccaaaatgtaacatcgcgccatctcatcagctttaacccatttctggtgagccttaatttgatcttgagtggcatcttcaccgggtttttcaggacacacttcactgagcacaaacttatattcttctgcagtaagcaaaatgtccaagtttcttttccaatcaacatagttaggaccctcaagcttgttttgggttaagatattggctaagggattgaaagatgtcattctgtcacaagattatgcataaaataaaattacagcaattcaataataatcaaaaactgaatttaaatcaagattgcataataacaataatgatagcaaaattcatatatgcatcataacatccatggacagtaatctcgatggagaattaaactaaacatatgttatgcatataaaagcaacataagatcaacatgtaccactcgatgggagaaaacatgcctcttaaatataaatgtgaaattgtaacttctagtctatgtccctaattaatttactcagatagagagataaacaaatatagacaatactagaagagttacaatgattacatcaaaacatatcatctgccgatgaggaagaaaatgtaagtaatcacaactagcaactcttgaaatactcacaaattaatggaaataaacgagctgctggtttactaaaacattcatgttatcaaaaccaaaactgcagcaagcatgttctgatttgcgatagaaaaataaccttacaaaaatcagcaataaacaccaatgttcagccatgtagcattctaattattgtcttttgcgcagtctacaacaacacaatcttattgcagaaactcgcatggcatatcaccaaaatcacaaatgaaattatgcatgacattcggatgaacagctgtgaacttatgcacttatatttaaaaaattacagccattatcactcttgatttgcggtaattagaagcattcaacaatacaatattataattgaagaatttgatgaaaacggcagccattaacatccttatatgcaatataatattataatagaagcatttgatgaaaacggcagccattaacatccttatatgcaatataatattataatataaaacacccatcatcatgccaatctttgttgaattcaaaaagaacaaaccatgagcaatataatattaataattgccaatctgcgtgttaacatcaatgaacatatgcatattcatataacaactgcagccatttgcgttgcaaatagcaaacacccaatttccgtcattcaaaatctctctttaacagcaataaacatgcatcaatctttagtgattttgaatcgtaaaacatccatattatacaatagatgaaacacaaaaacaatccatcgtaaatatgagaatctatataaaagatgtttagctacctccaaacgagtttcagaccaggctctaataccaattgatagaaaccatgatttacgcagcggaaacaaatcatgatgaaacaagcatggaggcaagccaaaaccatatgtaaaagactgacctttttctctgctaaaaacgcccacaatctcctacaatcttctgctgtttaccttatcaatttccggactatgatttatgagtgggcagaaaaaacaatagctagggtttgtcactctcttttctgtttctaatatatatctcttcgatgggaagaagaccgcttttttagaaactcttttcttctgtttctaatatttatctcttcaatgggaagaagatcgctttcttagaaactctttagcacataatttgcttcaagaaaaaagatataagcgtgactccctttcccttaaaatgctcattttaaataaattagattatctatttttaattaaataaaatttaattaaaaactaatctatcatttatttaaaacacataattcatgtatagtccaaacaattaaggcacagcagggaccgcaggaataaaattaacaaggctactaattataataagaattcatataggaccagtatattctcattataattaatcacaaattataccactaaaaattcatgattgaactccttattaatcttacaattccattacataataatttatgttttccacgttaagattacagatgttatttacatcaaacaaattactgacaatttatttgagtaacaatagatcttcaagatagtcgcttaacttaattcatgtgtcggataaaaatccacctgcagggtttacactatgaaaccttataagcttacttaaagtgcatcatcaatctctataccgagatgtggattcaatcattatttaatacatcgcaaacttaaagcgtctttgtccaactcatcgagtcttatcgctccaataaatgaaacccactctttaatgaatcaaaacacaagatattttatatttgcttatattaattaaatcatgattaaaaacataaatcttatttctaatgtcctagagaatatgttttaacagtcagtacaaaacatccattctctacttggtccagttagttatatatagaatatactaacacaattattattaaattatgccgaaagattaatttatctaatgcaaatctccaattaaatacaaagaaataattgtttatagaatgacatcataataacatactattaaattcacgcttatgcatggttaatagtatatctctattagaaagacgagcttcaacatcgctcctcaaacaaatcatag

SEQ ID NO: 13080 - DNA, 4430 bp, Vitis vinifera
  Intron number 3 from transcript GSVIVT01016046001 (locus G SVIVG01016046001) derived from phytozome v7.0 (chr-ID chr9 ; pos 17857706 to 17862135)
gaggtaagtgtttgagttttgtatcttctagatttgttatgattgtcttttcctatgtttcttgttatttcatttacagtctcctacaattgtagctaactttattttgcgtttctttcttgctgtttacgcatcttcctagaactaaatctaattcattctttctaggtttctttagttggctgatcctttcttaatgcctttttatcacatgaaccatacaatggctaacatgcacttcttagcaatttagaaaggcatattttgcatacattaaaaagaaaaaaaaaaaaaaaaaatccaacatttgtgctgtgtagtaaccatgaaaattgtttcaaataaagcattggaagtgggagcatatgttcaaaatggtcaaagcttttcttcgctacaatgggtttccaattgtgccttcaaaaaactttatcctgtttggaatgtatccactttgtttttttaccagttagtataatggttagctttctgcgttattcttttgtattgcacatgcatcccacccatgtattggacttcttactctcatcagtatcattataaacttttccaaatttaggagagagtgattttcaacatagctaagcacaatcataatcaaaaatggttttgtgagcaccatgatgctgtttagggtgggtttctgttcaattcaaattactaattgcaccatacacacaacagcaataactagtgatgcacaaaaagtgaactatcataatacaagtacaacaaagatgtcagcctcagaccctaaacaacactagtatcatgctattgcttttagaatgaagctgctgcttgataccatccagaaagtgtgacgccatgtttctaaatcatctcacttgtataggtctctatgatatatcagaatttagaagcccatagagcctcttttatttttatccttcaaaataatcaactcatcttatgtcagtagtaaaagatgatgaaacaaaactaaatgctagttacttggtactaatcaggaatgcatgaaattatgacttttactgtatctaattttttcatctacacacacccatagtaaggtattctttacaaacaatttgatggaagggtgattttaatccactttcccattttcacatttattattcaatggtttcatgttaacaactttcctagaacttttaactattagggcatacttccttaaaagctaagttattagaaattgaacccacaatatttatcaagctaaaacccacctccatatgcagcctcatgcctgcatgtggagagaaagcagtggtaccagtagaagataagtagatagtggagtagctgtaggagagacttgaatgtgagacctcttgctttgatactatgttcagatttcaactttcttaaaagcttaagctatttggatttgggccccacagtgtatatcaagctaacaaatgttaagtggtcaatcacaactacagcttgcctgtcatgatcttaaaatgcatgcatggagtctcagaggaaaaacataagagttggcctatctcaatctccctaccattttggtgaaatgatagaaagagtgctctctccctcttacccaaacaaaaaagacaagaaataaatgtgatcataccaaaggcactacattgagttaggataatccctggaatgcaatcaaccacctttttagtaatggctaggcaactttaccttgtcggaacaacttaagctttgcatcatgacctaagtggccgaagatagcaaaatcaattatttgtgtgcacttcaacacaagttggcatttgggattgattgcagtttctgcaagcaaaaaagataaggaacctctatatgtttttcttgttggtcgtcttgaaaagcagttatgcaattcaaaacatttcatttttcagttaaaagtgaacctcagttcttatcttttaaaatgtaccaatgagttgtgctgacacatcatgcagcttggaaattaataatcacagcttgctctgtctttgtttgttaagatgttgttagttttgcaaaagctttgttatacacagtgactaactgcctttagccttctactaatgacctaaaagatttgaaataaatcaagttgactctattcaatgctagttggatacatgggtcccaaactggactggatcctctatttctgatgagaggtcggtactaactgatagaaatattctgagaattttggtctggggtggatgtaggatgtttacttatttatgcacagattcttctaattgaatctgatttagtggagtagaaagtttttataaatgatgattaaaacttggaacaaaagttggaaggcttcagattttgaatttctgtcctctgtgaatttgtctaatttgatataatacttcatgttgatgttatactttgtgttgagttagtaaaaacatgaatacacacacatacatacatgcatatatatgtgtgtgtatatatatatatatatattgtagtttcttctctaaacctatattattccaagtcaaagcctcctgtagtgggaaaaaaaattatcttagaattgcgacatttatgagttagtaccaaggacaaaaatttcagtaaatatcggtggtatattgcccatatattgcgtaatgggaagcgtggaaataatatcaagtggtgatatatcgagcagacaatattttggaaaaaatcgccaattttttcatttaattggctttagctgcatttttttgccaatatttcagcgataaatcaccgattttttcaaaaaaatttcctaaaattcctcactgcccgctctgcatgctgttgtgggccccaggtcagtcttgtcatctacccaggtgcgttagtctcctcatctagccctgcccaacacgcgtgcatcacatgagtgctgctattggaaaaattaaattttgtgattggagtggtttgaacccaagacctcacgtttgaggggggaaggccatgccacccagtcaacctatgtttttgttattttattgatatatctttatatatataacattaaaattattatatatagtattccaaaaataaatttcttaatacttttatatatatagatatatatatacatattataaattataggtttataaattaatacatatttttttgtgtatatagatatcatagaatcaaattattataaataaattaattttaattatcatgtcttttgtataataactaaatacaaaataaatatcaattaataaataaaattatcaacattttaataaaaaaaaaacttagatatgtattatcattccttctctgtcattgaatatatccaaattagataaatatatataaaatatgtttttaagttataaacattattgttgaatattataaattatattatgtatgcgttaatttcttcaacaaaacaactttaaaatgtatattatatttctaatttcatttgtaagagttttttcttacattttcatgagttttgatcaatttttgacccatctatattttgtgtcaaaatatccgctaatatttctccgattcatccataatatcgaagtaccaatatatctgtgattaccgatattttcatccttggttactactaagggtttagagtctgtcacagtgtacaacatgtatgtctctccactgaagacgtatttattccaacagaatgcaccattattttaactgcaatttcttttatgggcctttttttatctttttccggaatcaggcctgaagcctcccacattcccaccccaccccttcccgcttgagcttggcctcagatgtgttgtgacagttctgaaaactatttttacgccaaccatctatgtttagcaactaccaacctttagtgtctttggcctggggtatatctgtctgatgcaagaggctcatctgaattttgcaaaatgttcttatatttgactgttgccatggttatgacgcctcactcagcaatggcccatacttctttctactctttagtatagaaggatatctggtgcttcttgaaaaccttcacaggatcatgtttgctgcttacccacgtcaacattaggcagtaactaaaatgggatttattcttcttatacaggttaagaatagccatgcccaacatcaaaggaatctttgttttttttatacatgttttgcctttaggtggtatacaagattcagtcaacaatttgttgaatttttccatccaacagagattgtgtaaacctttttgtgaaccttctgtttctctaagttatgctgttgaattaatctatttatctatatataaatatatagatagatactggtaatatctggccccatggtttttcaactgccaagtctattgatttgcaggtgcaggtgttgctaggttttgcgctaagtaccttcacgaa

SEQ ID NO: 13081 - DNA, 10522 bp, Vitis vinifera
  Intron number 3 from transcript GSVIVT01013623001 (locus G SVIVG01013623001) derived from phytozome v7.0 (chr-ID chrU n; pos 1816429 to 1826950)
tagttattgtagggaccccacactttgagaacacgtggcacgcatcttgccgtgacacatggcacgtatcttacagtgacacatggcacgcattgtcatccgggtcaccctcatccggaccttcctataaagcacacatggcgcaccttttatatccggactgcctcaaggaagagcaaacgacgcttacaaagcataggcatctgaacggcttccataaatacgtccgctccacaatacatccggataaccaacatgggctatccggatatgattgtccggatcattgactaaagtaaagcgagtcttacacactatcgcaacaaaccagccatggcccacgtcccatcacctgcagagtgaaaggacgagttgaggtgacaacaagtcacttcccacgatcattctacatgatcacttcccacgatctctgacagcagcatcacctaccacggtttctgacagccgccagtagggtggcgatgaccatgctgcctccgaatgtcatcataacaaacataaaatatttcctcgccattaatgagaggaacagtactcctggcactatatatgaaccttcacacgaagaggaaggtaatctccaagtacctagtaaaaggccaactgatttatatctccctctcttaaccatggctaacaaaaccatcggagggtgcgtccggacaccctgtccggatgtcttttgcaggtataacgactgaatcaagaacctttgagggttgagatcgcgtgtccatccattcagcaattgcgtggatcgtcagggactcgaggtatcaacattggcgccgtctgtgggaatctttatttttcgtttgattcagtcactgacaaagatggtcacaccttcccgaagccgatcatttggtagaggagtggaagataattttgaatggcgtctagccatcaaaaagagacagttggcaagagaaagacaactgaaagctctcctccaggagacagaaagattgagagaagaaaacgcatccaggcctcaacatcagggcctcctcgacgtcagcattcaaggggccaagtagcaaactcaaggcctcaacaagaatcggaatcagtatatcctgggacaacaggagctatcccaggagcatgcaacgtaaggcctcatgagccacgcacgcctatgccccgagctccccgtgaggaaagctcagactctactcacttttcagcaaaaagacaacgtgataaaaaatcccagttgtcaaattcgatgcgcgcaagactaggcacgcaagagcctggaagatcaaggccaccaatggccacagcctgggcaccacgccctgaccccatggccacccccatggtgcaaaacgtttacccgcatcgtgaccccgtagtcacccccgagatgtggaacattcattcgcaccaagcggtacagcaggctgggggaaaccttccaaatgagccacccattggctccatcagcagaaggctggatgacatgctctccacgcccttctgctctcatatcatccattacgagcccccaaggggattcctcgtaccaaaattttccacatacgatggaaccaacgatcccttcgatcacatcatgcattatcgacagcttatgacactcgatattggcaacgatgcactgctatgcaaaatatttcccgccagcttataaggacaggccctctcatggtttcatcgcctacctcccaactctgttggcaatttcagggacctgtccggagctttcgtgggacaatacttgtgctccgcacgacacaagcaaaatatcagcaccctgcagaacataaaaatgcaagataacgaatccttgagggaatttgtgaagcggtttggccaagccgtactccaagtaaaggcttgcagtatggatgctgtcctacagatcttcaaacgaagcatctgtccaggcactccatttttcgaatcactggctaaaaagcctcctacaacgatggatgacttattcagacgagccaacaaatattcaatactcgaagatgacgtacgtgcagccacccagcaagttttggttgccggacggccatctagaagtgatgcggagagaaatactaagcctccggatcgaccaaagccgtctgaccgaaggcaggaagggccaagtcgcccggaaaggccgcctctcacacctctttccatatcatatgaaaaacttctccctatgatccaaggcttgtctgacttcaggtggccaagaccccaaggaacagacccatccacaagggatcgtagcaagagatatgccttccacaaggaacacggtcacacgacagaaacgcgcagaagcctccagtatctggttgagaagctcatcaaggtaggacatctaaagcaatatctccgctcaaatactgaaggaaaagtcgtttctcaacattacaatcctggagcccccagggccccagtcgccctcaaggccgttataaactatattaacgggggtccatctgacgaggaatatgactctaagcgaaagaggcaaaaattgttgtgggccgcatcagtacgcgaacgcatcaattccatccggcctgggctaattggagggggccctcgccccatagatgggacaatcattttcccaccagtagatcccacccggacactgcaaccacatcgcgacgccctcatcttatccctggaaattggggacttcgatgtgaggcgtattttggtatacccaggtagttcggccgatcttgtgcaagcatcagtcattggccacatgggacacagtctcacaggcctcgaaaaccctggacgaatcctatccggattcaatgggtcttcaactacgtccttgggagacattgtactgccggtcaaagctggcccagtcaatctcaacgtacaattctcggtggtacaagagctatcacctttcaatatcatcttggggcacacatggcttcactatatgaaagccatcccctctacatatcatcaaatggtgagtttcctcaccaacgaagggcaaattaacctatatggcagccatctggccgctcgccaatgctatcagatagcacgagaagcaggagccaaccaggaggatgcatctccccctgaacccagccatacacatgaccaatagcaattattgggtccggcggacaaagatcccccggcagcagatcccttacaaacaatccaaatttcggaggaaaacactcacctcatgaacatcagttccctcatgacaaccgaagaaactcagagcatgcaaaacattctcagacagaatcatgatattttcgcatgggcacattctgatatgaagggaattcatccctctattacatctcacaggcttaacgtcttttcaactgccagacccgtccgacagaaaattaggcgctttcacccggatagacaaaaagtcatctggaatgagattgacaaattgctcgaagccggattcatcagagaagtttcttatccggattggttggcaaacgtagtggtggtacccaaaaaaaaaggaaaaattgcgagtttgtgtagattacaccaatctcaacaatgcatgtccgaaagacagttttcccttgccacgaatagatcaaattgtggattccacttccgggcaagggatgctctctttcttagatgccttctccggatatcatcaaatccccatgtccccggatgatgaagaaaagacagcattcataacgctacacggcctctattgctacaaagtcatgccattcggactcaaaaatgctggcgccacttatcaaagattgatgactaaaatcttcaaacctctgataggccacacggtagaggtatacattgatgatatcgtggttaaaagcaaaacccgagagcagcatgtccttcacttataagaagtttttcacctcttacgaaagtatgacatgaagctaaatccttctaaatgcgcctttggcgtaagtgctggcaaatttctgggatttatggtcagccaaaggggcatagaagtcagcccggatcaagtcaaggcagtcatggaaacaccccatcccaggaacaagaaggagctacaacggctcacaggcaagctcgtcgcactagggcgttttatagcccgcttcactgatgaattgcgacccttcttcttggcaatacgaaaagctggagcacacggatggacggacagtttccaaaacgctttcgaaaagattaagcattgtcttatgcaaccacccatcttgagcagccccatcccaaaggaaaaattgtacatgtatctggcggtatcagaatgggcaatcagcgccgttttattccgctgcccctcacccaaggagcagaaacctatctactacgtcagcagggcattggtagatgtagaaaccagatattcaaaaatggagctaacagccttagcccttcgaagcgctgcccagaagctccgcccctatttccaagctcatccagtgatcgtactaactgatcagccccttcgcaacattctgcacaagccagatttaaccgggagaatgttacaatgggccattgaattgagcgagtttggaatcgaattccaacccagattgtctatgaaaggccaagtaatggccgacttcgtgctagaatattcccgaagacccagccaaaaccacgaatcaagtaaacaagaatggtggactctacgagttgacggagcctcacgctcatcaggctttggagttgggctcctactacagtccccaactggggaacatttggagcaagctatccggctgggattctctgcctctaacaatgaagcagaatatgaggccatcttgtccggattggacctcgcccttgctctatccgtctccaaactctggatctacagcgactcacaactcgtggtaagacatgtccagaaggaatatgaggctaaggatgcacgcatggcgcgatacttagctaaagtaagaaacaccttgcaacaattcaccgaatggacaatcgaaaaaatcaagcgagttgacaataggctcgctgacgccttggccggcatagttgcctccctccctatcaaagaagtcattctattgcctatacatatgcaacccaacccctctatcgtagaaatttccacctgcaataccattgaggcaccccaagcggacggccaagaatggacgtatgacatcacagaatatatccgaacaggcactctacccggatatcccaaacaggcacacaaagtccaggtgcaagctgcccgtttcaccctgattggggggcacctgtacaagcgatcctttacaggaccttaccttcgatgcctagggcattcagaggcccagtatgtgttagctgagttgcatgagggaatatgcgggaatcattcgggagaacgatctctggcacacagagcccattcgcaaggatactattggccaacaatgaagaaagacgcagcagcatatgtcaaaagatgtcataaatgtcaaagatatgctcccattccacataggccatcaacaacgttgaagtcagtctcaggcccatgaccttttgcgcagtggggcatggatatagtgggacccctcccagcagcgcctgcccagaaaaagttcctccttgttgccactgattactttagtaaatgggtggaagctgaagcatatgctagcatcaaagacaaagatgtcaccaagtttgtatggaaaaacattgtttgccgttttggaatcccccaagccatcatagctgacaatggtccacaatttgacagcattgcattcaagaatttctgttcggagctaaacatccggaattcatactccacaccacgatatcctcaaagtaatgggcaagtagaagccacaaacaagaccctaatcactgccttaaagaaaaggcttgaacaagccaaagggaaatgggtcgaggagctacccggcgtcctatgggtctaccggaccacacctggacggccaacaggaaatactcctttcacccttgcatacggtatggatgcagtcattcctactgaaataggtcttcctactatccggactgaggcagcaaaacagaatgatgcaagcacggaattaggaagaaatttggattggacggatgaagtaagagaaagtacagccatccggatggcagactatcaacaaagagcatccgcccattacaatcgcaaagtaaagcccagaagcttaaaaaatggtacgctagtccttagaaaagtttttgaaaacactgctgaggtaggcgcagggaagttccaagctaattaggaaggaccctatatagtgtctaaagcaagtgaaagtggagcctatcatttacaaaagttagacggaactccattacttagaccatggaatgtgtccaatttaaaacagtactatcaatgaaaaaaaaaagacaagtataaatggaagaaaaagaaatattttattgatatatatcaatgaatgtacaaagaggtcttcggaccacgaaagtacaaaaagaagattacagcaaaaagttgcaaaaagataaaagctatcagggagcagccttaaagtttcttctcttcacccggagaaattgaagggacatcccgctttatgccatttttcttcatacagcagcgatagccgaagatgaaggtgtcatccacttgtttttggtagtccgcttcaagttcctccctctctgcagcaaactcccgttctagctcttctttttgcgctgttaagcgcagctgcagatcttctttctgcttcttttcaatagaagcctctgtccggagttgcctcacctcccccctcagccaggctatctcatcctctgcctcatgcaggcgggcgatcgatgattcctcccggcccttagcctcatccaaatcctcccgaagggcttcattgtcctctcgaacggtagataagctggcttcagccccctccaatctcaggcgcaactggttttcagtatctttgcgccgagtggcgaaggccttcatgtaatcagtggtccgtagcaggtcagtgaaaagatcgtattgattggccatgccacggagaccactcaccagctgcaggcaaacagacaaacaagaaaagcaaagttagaaatcacactacaaacacacatcaaaataacaaagaatcaaaaaacacaaagacagtataccgattccaccatctcgaacatcttggctgaaggcataacagtggtcaagccgggtggaatttgtttcagcttatcttccaactccgcgtagctaaaagggctagcggaggtgcaagtcgcgtcattaacaagattcccactcgatgaggcgacagaaggagactcttgttccggattcggggcctcaacatttacgaccggatgggtctccccgggtgcaacctcagccgggaccatcaccgggaccgctggagtctcagttgccatctctacttcgcccccctccggatgagcgtcgtgggcagatgtgcaactaacttcgatctcttgctaacgatcttgaagccgccccaggagtccggacctcagattgcgcgctgagcgaggcctctttgaaggtggccccttcaccagaacaagagccagacggtccggatcgtcagagtgctgactctggctttctgcccctacttcctccatcgaggccgcgcaaacggcttcaactgcatcgacatccggagtaggggagtccggatggttgatggacgcagcttcctcaaccaaattcgccagacaggcaaccgctgccaaggaggtacttgaatggttcagccccgcgacatgtccggatccgcttcagatagaatgagaagcagggttcactggctcctctattattacctccgcctcatgagtaattggtggaagggcaaaatccttgggaggagtgggctccttcacccccttcccattcttcaccagcttcttctttttcgctggagttttatttggaggagaggttgctccgcgtttctgtccgggagccttacgaagggttccttcgttctttttcttctcccgattatctaggagtgctcagcgtttttcagcgtcaacctctttaaactcctggtaaatcgggagatccttcacagtataatgctccccaggcaccacctcctttggcattttcctggggagaatgttgacaacatactcttgggactcccggacgaccaccatcaggttccgcacagtaagcagcgtcttgtagtgcctctccttggcgtctatctcaaatagtttaccgagacaggcaaaagacgcattttccacccaatccacgaggtggcccctcctttccgaacctgcattgacagcaaacaaaggatgagaatactgtccggaaaaatcaacaaaaagacaacaaagtgaaagccggacaaaagtcgcaaagcaaacttacccggaatcactaaggagtagtttggagagaagggcctcgtcggatgcttcgaccccacccatgcaccccggaccatcacgtgtcccttcgcccctcccttcgtcgagtctggcagttccgtcaccaattgaagggagggcaggtgcgcggacatgctgaagatgtcagttttcgccttcttcaacgaatagacgaaaaacacctccagcagggtgaggtcgaggttgtacagcatgtttatgatgctgcatcccatcagcacccggatgatattgggatgaatgaagacgggtggaatcttggtgaaatggaggaattcctttaacaacgccgatagagggaaccggagccccgcgttgaattgttccttggagaagatgacagtgtcttgttctgctttctcagtagacacgacatcctccccattcaaaaattccacaattacgccatttggaatgcagaatcgatctcggaactcctttacgctcagtttgtctgtagacttctcatgagcatcgccaactcgggcagatgaagcagctttcttctttgaagacattttttaggccgagattgaaccgaaacctacatacaagaaatgcaacagtcaaacacagccaaccaaccccacaaaccctaaacaataacaacactcagaaaatctcgcaccaccaatgtacccattccaaaaatccttgactctactccaacaagaaacccacaacccacaaaaacacaagggggcaacggaaacccttaaaacacccagtcacaaacaacactcgcccaaacaaaccagcaacaaaccaacaaacaccaaagcgcagaaaagaaaagaacaaggcacaaagaatacgtaccgaatgtaagagaaaagcaagggttgcaaaaccgcaaggcaaacaccgtcaaaacgcaaatcaccgtcaggaaattctgcagttttactcagaagaaagcgaaggtacgtacaaagttgaagaagaaagcaatctcagaaaaaacgcagtaggaaaaaagcaacaatgggcacagtatgctatttatagggagacaagccctcggaaagccaaacgcccaacaacgccatcattaaaatgacatgctgcctgggaatacccagagtcagcagctcattataaatgcctttcttggctcccgcacccccactcgccacgtggcccaaccagacgaaaggtcgacttcggtttcaaaaatcaattattttttaacccgcccattttttctgaggcaaaataggcaagttaaaaaaggagggcattgtagggaccccaccctctgagaacacgtggcatgcatcttgccgtgacacatggcacgtatcttacagtgacacatggcacgcattgtcatccgggtcaccctcatccggaccttcctataaagcacacatggtgcaccttttatatccggactgcctcaaggaagagcaaacgacgcttacaaagcataggcatccgaacggcttccataaatacgtccgctccacaatacatccggataaccaacatgggctatccggatatgattgtccggatcattgactaaagtaaaacgagtcttacacgctatcgcaacaaaccagccatggcccacgtcccatcacctgcagagtgaaaggacgagttgaggtgacaacaagtcacttcccacgatcattcaacatgatcacttcccacgatctctgacagcagcatcacctaccacggtttctgacagccgccagtagggtggcgatgaccatgctgcctccgaatgtcatcatgacaaacataaaatatctcatcgccattaatgagaggaacagtactcctggcactatatatgaaccttcacacgaagaggaaggtaatctccaagtacctagtaaaaggccaactgatttatatctccctctcttaaccatggctaacaaaaccatcggagggtgcgtccggacaccctgtccggatgtcttttgcaggtataacgactgaatcaagaacctttgagggttgagatcgcgtgtccatccattcagcaattgcgtggatcgtcagggactcaaggtatcaacagttatcactcaaaatctgaactggaagctgc

SEQ ID NO: 13082 - DNA, 7694 bp, Vitis vinifera
  Intron number 3 from transcript GSVIVT01037454001 (locus G SVIVG01037454001) derived from phytozome v7.0 (chr-ID chr6 ; pos 13440204 to 13447897 reverse strand)
gggaatacccaaaggttagtattttgccatgctacttatggactctagtactagggaagtatgatggattcttattttggtgggtctttctggtattttctctgatattctaattttctgaagtaactctaattaattgaaagaaatatcttgtaaatatgattatccatactaaatgttattaaagtactgctatcatttttttccttttatttttgtttttcctgtgagctctgctagccaagtgctttatactaataataggtgatgaattggatttcacttatcgttaaccagtctggaagatatacataaatgtgtaggtctcttaagaaatagccatttctcatttttaccagactccattttttctttaccttagtgccatgtagttctgaaagctataatggctgaaataaaattacgatagcaatacaagaagccagaatcgccttagtgatagttttgaaaccttgttatggaattttgatatctatatagaggtacatttcctgcatttttcattattttctcattgtgaaactatacaataaagcaacaacctgcaactcgcatcaagaggatgcagacaaccattggctacctgcatgagaggagtcatcctctctgccagtggacaaaagtcccttggaatatatcaaacatggtgtttaatcaaagttgaaaggaaatttatagaaataagacctgatggcgaaaatttgggtgtttaagaagcaaccaaagtacattctcaatccctaccatttcggtttatggggtttggtgatgaaatttttttaggacccttctccttttgctagggtgattctctttggtttaagggggcaaaaatactagagggtttgagttcaggtctggggaactgggttcactaccagttgcatgtaggaggaggtggcctcatgggtatgttccttaaggatggccttcccattgatattccagaaacatcgtagaacttctattcagattcaaaggctgatatagtgataaaggttttgcaagggaagcttgccctgatgatctttagctataagttctttttgatggggaggtggctgccagggggatttcggaagtggcataagaagttaggagctcttttgataagccttccttatggcttaataaaaaattcctcttattttgtaagaatgtggggtttctttggaagggcatgaaaatttgagattctaagaatcctaatggagattgagaaaataagggtcttcagtagctcagtttgatcaaggaagagcagggcaaaagttggttcaaggaagaaaaaggaactgaaaaaattgtttagttttgtcaattatgagagcaatgctgggaaagaagcaaaccatgcagtggaaggttggttggtggtcgaggtgtctaaatgaagcatcacatgttttcttggaatgtgagaggcttacatgattcagataaaaggagggtgatcaaatcctttgttagggggaagaagtcatacatgttttctatgcaggaaaccaagactagtgctatgactattgggataataagaagcttttgggtaggtaggggtttaaattggatttctcaagatgctcgggggacaacaggaggggttatgatgatgtgggattttggagttctggaatgtttgggccttagaggtgggagtttattctatttcttgtctctttgtgaagatggttttgattgggtgttctctgttacttatggtccattgagtggaaaggagagaagggagatgtgggaggagttaatctctatcagagggctttgggaagagccctcatgcatatgcaagaattttttttttttgatcagaaacgatgaagattatattaatataagaacaaatacaggagagataaaagaaacaagagaaagagaaaaaaaccaagggaaggatgagaggtccttccttcacaaattgaacgaaggagaaaactcccaacaatagaactctaaaaacaaagagaaaccccatcaatcttcaaacttttgaaacgcaaaccccaatccaattgagttgtagaacatttagaggaactcctctaaaagcttcagtacaagaagcccatagagaagaataaaaccgaatcaaatcccataccatctctttcgttttccctttatcctcaaagatcctattgtttatctcttgccacaccatccaaatcaaagtaaggcaagcaatttgccaaagtgtcttgcctcttaatgagttccccaagcctttaaaagtaataaccaacatgtcctcaaggctccttggagggacccaaaccaaccctactagattgaacaacctgtgccaaagtccaatggtaacgggacaatgaagaaaaaggtggtcaatcgactctccatttcctttgcaaagaatgcaccattgaggacaaagggctttgtaggttcttttcaattgcaacttgtcattagtgtttaccttcccatgtgctactaatcaagcgagggccttaacctttgaagggacttttgagctccataagaacttggctggaaggaacaataaaggatttgagacttttgacaaggccaagaaaaaaaatttcactgaaaacaaacctgacgaagacaaagaccacaatcttgaatctgatgaagaaggagagaaaagcacagaactacgggaggacattaatctttgaaggagatcaatttctgaattcgttagattgcggcgaaagttaaaattccaagacagtgataaggaattgccaaggacatttgagacagtgaggtttttcacagaaataactctgtaaagatcaacaaattgagagcacaaagtttggttaccccaccaaagatcttcccaaaaccgaattctctccccattgcccaccactaggtggacaaaaggggaaaactcctggaaaacttgagcaatagccttccaaggacatccgtgtgaccatctaaccaccatgttggcgtcccatccattaggatgtgtcccatatatactcgcaataaccttatgccaaagaccactcctttctctagggaacctccaaagccatttccctaagagagcaatatttctcatagaagtcttcctaaagcccaaaccttccaacttctttggtctactaacaacctcccatctgataagatgatctttcttcccttcccccgcccaaaaccaaagaaaatccctttgcatcttctcagtctttgaagctattgatactaggattttaaagagggagaggaagtagctagggatgtgagacagacaagactgaattaaagtaatcctccctcccaaagacaaaaaggcctttttccacccatccagcctcctcgaaattctctcaaccatcggatcccaaaagccttttgtctttgggttccctcccaaaggaagacctaaataagacaaaggccactctgacactctgcaatccaaaaccgaagccaaactagacaacaactcctgccttgtgttaatacctgaaatggtgtttttttttaggttgatttttaaaccagatacttgcccaaaaaccaaaaggataatcttgaggttttgaagatgttccatggaggctttagagaaaaagatggtgtcatcaacaaactgtaacaaagacactctagtcctatcccttcccacaaagaaaccctcagttattgtagtttcctctgctctgatcatcaacctacttagaacatctgccattagagtaaaaaggaaaggagaaagggggtctccttgtctcaaacctctagaggccttaacccaaccctttgcattcccattaactaggattgcaaaacttgatgaagacaaacaaccccttatccaagatcttcatttctggttgaaccccttcctttgtagcacatgatctaaaaagccccaatccacatgatcataggccttctcaaaatcaattttgaagactaccccttcctcccctgaccttcttttctcatccaccacttcattggctatcaacacagcatccaaaatgtgtctcccttccacaaaggctccttgagagccaaagattgtttcatgaagaactttgcgtaaacgccctgataagaccttatcaattatcttatataaacttgtaaccaagctaataggtctataatctgagattttaaaagtttggcttttcttaggcaccatagtaatgaatgtcgcatttgtactttgatttattacccccttagtgtagaactcaagaaacaccctcataagatcctcttttatcacatcccaacactcttgataaactgctatagtaaagccatcagggccaggggccttttccttattcaattggaaaactgccattcgaaccttctcttcagaaaacggtctatccagccaaattgcactctctccagaaataggggcccaatcaatcccttcaatcctccaagagtcaccttcaggtttggaatagagtttcccaaagaaatttacaatctcctcagaaataacctcaatgttacttaaagtctcccccctctcagaaatcagagacttaatgaacttcctgcttcttcttccaatggccactctgtgaaagaacttagagttgcagtctccttctttaatccacttaaccctagatttttgtctccattgaacctcttcctttaataacaaatcctctagctccttccttcttaaggtcctttccgataccagatcaagatttaaattcccttcttgttcaattagatcaattctgcctaagtccgaaagaatgtgttttttcctctctcttaaatctccaaaggccactatattccactctttcaactttgatttaacaaactttagttttctcatgaacttgtgaccttcccaaccttcaaccgtacactcttgccaccaatctctaaacttctctttaaactcaggatggagcaaccacatattctcaaacctaaaaggagtcggtccccattttaaaggattagtttccaaacaaattgggctatgatcagaggtccatctaggaagggcctcttgaaaactttgagagaaaaaagaatcccactaagaagaaaacaaaaacctatccaatctcttgcaaataggatccacttgcatgtttgaccatgtaaaagcctcattccttaaagggggggatccaacaaaccactctcccttataaactcttcaaaacacctcatgttgactgttaacctagaatcacccatcttctcagatatcctcctgataacattaaaatcccctcctacacaccaccttgggaaagttagaccatacaggtcttgaagctccaaccaaaagtccttcctccacaaaggcttattcggaccatacactgaggttaaccaaaaagacccttcctcatcagagttcaactttacagttatagagaaggatcctaacaccttctctgtacacttgaacttaattgaatcccacaaaatcacaatcccccccgaagccccacaagcaggaagagtagcccactccaaacttctgcctttccaaacactgctcacaaacctcctgtcccaaattactctctttgtttcctgaagcatcacaacatctgggttttaagtacttaaaaaccttctcacagtcctccttttcttcctagaacctaatcctcttgtattccaacttaagatcttcatgtaaacaaaaacaacccgacacaaccagcacccaaatctaatcctctcctcgggttccagagtcatttttcctctttcttttgaaataaatcttatccgcagagagagtactcttgttctctccttccacaccttttccattatccctgacaattctaatcctcaaactctccaaaaccgactgaaccttgaccatcttcctaggcgtgagtcccttaacctgaaaaccttccaacgggagggtggaaggttctggctttgggaacgaagccttgcttgagacacaacatagatatcttcatgagaaaagggtggaccatggtaagtagatgtagcctctataaagatagtgaagaaataacaaatcacatcctaattcattgtgatagaaaaaaaaaattgtggaatcttattttagcgattttttggttgaagtgggtgtttctagacttagtgaaaaaccttctcctatgatggagaaaagacgaattggcacatggttcccttattttgttttggtgtatatggaaagcgtaatcgaaagatcttctgtgaggaagagctattgaattagagattgaaggagacccttttgaaatccttattggagtggtctcggatgcaatgggaatggagatcttaacaatgttggattttttagatagctttgaatgtgaatagataggtcttcttgtgaactatcttgttaacttgcttttcagatggtaattatttactaattatccaaaaaacttaaaaatctgcaaacttttccttttcttccttctcttgaatagaccttgggacttattcctgtcaattatgtgctatcctgtttgccatccaaggtaggtaggttggttagttagttttggtttttttttttttggcatgggacacattcagttgaggcatagaggctgcatttggtaaattggtctcctttatgtgaaaaaaaatgaggaattgacaaatcacatttgtcttcaccttgaggtggcaagacaccattaaatgatctctcctttgtgtaccgtatgttttacatgtttcagttgaactgtatgcttagatggatgattgttttttatcccccatgctgctgtgctccctagaattgagtgcacctttgggagcttagaaattagagtgtcagttgggtccaaatgaaataaacttgattgacatgtttatagtagtgaggatctgtgattgaggataaggagcagataccaggaagacaggttgaatattggacaaaagagatggcaggttgaatactggacaaaagagatagtttaatcatttaagataaaataaaaccagatcaactggaatggctgaaaaagttgtggctgaacctaaagaattggaactaggctttcttgagttgagttgcattaagtttcatgtttgcattaattagcatatactttaaggcaggatttcacaatttcaatcaaacttgaagtgtctatatttcaacaattctgagttcctacattaaccaaaaccagaagttttaaactgtggtcaaagcttgttgataatatgtatgcttgaatgcaagtttctggaatatcttatgattgttctgatcatgataaaagttcaatcctatagttaagcttgtggtattgctacatgaccatgtgttctcacggtgctcttcagggacactgatcaatgttgcaaatgatgtctattcaccaaaagcagaaaaatgaataaaaaaaagaagaaagtaatggtgatcttttcctaaaacatttatgtatcttctgctgtctggtgtttgatcaaacacatttttaatttatgcacacttttctttctaatttatgctgttgttatagagtccctcttttgtgtgtgcatgtgtgtccatgactcaaaaaaaaaaaaaaaaaaaaagaggtaaaaggaaaaaagaactgattcttgcagtattctcaaactaaatatatatatatatatatacatattttttcagagaaggcttg

SEQ ID NO: 13083 - DNA, 15203 bp, Vitis vinifera
  Intron number 2 from transcript GSVIVT01027754001 (locus G SVIVG01027754001) derived from phytozome v7.0 (chr-ID chr5 ; pos 7420138 to 7435340)
aagagtctcccatttgtgattgtgtttgaagtactactataatctcctcaaactaggcctacaaggatggttaaggaaaaatcactctaagcatatcattgtatttctctaataattattatgaaaaatattaattactcaccataatttcatgggatgcattgtcaactgaggtttcatcttttcgtgtgtatgtgtgagcttaaacatctctaccccatttagtcgtgtgctatcctcttttaatcatgcttgtcatgttgaaaaaaaaaatgatatttaaattattatattataataaactcatcataaataacatattgttaaaaatgatgtacaaacttgttcataatggagttatgcaaaacttttagatcctgatgtgtgattatctttttgtctagctctattttccttgtttcttttagagatgacttgtatttgatacaaatacaaatgtgaagtgaataaaagtaaatatatgattattaaaaaaatacttattagaatcttacttacgcctcttttgaactccaaaactggacaagtcatctcaaattagcataaaaacccattgatgccttatgtcttaacatttcctcatctatagcctaggcgttatggtaggctactttcattttgtttatgtagcttctatatttatttgaggctaaggatgatatataatcttttttatcctcctcaacatcaaacttttcctgaattgattcaaacaatagtcaaaaggtaagacaagaataatttcatttcatattaatgtgaaagaaaacataccaaaacaagggtccatttcttttctttctcatcaactggaacacatatccaatcattaacttgaagagacacgtacaagggtccctgagtagttttgtaaacgtcatcttttatttaatttaccaatgattgcaaaactacacaacactttgagccattggagtcttatcattttttttttttgttaaaaaaactacgagcatgtttaaaagttgtttttaaaaataattttttatttctaaaaatataaacctatttgcacataaagcttacattaaagaaataacttcaaagtgaataaaactcaatattttttcaactttcttttaaagatcttttttagaatttactataaatgttgaaataataataataataataataaaagaaacccaatgaaagcatttcctaggtgatctcataatgcctatgggatagagatgatggggccaatccatgtattttcctttgatgaacaatactaaatagctagttactatcaaggatgaaaatatcagtaatcatggatatatcagtactttgattttacgaatatatcggatatatcggagatatatcgacggatattttggaaaaaaatatcgataagcctaaaattgatcaaaatttataaaaatataagaaaaacttcataaaaatgtaattagaagcataataatatttttaaattgttttattaaataatttgatatatgtataatatgatttatcatatttgataataatattatatgtgttaataaaaaaaactataaatttcataagtatatatttattattaaattatatcaaatattattcataataatatttgtgatatttgattataatatgtctaattttaaaatatatttaatattaaaattataattcatttaatttaattgtattaaatgatataaaataaatgatgatatatgtataatttttaatacttaattaatatattaataatattaaaaacactatgaagaaaattatcacgataatttttatatttttggtattcaaatagatgaaaaaaatttatttaattataaaataattttaattaatttgttctttaaaacaatttttttaaattatgtttatatgatgaatttgactttatatatatttggtgcacattatatatcaaggggcaaacttgccccagtgttggctcgttgccaaccaaaccttttggttggggttcgagcccccgcgacggaaatcctgaggcatttttaaaagtttgaccgcattgatcctcatttgaccgcccaaattatgcgatatattaaagataaaatgataaaatgccaataaatcacgagaaataggtaaaattcacgataaattgacaaaatatcgtggaaccgatatttctctaacatatatcttgtcaagatactccgatactcgatatttcggcgatatatcaccgaaatatcgtgacattttcctccctggttactataagggcttggtattctatgttttagtttctcttgaacaaaagagtttatgatttttttatgttttatttttaagtttacaaacattaatgaattcttaagaatcatcaaaaatcaaacagttcataatttatatatcttagatttgattgtggacttcaaatccgatcttaactcaattggtagagcagaggaccgtagtggggttgacccaatagatatccttaggtcgttagtttgaatccaacaggtctaaaatatttctttcaagttaaaagattatagtgtatgaactcaatttatttgcataataaaaatattaatcattataaacaactaacacaagaagggtttttggggggcagcttcgtaagctcaacttataaaaccattgtcaatattccaattttcactactaactcaacattgaatattaaaatagatgaattacatacctttatatttgttttacaagcagtgattgaagttggtgggtgaagtcaattgttcctctacttaagtctcttaagcatggattctctccaatttggatcatcttcaccttgacttgaaattaataatatgcacaaaaaaatggtttaaaattgaataagaagatgatcaaatgaaaaaatatatggtggataagatttcggatatccatattaattttaagctagttttgtttcaaatatcatacttcacatctccaaccttagcttagttggtagagtggaggactgtagtgggattatcctaatagatatacttaagttgttggtttgaatctagtgggtcaattttttttttctaatttctttgaaaatttaactaatatggttaaaccattattccataagctacttcccatcaatataatcttatgagtcaaagctagactagattctagcatcaattagtataaaaaaaggcaggggctaatatgtgggtatagtatgccattgtaatgatgcaaattttatcaaaggattaatagtaagcatgcacacatttttcaccgatattatcctaaagagtagacatgaaaatttactttagaaaagtgtaggggctaggctttggtcttgtggtttgtttttcaccccttatgcctcatatagctccttattcatgtaaatagtagatttcaaatctaacatgcctcacttggaagactttgattggcaggacagggaggggttgcaaccacatcttcctttatagaagagaagttgaaaatttttccattattcccatcaatggctttgatgttgtattagaaaagaaaaaaaaaacacataaaagaacctaaaatgaacatttcatacaattgaaagcacaaattacaatcttgctttaaatggatccttcatcaaaaacaaactttaattaactaatttcaaagctaacccttgacatatacacttgcggttatagctatgaagctaaactaactctaaccttaactaagttgccttaatagtaattgatcagttcatttagctaaaaatagaaaacaagttaaaggagcaacaatgccctttctctttctaagtaataggcttatacctcttaagcaaaccctaatatttcttactttaagagacttctaggattttcaaaatttgcattatttaggtgctcattttctaggttagttagactaatggaatctataacccaaccctaccctaccatactctctttagccctagttgctttgtcattttttcctgctttgtaaaatccatgcagtagagttctacaagtagcaagactgagcttgtgaccttgctcttccatttgatcaagtaaccttactacctcataattttttttaacccttttctatagtgcatcttttagcacaacatgcacagttccattcaacatcacattcttacctaattgcttaaaagctttcatgaagttctcttctttgcattaatctcaaccattgtactaaatgttattttactaatgcaatatgcctacaactatgaataggcatttatcgaaatcccattacagaatctgagagaaaacgaatgtgtctacttttatgcttatttcttatcattactcattaatcccgtaggcaaaagttgcagaatctgaaaataatcttccaaccactaaaagtaggtttcttttttgtttctacttgtaccattttattacaagatggaaaattaaatcagactagatggaatatttaagaaaaattatttacagaaatgcataaatccaagggaaaaaaacgtctttgctttatttttcatttccattttttacaaattgttttactctaaggtggtttttgtttttttacttaaccctaaatagaaccttaatgcttaatagtattaaatcttaggttgtttgtttttatagtattttatttctattaagtattcaaaagtaaagaaaaaccaatatgttattttttctatttagaaaaagctacatattttggctttttctatttagtaaaaagtttataataagtcatgaaaaagtagaaaacaaacaacctaaattctgaaaacaaattgattttagcaaaaagccaaaaaaacaaacaccacctaagactcaaacttgtaagaaaatctcaaaaaaaaaaaaagatttaaaaaagaacttatcccatacaagaccatagaaacatttcattaattatgtttttaataatgagctatccacctagacaatgaggcacttatcccgacttctagctaattaagcaaaccctaagtgatgtaaggccacctctctaccttacaatacttgaatattgtgagcctcaaacttgggacctctggttcattgccaaaggtcactcatactaaactacatccctagggcatcaaatccggacctaaacctttgtttggttcctgagaaaatagagtgaaattataatttaggcttatttagcccctattaggattaatgcttctaatttctggattcttgacttcaagtttgtttcactttcaccatattaagttagattcttaggaatgaagggcttgatatgcccatgcttgcagggcacaacacccttgtaattgaggtgctctcatccttcaagctatggtgttttttagcttatcaatcatcaattttggcttttcctcaattcatttttaaactttttagttagtgatcttcttcaattgtgttgcaactaatctactaccctcagaatcattatggctcatccagggccaacagaggaagatgatgttgtctcagtggtcagtgacgcaaaatggccaaggctacacaatgtggctggataagaagatatccaagaagattgcttgggatgcatggatactaggttccaaagaaatagaatatttcatgtaacacacttcatattcaagttgctcaaacgagaatctgtttttgcatacatcatacatggtatagcacataagaagaaaaacttgtagaatatgctaatattttgtctcaccattatgggcatacccatcctcacaagaaaatccaacttaatgtacttcaaggaccaatggcgaagtgccaccatcttgagactctcccagagtaataggggtcttcctcttcaggtgcccatataaaatttaacaaataagaaaatacattgtttattaaatattaaagaataaattaaattaactataattatattccttatgattaattaaattaataaaattaattaattatttttatttaatatctaaattttttattcaaaatattaatataagaatatacacatagacatatgatattccttaatcaatccttatatatttgagttcattcttgaatttaataatcagaagaaaaaaaatataggagcaaatatataaaataaataataaatttattaaattattataagagttaattttaattttgaacaacgttaaatattaataaaaatatacattttaaagtaatgaataaagtttaatattatctactttctaaaaaaataaatatgattttaccttttaatataatcatttaataaatataaaattttaaaataaaataatgttcaaacataaccataaagtacatgggaattaattttttgggaaaatcatgtaatcatacaccaattacaaaaaatatgagattttagaactttactttttcccttttaattttagtgtaaaatggggaaaaatattatctattcatgcattccaatagtgcttttaaatttgttccacaattaccctcaaaagtaaaggacaaagtatacatcaatttaatatcacatgttaacaagtacatgtgtcatttatttttattatttctctcacatcaatatatatcccttaccacttgtcacgtttccacttttttctttttctttttttccttttttcctttcctgccaccataatccattgtcacattttatagtctttattattatttttctttttttcctttatattctttttaatatgctcatgcattttctcataaaacttctttaattttaatattttttactctctaatttctccatatttattgattttaattattttttctaacatattaaacttaaaatgataatatataataaatagttaatataaaaaaattaaataaaaacaaaatatataatggacaaaaatgaaaatattatcccaaaaataatatattctatgattttaaatattaattataaaaatacattttataaattaaggtttaaatttaaaaattctattttattatttagaagtttatgatataagattttttatattaatactaaacaaaagatttatttattttgtaaattatataacatgtaaaagtaaaaatatatttgtaatacaattttattatttacattatttttcttttaattttcattttaaatttatcatatcgaaatcacaataagggatggtgcttttatcatttttcttatgattttaacttgattgtggatctaattttttttttggttaaaatctttaatttttaattaaaataaaatatatgagaaaatatatttttcataaaaaaatgtatgtaaccttttatattaatttcataaaaaaaataggtacatccttaaaagaaataggtaaattcatgcttaggggaaccgaaaacactatcatacttatcatggtgtatatgttcctttaggacactcgataagaaattagaggtcctcgcccaccccaaaagaaactttggaaccctaagtatatccattcttagaggaaccaaaacccctatctccattatcatggttcatatattcctttggggaccatcgagaaggaattggaggttgttcccaaccctggaatggacattggaacccaaggtgcatcctaaagacaatttggtacatcctttacaaaatttggtatttatttcataaaatttggcacatccataaaacaagttggtacatccaatccatgagctaccgggacctctatattactacccatggtttgtttatttctttagggatctttaggaagtaattagaggttgttccctactccaaaacgaactttggaaccataggtacatccttaaggaaatttgatacatcgttaagaaattttggtacatccaattatcgggttatcgagacccctatctatcttctcatggttcatattatcatttgaggaccctcaggtagtgattgaaggtcattctccacctcaaaatgaactttggaactcttggcatatcatttacaaaatttgatacatcatttacaaaatttggtacatcattcataaaatttggtacatcattcaacaaatttggtatatccttaaaaatatttggtacatacaatccttgaactatcgaaacctctatcttatgacccatggtccatttattcctttaggaatatttgggaagtgattggagattgttccctactctgaaatggactttggaaccctacgtacatcattgagaaaatttgatacatccaatcattgagctaactagacaattatctccatttccatagtccattttttcctttagagaccctcgggaagttattgaaggtcgttccccacctcataatggactttggcaacattggtacatcctttacaaaatttggaacatccttcacaaaattcggtacattatgaaggatgtaccaaattttgtgaaggatgtaccaaaggttccaaagtgcattccgaagtggggatcgacccccaatcacttccttatgggttccaaaatgaaatcatgtactatccatgttgaaatgggggacccgaaacaataggattggatgtaccaaatttaattaaggatgtaccaaattttgtgaaggacgtaccaagcgttccaaagtgtgtttcgagatgggaatcgacccccaatcacttccttatgggttccaaaatgaaatcatggaccatccattttcagatgggggtcccggaaagaataggatagaatgtaccaaatttgatgaataatgtaccaaattttgtgaaggatgtaccaagggttccaaattgcgtttcgaggtggggattggctcccaatcacttccatatgggttccaaaatgaaatcatggaccatccatgttcagatgggggactcggaagcaataggatcagatgtaccaaatttaatgaaggatgtaccaaattttgttaaagatgcaccaaattttgtgaaagatgtaccaaggtctccaaattgccttccgaggtggggattggcccccaataactttcttatggattgctaaaagaaatcatggaccatccatgtttagatggggatcccggaagcaatagggtcggatataccaaattttgtgaagggtgtaccaagtgttctaaagtgcgttccgaagtagggattggtccccccaatcacttccttatgagttccaaaatgaaatcatggaccatctatgttcagatgggagtcccgaaaagaataggatcggatgtaccaaatttaatgaaggatgtaccaaattttgtgaaagatgtaccaaaggttctgtgaaaccaaggtttggttaatcttgattttgatgataacaaaacaaggtttagaactaatgactacattttaagtgtgattaagcaagacaacttccaaagtggcaatccaaagacaaatcaagccaaggagaaatcatgaagaataagaccacctcaaagagaagagtttttcaagaccaaagcttcttaagatctctttgtaaggttgttggtgcactaggactttcatgcatttcattctttatttatgcaccaaaatcatccaagagtaatattattttaaatatcttaagaattggatgatttcatgttttcaactaaaaccttgtgttaaatgattttcaaacttgtgttaaaaggtcttaagttgaaaaaggttgagtgttgagccaaaagaatggcttaaccagttcaaccggtcgaccagttgtgctcgtccggtcgaggaccggttgagggagccaaaaagtttctctcccagtggcttcctcttcccggtcaaggttgaacctcaaccggttgaggtccggtcgaggtccggtcgaggtccggttgaggcccaacggtcacttttcctaaccgctagtcaaccgatcgacccctagctcgaccggtcgaacccccaacggctagtatgactttttttcttctataaaaaggctccaaacttcattatttcataagctaaaccttcccaaatctttcttgattatatttgagccttagaagagtgtttttaagtgcaccattattccaaaacttgcatatctttagtgcatcattcaatcctagtttttcttgtatcatttgagcctaaagttctattactaggatttttgtgagatcaatctttgtatatctttagagaggaattttctcaagtgaggggtatcacttgaatggttgttcaagagtgggataactcttgagaagtgtaaagggtgcttggagccaaaagtccaagaaggtgaattggaaccataatccaattgtaaagagattggaagcttggttgaagcttcaagatagtgaaaccctcactcggttaggaggttgaggagagtggacgtaggcaaggaagtgtcgaaccactataaactctcgtgtttgcactctctcttccctaactcttttaaattatatgcaattgtgtttattttgtttattatatatttgcacataattgtctcttatttttgcatagtttaaatttgtgaaaaatagaccatcaccctatttacccccccctctagggtgattaccatagtttggattagcctcaaattcctaacaggttccaaagtgtgtttcgaggtagggatcagcccccaatcacatccttatgggttccaaaatgaaatcatggaccatccatgttcagatggggaacctagaagcaataggatcggatgtaccaaattttgtaaaggatataccaagggtgccaaagtctgttttgaggtgggaaatgacctccaattgctaatttcatatgaatgtcaagggccaacctttcaagctatcaacatgtctccatttgccttactacacaacccatacctcaaatatagtgatcctaaaggcatgcctttgacagagagtcatgcctatctttttcctattgcacatagcttaacaaaaataagtttttcacccatattcatgcgtctttcatgaaggttgtgctcttaggttgactagtgcacatagcctactaatataatggttttagcaatggcatgcctctaaaatcaaggatgtgcccttagtttgcatactgcatatagtatacaaaaataatgttatcatacccatgggcatgcctatgcaactaaaggtgcacccttacttttctttctacatataggatagtaatataatgtcattcacacataggcatgcctttcaaatggaagatgtgcccctaaattgccttctgcacataacatacaaaactaattttattgtataaaagaaattccattgattctaagggtactgtgtaaatgttcaaatgcttttccatggtgttaatgggtcaaccttccttttattgactcctcacataacacgaagccaatccccgcctcaaaatattatacatccttcataaatattggtacatccttcattaaatttagtacatccgatcctattgctttcgaatgtcccatctgaaaatggatggtccatgatttcattttggaacccataaggaagtgattggaggccgatccctacctcggaacgtagtttggaacccatggtacatccttcacaaaatttggtacatccttcattaaatttggtacatccgatcctgttgcttccgggtcccccatctgaatatggatggtccatgatttcattttagaacccttaagaaagtgattaggggctaatccccacctcaaaatgcactttggaacgcttggttcatcctacacaaaatttggtacatccaatcctattacttctgggacctccatctgaacatggatgatccatgatttcctttagcaacccataaagaagtgattgggggccgattcccacctcggaacgcaatttggaacccttggtacatccttcatataatttggtacattcttcacaaaatttggtacatcctttattaaatttggtacatctgattttattgcttccaggtccttcatctgaacatggatggtccatgatttcattttggaacccataaggatgtgattgggggttgatccccacctcaaaacacactttggaaccattggtacatccttcacaaaatttggtacatccttaattaaatttggtacatttaatcctattgttccgggacctccatttgaacatggatggtccatgatttcattttggaacccatagggaagtgattggggaccgatccctgcttcggaacacactttagaacgcttggtacaccattcacaaaatttggtacctccatccctattgcttccgggatccccatctgaacatgaatagtccatgatttcctttagcaacccataaggaagtgattgggggccgatccccaccttggaacgcagtttggagaccttggtacaactttcataaaatttggtacattcttcacaaaatttggtacatccttcacaaattttggtacatcgttcattaaattttgtacatccgatcctattgcttatggatcccccatctgaacatggatggtccatgatttcattttggaacccataaggaagtgattgggggccgatccccaccttgaaacgtagtttggaacccttggtacatccttcacaaaatttagtacattcttcatcaaatttcgtacattcgatcctattgttttcgagacccccatctgaacatggatggtccatgatttcattttggaacccataagaaagttatttggggccgatccccacctcgaaacgcactttggaacgcttggtacattcttcacaaaatttggtacatccaatcctattgtttcgagtcccccatctgaacatggatggtacatgatttcattttggaacccataaggaagtgattgggggtcaattcccacctcgaaacacactttggaacccttggtacatcattcacaaaatttggtacatccttcataatgtactaaattttgtgaaggatgttccaaatattgtaaaggatgtaccaatgttgccaaagtccattatgaggtggggaatgaccttcaataacttctcgatggtctctaaaagaagaaatggactatggaaatggagataattgtctcattagctcaagatttgatgtatcaaattttctcaatgatgtagctagggttccaaagtccatttcagagtagggaacgatctccaatcacttcccaaagatccctaaaagaataaatggacatgggtaataagatagaggtttcgatagttcaagaattgtatgtaccaaattttgtgaatgatgtatcaaattttgtaaatgatatatcaaattttgtaaaggatatgccaagagtgccaaagttcatttcgaggtggagaatgaccttcaatcactacctgagggtcctcaaaggataatatggaccatgagaatatagataggggtctcgataactcgaggattggatgtaccaaaatttcttaacgatgtactaaatttccttaaggatgtacctatggttccaaagtttgtttcagagtagggaacgacctctaattacttcctaaagatccctaaagaaataaacaaaccatgggtagtaatatagaggtcccggtagctcatggattggatgcaccaacttgttttaaagatgtgccaaattttatgaaataaataccaaattttgtaaaggatgtaccaaattgtctttaggatgtaccttgggtttcaatgtacattctagggtggggaacaacctccaattccttctcaagggtccccaaaggaatatatgaaccatgagaatggagataggggttttggttcctctaagaatggatatacttagggttccaaagttccttttggggtgggcgaggacctctaatttcttatcgagtgtcctaaaggaatatatacactatgataagtatgacagttttttcgattcccctaagcatgaatttacctatttcttttaaggatatacctatttttttatgaaattaatataaaaggttacaaacattttttttatgaaaaatatattttcttatatattttattttaattaaaaattaaatattttaaccaaaaaaaagttagatccacaatcaagttaaaatcataagaaaaatgataaaagcaccatcacttattgtgattttgatatgataaatttaaaatgaaaattaaaagaaaaataaagtaaataataaaattgtattacaaagatatttttacttttacatgtgatataatttacaaaataaataaatcttttgtttagtattaatataaaaaatcttctatcataaacttataaataataaaatagaatttttaaatttaaaccttaatttataaaatgtattattataattaatattaaaatcatagaatatattatttgtgggataatattttcatttttgtccattatatattttgtttttatttaattttttatattaactatttattatatattatcattttaagtttaatatgtcaaaaaaataattaaaatcaataaatatggagaaattagagattaaaaaattaaaattaaagaaattttatgagaaaatgtatgagcatattaaaaaaaatataaaggaaaaaaaataatattaataaaaactataataggtgacaatggattatgatgatagaaaaggaaaaaaaaaaagtgaaaacgtgacgagtggagaggaagatatattaatatgagagaaataatgaaaataaatgagacaatttatttgacatttgtacactttgtccagtgggctagtatgaagtggaaaagcccaaaaaaaaaaaaattgaaaaaaatgagtgggctacatattttttccgccaaagaaaaagaggctgtggttgtttctccacgccccttttcatctcttctcatccgttgttgaataaatagacgtgcggttgccatttcagtaaggggaaaaatggtgagcagtagcagtaacgaaattcaggcaggaaaggcatccgattatgatcgaaaaagtgaattaaaatcctttgatgactcgaaacttggtgtaaagggactactggatgctgggctcactcagatcccacggatgttcatcaatgaacaacataagactgacatgacttggggttccagggagtcctccccagaaagcgttccaatcctagacttcaaaggc

SEQ ID NO: 13084 - DNA, 8730 bp, Vitis vinifera
  Intron number 5 from transcript GSVIVT01001409001 (locus G SVIVG01001409001) derived from phytozome v7.0 (chr-ID chr1 8; pos 18790435 to 18799164)
aaccaggggaggaagaagcagaacctgcatttaaggtgaatgatcttccttgcttgcatgcacacatagagaaggagagaacgctgttttatgaatagtatttttgtttccatcatcctcaaggccgctaacttgaatgaaagaaccaactagatcattgggaattattcattttctgcatgcaatcagtgttgcaacatccatctccccaccactatcttttcgataggaagtataaaatggaaaaaatgaagaaagatgaaaaatatgaagaagactgggtgatgcttaataaaaaaatcaaagggatagaacaagagtgcaaggttcttccttgggaaaagctaacaagacatgacctcaacaagaaccaaaccttatctaaagtggtcaatagagaaggaaaagtcctcacaaactaatcaaagatgcttcttttttagttggactatgtgcctcttgattagttgatctaggcttccacatgaagaatgaaaccatgtcccttgagaatttaataatactgcaatacatttatcctacctctaagggtacctccaacagtggacacttagaaaattacaattgaagagttgcctttcaccatgagattcctagtcctctttggccaccaaagctaatacctttgccttgatggctgagccacgacttgctctcctagagtaattctgaactatcttgctcctatgatctcgaaataagttcttgatgcccatgtgatgtggatttcctagaaaatatttgtcaatattgagcctgagacaattaggatgaagtgattcagcttacatatgatgatcctcctctaatcagctaatcaaattgtaccttaatgcttagataaatattgaatgaagttccaacaaactctttccatacaaaaacctgagtgaatgacacaaaagattctatcccacatatgtcacgtctttgtgcatccttgatgatcgtagctttccttgcaagtcaaataacccacactgtggataacaaagcacaatgtcataaaactctatccagattagttccagagtttcttctaaagccttgaaaaatttaacctgcatgtgtagcttttggagctgctcaaagaatcctaccagtgggaataatctctatcaaattctaaagtagattatgaagaaaaagatggtcaagtgacttctaaactctccacatataaaacacatctagcttagtataataattttgtagtttcttctattagaagcattttgttgatgtttatcttcctttgagctgctcatcaagtaattttttttttacttttggatgaatttatacgtctaaattatttcaaaatcttgattttctaacatgtcttattaaagagccccaatcttccaataccaaagtcttgacatgggagagcaaacttcattagatgaacttgttttcattttctaaagttcaaatctccttggcacacctaggtgacttttaagttgattggttgtttctctttttgattgtgttatagtgagaaatgcctctaactgagccaaagaagcttcctgatacctagggttgtttttggaattcattgttatgtaaactacatagtattggcgtacacacttttcatccaagaatatatacttttgtaccaaaaattgttgcaagttttggtttttttgtttttgtgtgtgtgtgtttttttttttttttttggttggagatggaaacaacaattcattgaaataaattaagataaagaaggatcagaaatttttccaaaacttctgagaattgatcaaaacaaaaataagataacgaatttaaaaactcaagaaggtaaaaaatcctctgcaaaagaagtcaactcactagtttcttgcttagctaatatgtgtgacatgattaactgaataatctgcgacaaagagtggtctgaagcataaacaatatctacaacctcccagcgccatacgccatacttgatactcccacataactccttattagttacctatagaataataattgctaaatcttcctcaacttgcagttggagagacccaatgcttgactttttatgaactttccaaccatgctagaatctttgtcttgatggcctaaccctttattgtggttttggaataagctcttaaacactataaagtaatgatctctaatcacacttctaatgtgtcttaagttgtctaagtacaccaatcaaatttacctttactgcactcattagatatggaaaacacacactacatttttccttagcaatgctcttggctctagaaatgaggttctagtctagcaaagtgcaactcaagggagtaccttggaagtttcaaaaatggaaacctttgaagtaggaagaaatacatgactctacatgtaagtatccccaaaagtttctaaaagaaataattgtcatatttgttgcacttttaggatgaaccaatctatccaaactagtttgagcagcttatacaaaatccctaaagcaatagttgagtgaagaaatacaatgactttggggtttttgcacaaactatttagactagctaggctagattgggttcctcctagagatataagtaacatgattacgtgaaatctcttatatgggttttaggaatttcattagaggcaagacgctttggaatattgcttatctcactttgatttggattgtgtgacaagagaggaatgctaggatctttgaggacaaatgaaggatgccagagatgttatgagatttagttcatttcttcagttctttttgggcctttttttactgatgattttaaaggcattcctttgaatgtcattcagcctcggttggcattctgtatgtacaacactagggttgggccaacaatgagaggagcctagctgtttttttcatgagatgaattccttcttcattcttttgtgataaaaaagaagtggtgtctcaggtctttagaggtgggggcttgtacaaatatccttgtatagcagaggtttttagtgtttacatctggtttgtgcatttgtgagggaggattccttatccctctcatgaactctttaaatgtaattaatacatctcttgtttttcataaaaaaaaaaatgatgttgtgaaatcttgaatttatttgtcccctatcaatgtcttagaaataggagtagatgacttgaattcagtagaaataggaatttgaactaatttagaatgaatgtttggagatgggagtgttaggataggcttagactcaaatagtgaagagagaggaagtgtaggcgagtcaagtaaaaacaagtctgtgtccttatcttccataaatgatgtcttcccttgaagataagtcttaagaaataattttcttgttcagcaaaagtgacatttgtagggacataaaatttttgattaggtggatggtaacatttgtagcccttctttgttgaggagtaacgaagaaaaacatacttgagtgcttaaggatcaaactttcatatgttgtgagcatgaatatgaacaaaggacacatagtaaaaaattcttgggacaagattatttgtggtgttaaaatttggaaaagaatttagaaaatacatgcattggacttttgaacccaagaacccgaaatggaagtctttttataagatgagtcagctataaggacaacttctccctaatatgacgtaggtgcatttttttgaaacaagaaggcttgggtagtagcaagtagacgaccatttttcctttttgcgactcatttttgttgaggagtgtttatacaagatgactcatgaatgatactctctttttgaaaataaggtaacaaaacttgaaaaatttggaaactgagcatgaaggggttgatttcccatcgcatgtctttccagaagcaaaattttgtactatcacccactaaaaaatgagtacaaatgggaaaaattagagggaacttgagtgataaccttttaatggcacctttgcagccacttaacgacaatgttagatttccaagtattagagtgcaaactatagatactaaagaagatgctatgccataatgtgctacattccttaagaaaattctacaattgtttacctaagagatctctattcctcaaagaaattatccttagcccaaaaattctttcccaattaataaggtgatcttttgtcaaaggaaaagtctctctatattcttttaatcttaaagaccgcttgaactagagtcttcaaagctgaaaagaagtaaatgagaatgtttttttttttttaatttttttttaatttttaatatttgtatttttttgagtaaagcagataatattataaacaagaaatgccaaaataacgctccaaagtacacaacaagtatacaacaattgtctaaaggtgcctccaaaaaaaataaagggaccacaaaaaacaacggcccccttaatatgagctcaaccagtcaacaaactctactacagatggaggaccaaaatctaaaaacaacctagaccaagcctaaatattacaaagaagagtgtgttttaatctttgaatggaatgctcctccttttgaaaagatctactatttctttccttccaatttatccaaaataagcattggggagtagcccaccatgcctttttctgtttttttctcaccaaagaaccatgccatcctaaaagcatctctcttactgaaaagggaagcacccaatgcatgccaaaaaaagaaaacattagattccataatacccttgtcttgacacagtggatgaggatgtgattaatggactcttcttctatttaataaaggaaatatttttcttgccaaagactaccctttcctctttaaatgatccaaggttaaaacctttgccttagtaagcctcccaagtgaaaaagcccacctttgacagcacccaagagttccaaatcacacttactagaaatgaaactgtacttcttgactccaaagccgagtagaaggctttaatagagaacttaccatttttagaccctgtctaaatcatctcatcttcctcttccttacacactcttttctcttgcaaactctaaagaaaacactccaacatgtccatctctcaatcatttaggagcctagagaattgaggggcccaacgacccccttcatctgttaggttccaaacatttaccaaccaatcctccttagaagcatcaatggcaaaaagtgaagggaaggtaatacataataggtgatcaccaaacaacttgtccttctaaaatctcacctccacctattatcaaccaagaacgcgactctactagtaaaaaaatcccaatcctttctaatggctttccataatcttgccccataactttctctcacttccttggatcgccactctccatcttctaccccatatttacccattataacttgcttccataaagccccctattcttagtaaatcgccaactccatttacctagaagggctttgttaggtgtcgaaagattccttacccccaagctaccttactcttgtttgaacaaatgatggctcaccttattaaatgggggtttttgcttaagggcctctcctccctaaggaaatccctttgaatttgctctaacctctacctaactgttcttggagtgcaaaacaaaaacataaaatagatagacatactagataaagtgctctgaatcaaggtaagtctcccgcccttggagatgtattggtttttccacatagctagctttttgcgaaacctcttcttcaccccaccccacaccgccatgaacttaaaaggggcacctaagggaagacctatgtaagacagtggaagtgtacccatcttgcatccaaactctaagccaacacttttggacaaggtaagaaccttagagggtttttgggatactattcatttccttgcttctttttgaacctcttgcaccacaacttttaagggcatcccccttgatgtgattcgacttgattggttagtggtgtgtagttccaagggtgtgagttagcaaagagagggcgcttttgtaattaccttatggtttatggtttatagtattccttatgtttagttcttgtttgtaggaggattcttcatccttctattgtacttcttaactcctaattcaatatatcactttgttgtttttcataaaaaaaaataaaattatcttaattcctgaaactggatcaaacaccagtaaaatgaattaagattttctaaatccttgaatctagctctaaaaaagaacatgttatcatttgcaaatagaaggtgggaaccctagcaaagttgatgtaggataatcctaagctgttgaatcatatgctgatgatggaattgtggtgcactaggcttcaaatttgttagctagaattgagggggaagacttgtaggtttgggagggaaattttgtgttccctaatgctagtataaattggtatggtttataaacaaacatgcggacttgggggagaaaattggtgttaagggaagcatggttatgtgtaaaacttgcatatgaaattgcaaaaagtgaaacaataaaacaaagagataaactttagaatctcactaggccttcttagactctaattggtagagaaattaatagaatcttacttgtttttcccgggttaaaaatttggaacagcattttgttaaaatatggaaaaaatgcctgcaactcaaggataaggaatcctttataaggactttaggaagggagaaagtataatgcacaaggaactacatataaagacaatctatacaacaactcaaccaaattgaaggggatcaaagatttccaataaacccaacaaagggacctgacacccctcttggcaaacttattagttgcttaggtttctgatataaagaaatccctgaacccatactaagattgggatctctctcatccaatcttcatagtttcttgacttttgcctcttggctctagcccaggaaacgaaaactacaagatctccttcaataagaagattccctatacagagcctctatcaagccttcgaataaagttcaactttctgaattgatagttagtctgtttccctcatagtacatgggtgatgtaagagattagtgggctttgccaatcaaatggaagttgtaagctccactttgatgggctttttttaggtaatttgggccagatgtgaattaatggcttctattgagaccatttgaacctgccatggtccccatggagagtcctaagggcttagccaggaaagattcctcggttatcaaaaaaaaaaaaaaaaaaaagttgagaccatttgaagccttttctttcccctgaagcaagtgggttttggtttagcattaatattgaaattcttcacttcagtgtatgggaagagttaaaatcatgaggggtctctaaaatcatggtggaagaggtgtcaacaataggtctttcatgaatggcttgttatgatttttgaaagtggaggatagtggagttctcttgagatgtgggatgttcattcacttggatggcatatatcggaaaactacaaagccaatgagtgggtcaagaaaggagccacaacctccattggctttgtggaagatcatctttcatcatgagagtatgggtatctgaccttgttgggtgccatatattgggcgtttctcttttttctgtccttcccttcatctttctccttgtatatcttctaaatggaaggaactctcatccatcattttgaattcttttcactatctatgatactaatcttgtttcttatagaataaagccttcaagcaaggttatgatttctgcttcaatagcaaaacaaaagcccattaggttcaaggaaacccacctggatcattgttcctgatagttccctcagttcccatctgcactggcttactcaatgaacaagtgtgaaggttaagctttaggctacccaatggacaaagtaatggaatctcaccattacaagagagcaaagctgtagaaaatccttattttttggtttttccttcatttctctttttgatcattctttattttttaatttgataagcctctttgattcttccttgtatcaaagctctaatttataaatctctctaaaccaaagaaataccaacttccaaaatatgaaagatgggtgaacaaagcacaagggcccatggaaatgcactcattggatgtatcagatatttgatttggctaaggacatatttcctcttttaaatggcagcctagtccttgcttagagggaagcctctacctgtgttgtgtttgctggagattcttatcctccttgagctttgcttgttgggttgtgagttctgtgcagtcttctttatattgttctagggtttttttttttttgtttttctactttctttagaggctattctcctccttccctgtgcttctctctatcttaatgtaatttcttgtgtcctgtccaataaacaaaaactagtgaagcacagtattgtgtttaattatttatttttatccatttacaattaggatggcaatttttcttcatgtttcatatgtataaagatagtagttttgcttctgcaaatgcatctgtttattagccttttgaatgttattttttctctctaaatgaaatgcttccacaaatgtcctggggaatccatgcatgctggattagttcctgttagtccatgactgatttgctggatattgcagtttattggaa

SEQ ID NO: 13085 - DNA, 21362 bp, Vitis vinifera
  Intron number 1 from transcript GSVIVT01031487001 (locus G SVIVG01031487001) derived from phytozome v7.0 (chr-ID chr6 ; pos 18006253 to 18027614 reverse strand)
gtcatagagctgagtactccagggaaaatttagagggtgggattccatctctgggttcatgtactaatgtcctcactcagaatctttccataaatgaagagtactgctgtcaatatgttaaagaattgaagggtaaagatgactttaatcgtacaatattgtaatttttttcttcttctgaaaaatcaaaactaaattaacctttcagttgtgaacaaaatagatccgcagtggactctctgacaaaccaacccaaaccaacccttacaacatttgaaagctttaattaattttttattccttccttaaatatttaaacaaaaaataaaatagttaaaaatattggttaggtttttttttttctttgggtgcgttttgtatttgacttgaactgacgggggtacggcaatactggacccacccaacgcctcccggcccattttccaactataagctttgaaacttttgcacaattggaatattgacttgcatgttgccattctcatccttaatacaatttgctaccacttgattaccatccaaattcaacatttacgtagttgccatcttatatatataatattttctgtttagcctgtcggatcgaggcgatgtcgactgtcgactgagcatgatcgataaattgtgggtcagactcccaatggcctatatcatgtaccttaaattgagtgagcagcgataacattctgtgatcgaacagtacagtctgtgaactacaataaatgggtggacacagacggtgcgtatggcacccatgtttggttatgcaggtatgtgtaacatgagaaaaaagaaaaagaaaatagtgtggatgtgcatgtattttccatgccatagcagccacatatggtacaaatccttgtcacattccggtcttggccggtgaacatcatactcagtttttgtcttgcttggttgctttccttgaggaggaatttaagcatggtttttatgatggaaataaattgaaaattgatggtttgttaacgtgagtcaatggcatggaaagtcataaaatgcgtgagtcctgggagcaagacggcacaccagacctatattcaaaggacaacaacatggagccagaaaatcatggatatgggtgtggcatgagaatcccgcttgttccgtatgtcgactcagatttaacaccgcagagagcgaatttagttgggttgtcctaaagaagcttcaagaaaattgaatatttgaatgatcccccaataatccacaagggctttttgatgctccaccatatattgcggtaacgtgggcatagactatggtatggacgggggctttcaaattaaatcatatgaaatattccgattaggtggacaatatttttcaaagccgcaacactcgatgtatttcaattttcagcaggcaagaatcaagataagccacattcatagaccggactcccggggcttagagaaatcgcgctcttggcctcttcgtccgccccctcccccgtcaccatgccctacgccatttaatgcatggggcctcttggccgacacgttacgtaccatgcacagttcttagaccagccacccaaattttatcaattaattaattaattaaattttaattaaaaaaatttaaatacggatagtcatgttctttctcccgcaatccacagttctttaggtttttaaaaaatcattggctctttaaataatctgttctcttctttatatttatatttatgagtatttatacgatacccatctatcacgcttgattaaatattgcattcttgatgtttaaataatatgcaattttttatttatcctgaatttatttttatttttattctaaaggtcagggaagatctccaaaggcaatgataagatttggacgagtccaattaaatgtcatctcaacattttggttgtagcgaaaggaatgataagaatgagagtagtgagcatcggaagagacatcatttggcgataaaatacattaagatctttctttaagatatctttatatattttacttttgtttaagttgatgtttaaactgaaccaggtttttaaagtcataagagtagtcattatgagtaccgacaatgatataccttttgtacttataacttaccttattaacactgctcttttaattcttaaacaccttttggcatataggaatatatatcaagtaaaaatatatatatatattttcacttattattctagtgttttaaatatattctaattatttaaataataaatgcgttttttatttaaatggttgcttccaccttatactaattttaatgttcggattcaaattaagttagtgggtgttataaactttgaagatttctcaaaattctcttaaatatgaagaaaaagattaattttccatcaactgatttaactacttaaaacatttttcgtctctcctttaaagtcaattgatacacatgatgtgtccattgaagttagggctggtgccctacctttgaagttctaggtcatttcctcttgtattagataaactggggcctacacgtgtcatcagctcaatttttcaaaaattgaaaaagggttagttgataggaccatgataaggttttggatattagttggttgtttgtggattcctaactctacattacacattagacaattgaagcattgggtcatatgcctcatggcataagtcatggcctaacttccaattaacaaaaaatacacaagtgggttgggcatggacaatgagttaggttttaaaaatgggaaaaaggaaaaaacacagaggggaggagtgaggacatcaatttggagtgaaattgctcttatttgtagcgtttggaagcaggaatcaattcttcaaaattaatgatggttaaaatttggacatgttacaatttgtaaggaaaacccatctcagattttaccaaagcaaaatgaacttttctctaaaatatgttcacagtgaagaagaagctaccaatctgcaaaagtatttagcttctgaaacatttttgtccaagcttttcatcactggatttttttaaacaaaacaaaaaaaaaagtagcgtttggttttctttatttcccttggggcttcaacatatcccaagattctagatactggcatgacaaattccatgaaacagcaaggaggcctaagattggaaacagcaaggggggctagttaagctctctattacatgagtgcttatgcaatttattggcttggtggtatgattttgatttcccaattataattgtgggtgcttaattttgtgaattcgctcatgccaaaatccactattgtgactttcctttattggcaagtatggccttagactaattagttttacggattcaaagcaattcgatataataattgttaactatggtaaaaatatgtgtttatttttttacttaattttaaataaaaatttaatgtttaataatattaaattgtttgcttttaaaatttttttatttatattaaatattaaaaagtaaaaaaaaaaaaaacaaatatattattttttttattcaataaaaagtttataataaattataaaaaaaataataataatttaaagtttaaaaataaattattttcagcagaaagataaaaaacaaagacctcttaatgctaagtcaactaacttattaggggttgcctttgtggaattaaggggaagtcttcttacttaaaagtaggttgaattcaaaagcctacagtaatatatcaactatggtcatgactacacaataccttgagtaattggctcctaactctgataccaaattttagggaaatatggcaaaatcctataaacaaaaaaaagagcccacaaagctatcctcatactagagcaaaaaaggcccaaacatcaaaagcccaaatacaaaccctaagtaccctaaggcccaaaccaacttttagtttcaaatatttgcgatgaaagggataagataatcctcacattaggggaaacagtctctacttaaagaaaattataaatataacttcgatttgacataattaatcttatatatatattttttttggttaaaagtgcttggacatgtgagatgaagctaatttttttgtaatggaagaaatttttatcaagagaaaagcattatagttcatgcttaaaaggattgaaagttgttgcaccctttcattcgaaataacttttttttttcttttttccttgtcccttgcctctctcaaccttagacctaaacacaagatttgtagacattacattcaaaagttatgtttggttaatttgatatagcatgagataagataagagaatagataatatatcttatcttatatttgattggtgatgggatatgataagttatcatgtaatttattttatcttatattcgaatcaaatataggataaaataagtggtgtgatatattacactttcttttatatctattttatatagagtatattaatcttaaattaagacgtagaatgtccatatttcatctgttataaatttattttttattatttttttacattactcattttgtcaaatacatttttttattatgaaattaaatttgtggttaaaaaaaaataaatatatttataataaaaaaaatttattcaaatttaattttataataaaaaatttagtttaagattatataataaatttattttattatatattatttttcaatgtttaaaataaaaattatattacattataatattttctatttaaaaaaatatgaaaattgtgacatcccatatcagatagggtggaaagttttttgcgttatataagtatagactcctttttaactttatagacatgttttgaagcagtgagggtccctttgggtccaaatgggacaatatttatacttcctgttcacggtccagagaacgtaaggttggagtcaaatttcaaggtttgaagaaaaatctttataggtaagattctaacccatagattaatattttagattcattagttaatttcaagcacattagattttttttggaaaacccaaatctagattagggttagtgtggacccgcatttttcacgtgcgcccccaccagatcaacgagactcgctttttattcgtgaaaaataatttttggaaaagtcggagtcgccacttattttatttttattttaaagggaaaataaaataagaaagaaaaaccctaaaatgtgactccataatttttggaaaagcatgtctttgaaaaacccgagtctaggtccggggatcaggttacctattgggaagatacctttaaaaggtagcacccctctaagccctataaaggtctctactaactaagttaaggggaatgtggcaattaaccggttaattatggatacctaagtaggctagatggttccaaaaaatagcatgccaaacaagatcaaatcataataaaggaaggttaggatgcgtacctggaccgcttctcaagcactatcataaaacatcaatggttaatttaaacaatatatcatccaacatgtattttattagaaataatcaaacaatgaaacatgtatatcagaacactcaagcattattagacataaacattatttcacaatgacaaacatattcacagaattcagaaagtaggtgatagaggacatacctagatagcatagataatttataacgtgcttcctcaagttgtaaggggttagataaataataaaatatagaaatcctagcatgctcgttgtctaattagcatagcagaagtgatcaaagtatacaaaatcatcaattatcacatacatcttgtatataattcctaaaaaaaatagatatgatttcaataaatggcaagggtgacagtaaagatgagttttaaaaagatgattttatgtaggggtttcaccaattccccaattgatatacacaaatatagcttggaattaaatgttatcactttcctaaaaaaaataaaaaaaataaaaaataaaaaataaaaaatcatgagtattgaaaaaacatttttttttatagttttaatgaattgtatttataaaataaagttttgatttacttaaataagaaggctttaatttcatgcaaagaaaatattttttttagaaaagtttgttcacaagaaaataaatgttatcacttttataaaggaaatgtttcataagtattaataataacaataataataataataatcgattccatagttttaatgaattttatttataaaaagaagctttaatttattaaataaaaagactttaattccatgcaaagaaaatgtttttaaaaagttcattcacaagaaaataaatgtaatcatcacttttgtaaaggaaatatttcataagtattaataataataataataataatttatttaaataaaaagactttaattccatgcaagaaaatatttttaaaaagttcattcacaagaaaataaatgtaattatcacttttatcaaggaaatatttcatgagtataataataatagtagtaataattgagtccatagttttaattaatcttataaaaggaagtttcaatttacttaaataaaaaaagctttaattccatgcagagaaaatgttttttttaaaagaaagtttattcacaagaaaataaatattatcacttttataaaggaaatattttatgagtattaataataacaataataataataataattgattcaatagttttaatgaattttatagaaagaagcttcaatttatttaaaaaaaagactttaattccatgtgaagaaaatgctttaaaaaaaaattcatttacaaaaaaaagagaaagaaaattaattaattaataatggtaataataataaaaccttataaaaaatatatttgatgatttaaaaatatttttttatgtaagaatatcttttataatttaaattttcctttaataatttttttttatttacaagatgatgatttccacaactctttatttagaaagcacaaaatttttttattatttttttaaaacataataatttttttttaataagataaacaattattttatattttaatccaagagaacaaaaaaaatgtttaaaataatttaaatattacaactttttatttcttatttttgaacaaagctatcataaaaattatcaaaacacttaaaaattcaaacttttcatcatcatcaggaattatcccaaaactaaaaattaagcacaatataaattttcattaatatccaaattattgaaaactaaaaaaacttgcaaaatatttcaacttttcattaacatcacaaaattatccaaaacgaataaaacatctaatttttaaattatcatcccgaatcatccaagacaaatgcctacaaaaagtaacatgagattagcaataataataatgataactaaaataaaataaacaaaataaattcaaaaaccaaaaaaaactaaaaatcctaacttgatttatattttattcaaacaatcatcaggaattatcccaaggctaaaaaaaaataagcacaatataacttttcattgatatccaaattattaaaaattaaaacaaacttgcagaatatttcaacttttcattaacatcacaaaattatccaaaacgaataaaacatccaatttttaaactatcatcccgaatcatccaagacaaatgcctacaaaaagtaacatgagattagcaataataataatgataactaaaataaaataaattcaaaaaccaaaaaaaaactaaaaatcctaacttaatttatattttgttcaaacaatcattaacacatctcatctaaatacattaaatccaacaaaacactcaccgaaagacattaaatcctattataaccgtccatgatttcattccttttttttttacaaataaataaaaacatgccaataacatcattcacatcaggattgaccatatattcacattcgtttgcattttaaatccaacaaaacgaagtcaaagaacactgaccttgcttgcagctaccctctttcacggttgtgtcactttttcttctcagtctagttatgtttgcttcttcgatctggctcgtgtgttccttcaccacaaaaagtccccgaatcagcctatgcgtcctttagaagttccacccggaaacgtgatcttgtctacaattttcttttgaatctcattaaaaaataaaaaatccctccaaattcttccagaactccccttttttctttttctctcctcagacgtccccctctattctcaatccccaaaaaaaaacctaaatccccttcatcacgcctctcctcccttttttgcatgtgagttgacttttctttccttccatgaattccccctactctttttcttgcaaaatacaatctgtctattcaatatgccacctcaattcttcctaaaatatatcatctctttttcttttccatttaaaatatgctttgacccaaaacactactgaatcctccttccatcatcacgtgattctttttccaaaagacaaattacattaccttctttgctgctcatcatttcttttttcatacataagctgaatcttccccataacatggctccattcattttttccatatgtctactcttggaacctatatggtagctacctactccaagcttcactttctattggtggacttcctgcaaaatttcaaagttaataaagtaataataataataataataataataataataataatgaaaacgtttaaacaaaattattaaattaaactaaataagtaaagacaagtatattggaaaagtgataaaataagaggaaaataaaataaatgaagaaatatacaaaataataaataaaataaaataaacaaaaatgtaaaggtaaaaaaaaagtcaagcaatgtgattttacaaaaacgagtcttgcaagtcatacaagccatgcaaccatgcaaaccatgcccatgcaaaaaatgatctaaatgggcctaaggtgcctaaatgggcctagggtgcctaaatgggcctaaggtgcctagaaaggcctatggtgcctaaattgactcaaggtgcctaagtgggcctaaagtgcctaaatcgtcctcgggtgcctaagtgggcttagggtggtgcttaagtaggtctaaggtgcctaaatgggcctaaagtgatctaagtgggcctaaagtgtctaaatgggcctaaagtgatgcctaatgggccaagtgtacctaaatgggcctagggtacctaaatgggcctagggtacctaaatgggcctagggtgatctaagtgggcctaaagtgatgcctaatgggcctaaagtgatctaagtgggcctagggtaactaagtgggcctaaagtgtctaaatgggcctagggtacctaaatgggcctagggttacctaaatgggcctagggtgatctaagtgggcctaaagtgatgcctaatgggcctaaagtgatctaagtgggcctagggtaactaagtgggcctaaagtgtctaaatgggcctaaagtgatgcctaatgggccaagtgtacctaaatgggcctagggttacctaaatgggcctagggtggctaaatgggcctaaagtgatctaagtgggcctaaggtaactaagtgggcctagagtgtctaaatgggcctaaagtgatgcctaatgggccaagtgtacctaaatgggcctagggatacctaaatgggcctagggttacctaagtgggcctagggtgcctaaaagctatcctaaaaaaaaaaaaaaaaaaaaagcctaagtctaagttatggctgccaagggtcacaataaggggtcagataatccttcaaccaaagtctccgaggtggcttagaaaagataggctacacgagtattaatgggccaccagggaattgccataaacgacatgtgcgaggaagacaaaatagagggtctacagttagtttattttttttttaattcgttttaatatcaaaatagtgaaaatttaagattttgatttattgttggaaattgggaaatcttaagtttttagatgagaaaaaaaattctttagaagatttcgacttaggctagggttaatttatttataaaaaaaagaataaaaaaatatattgttatgtaaggatcgcgtgtgcactggttgcatgcgtttgggaattgtgcatccactttttgtagcattatgtaaggatttcatggttgaaatctagttggtggattttcacatactctattattagactttgatgaatacttgggtatgtaatatttaatagtagcaagacttcgtattattagactttgatgggtacttgagtactgtattatttaataatggcagggctttgtgttattaaactttgatgggtactgtattatttaataaaagaagatgtgtacggatggtattggggtggttaatatatattattattattattattattattattattattatattagcaatgatggagagttgttgtgtataggctatgtttggtaaaaaaaaaacttgaaagtgaaaaaatataatttataaataaaagaaagtaaaatttttggtattataattatattaatgatgggtgtaagttaataaatagcatagaatttaattagtgaaataaattataatttaattaaattatgttgtgtcccaagaaataaattgaaaataaaatttaagttttatatgaattagaaatttattaaattttctaaaataggaatagattaaattatttttcataattaaaaaacattaatttgaatacctaaaattttaggattgtcaaacctataattttagataaataggaatgattatttctcttatattttgttaggtgaagagtagattttcatgattatttttctctaaggtttttgaggacttcttttgaggtaaggaaaattaatgcagttgttttttttttggaacaaatttttatatacatcatttggaaacattttgagttattatttgttttatgcatggataaaatatgttttgcatgaaaagtatgttagaaccttacattttgtttataacagagaaatgtggagatattatgttttgaaaatttgaataattgaaataagtgtttgacccttatcaacgggatataatagttgacttttaactttttggcccttgtcaacaggatataatagttgacctttacatttcttggtggggaatgtattgatttggacccagcagcctctaggggtttggttagaggttactagtactagtagtgtttggttccgtccacctaaaaggaacaatttgaggctagccacatatttgaaaagtcccacctaattgggcaccatttgatgtttgatgaccagagtaaataaatgatttgaatgttttgattgaatttgatatgaaaatgtttgaataaaaaatgaaagtgcactgttaaaagtcttgaatgtattggcaaaattgactaaaatgtttatgaatataattagttataatatctcttattttgcaagtgaacttgaaatatttgatccttgaactacattaatgttccttattgggctttgagctcattcctatttgttgattacttttcaagtacccttagttcggacgatgagtgatggctaggtcggggaatggtcattattaggatttttcttaggttgttatttttggatattgttagcttataagtttatgttcatttggattatttggtttttggaagttatttagatattgaattttttatttttttatgatagtttgaagttgagatttggagatcatgaaaattttgttagcacttgcattgtttgagtttgcaatatatttggataacaaattttggttgatggatgcatagttttaaagttaagttttgaagattttagaaattttgttccgttactttgaacaagtatttggtaattggtaacgtccagttacattgtttgggtcaagttacactttaagcttttaggtttaaggtgttaaatgaccgtcatgcccttggagtgggtcttggggcgtgacatgtacagttatatgagagtttgtttgaccccaaaatggtgtttatttgtttggtctgcaatcccaatcctatacaacgagaactttgtgttccttttaaagccacaacccaatgaggacaaatatatactttattttatttacaaactaaatataagcataacataacatatttcattgtatatgttatcttattttatttacaaactaaatataaacataacataacatatatcattggatatgctatcttaggattttatacctattgaatttaatactcaagtatcttatatccattgaaaatcatattctaggtgtaagccccaaagtttgtccaaaaccttcaagatttcattctaatgtttatattgaatttaaacttttttattagaatttcttatttattttagatgggtgctaccgtttatccccatacctttcctcaaactcattcttggttcataaatttgtttattgttttttttttcaaataaaaagttacacaatattttctttcttattttgtttcccttttaaaaagaaatggtgactccaaaaaacctaaaaacattttttttaacaatataacaagtttgggggatgagtaggaacatgtgaaaaatataaagtccacatttaggatatacatattttattctatcttatcatatctcgtcaactaaatatagccgaagatttcttcctcgaataatgggagtaaagtttaaaataatcgagcttagtcaaggagtgaacactaatgcactatgtcaatatatagcaaaatattgacgataaattgcggatgaaatcacttattaattagaaaaaatcaaccataattacctttttgtttttgtttttgttttatattatcattttaatttatattatccttttacattttattttgtttccacatttatcacattaatgtttatttttaaaaattataattataattttaaatttttatttaaaatattaaaaagataaagttaccaacaaataactaaaatattaaaacaataaataaaaataagtttttttaaaaaaaatatttcataaaatgtaaatataaaataaatcttaaatttataaagtaaattataaatatagttttcaatagttttaatcaaaacaaaaaaaaggtcaaaaaaaaaaaaatgttaacggaactttcaaataaaatattttatatgaatcttgtttaaattttttgaatcatttaattttttatttaatatttaataaaaatatttttaataaaattaataattttatttatagtttatttattttttcaaataaataaatataaatatattaaaagattttaagatagttttagtaaaataaaaatggattaatatagattgactaataaaaattggaataattctaatttagattttttttaatatagatatatttttttggataaaatatcaactaatttaatttgaaaagtaaattgttttacttttagatgtggttaggttaaaatttcaaaatgactccagattaggtacatatagaacttgttggtagtagtagaaaaactatcaagtgtaaatattgtgacaaaattatagattaaaacaatatattgctcatgtattcaaacaagttgaaggatgtttacatgtaatagtagtgctgtcacaaagtgtgaaactacttatgactgatgcttcaaaagaaaaggttcaactaaaaaaaaaaacccaaaaagaataacttttgagctctttaaatggagaaatttgttatgacattgataagattgactcccaatgatgaaattgaggaagttggtgtggttgattttgaaagaagacaattgaaataagtagtaaaagaaagttgttgaattttttaagaaggtagacaagagtatggtaaaggtggtagtttctcgtagccttctagtacaaagattaaacatagatagatacataacttcagtgtaaggaaacaactaacataactccaaaaaggaattgatccctacatgttctcatcaaagtagaaatcaataaaagaatctttttctaccgaagacatgaagaaattgggtaaaccatttctaaattctttctttttaatgtaatacacttcaatacagttaaatagtaggtcttactattagtcaataattgatatcatagtagaaacaagtccaagtatcaaaggtgccacgggatactaaattggaaatgcatattttaagaaggaaatgaaagaacttaaggtatatataaccacattgaaggctaaatgcctacatatgagtgcacaatcatgtgtgatagttggagttctaggactagaaagtctatcatcaatttcatgatttattatgatagaagcatgatacaccattcttcaattgacattaccaatatatctaagataataaacaacattttttcctttatggataaagttgtggaggaggttgaagaggaaaatgttgcacaaatagtcactgataatgagacaaggtttaaagtagttggtatgttgttcatgaagaatttggtctccttgtgtaatccattgtattgatttaatgcttgaagatattgaaagcttgaaacatattaaggagactttaaatcaaacaaagatgataatgagatttatttataatagcttgaaagtagtacatttgatgaaagtgtttaccaatgataaaaatctattaagattaggaataactcaatttgccactacatttatttcacttaagagtcttatacgttatgagattgatttgaaaataatgcacacaacaaatgagttgtgtgaaagtcaataaatataagagaaaaagaagtctaggagataatgtatccaactttattttaattgatgggttgtggaacaggcaaggaaagtccaaattgttgtagaacatctcgttaaagtattgaaattagttgatcaagaaaaaaaaaactcacattatcaattatctatgaagcaattgatagagttaaaatgagtatatcatttttagggcttattgtcctttttttaatattggatggaaaattttttgtgtaatgtgttactgtagctaataaaatatttaagcacaaaatattgtaccccttaatttatgtcaatacccaaattgaattagggggaaaagacactcattggttcaacgttttatcaatctctttggtatatcacaaatttcctcatatttttcgttcttaaaaattcttacatccatttcttaaatatatccaaaatttcaaagataatctattttttgagttttgttttatttgtttttgcatcgttgaatatgataattctcaataaaaaaaaaaaagatttgaagtccttttgactatatttttaaaaggcacttttaccctaaaaattatttttgaaaaaaaataaagttttgatgaaatttataaaatatttttaaaaattgaaaaattgtttatattacttcttgaaaatagtacatttgacaaaagtgttcaccaaggataataatctattaagatcaggaataactcaatttgccactgaattcatttcatttgagagttttatactgttatgaggctgatttgaaaataatgcgcacaacaaatgagtagcatgaattcaataaatataagagcaaaagaagtccaggagataatgtatccaactttattttaattgattgattttcaaaacaagcaaggaaagtctaaacaatcatgaaacatctcgttaaagtactgaaattatttgatcaagaaaaaaagctcacatttttaatcatctatgaagcaatcgatagagttaaaatgggtatatcatttttagggcttattgtcctttttctaatgtttgatggaagaatttttgtgtaatatgttactatggctaataaaatattttagcgcaaaatattgtacccattaatttatgtcaatacccaaattgaattaggaggaaaagacactcattggttcaatgttttatcaatctctttggtacatcacaaatttcctcatatttttcatacctaaaaatcttacatccatctcttaaatatattcaaattttcaaagatatatatatatatatatattttgagttttgttttatttgttagtgcattgttgaatacaataattttcaatacacaaaacaaagaaaaaatgaagaaagatttgaagtccttttcacaatatttttaaaaggcacttttaccttaaaattatttttgaaaaaaaataaagttttgatgaaatgtataaaatatttttaaaaattgaaaaatcgttgatattacttcttgaaagtagtacattttacgaaagtgttcactaaggataagaatatattaagattaagaataactcgatttgctattgaattcatttcatttgagagtcttatacattatgagactgatttgaaaataatgcacaacaaatgagtggtgtgaattcattaaatataggggcaaaaaaagtctaggatgttaggaatttaaggctaatccaacctatggtaatcaccctagaggggggtgaatagggtgatggtctcttttcacaaatttaaacaagtgaatgcaagagacaattatatgcaagtatataataatcaatatatagacaattgcatataaattaaagagtagggaagagagaatgcaaacacaagagtttatagtggttcggtgcaatctggactacatccactcttctctaacttcaatcccgagcttgaggttccactaatccaaggcttccaaaccaagccttcaaacaatacaattggattatggttccaattcaccatcttggacttttggctccaagcaccctttacacttctcaagagatgtcccactcttgaacaatccctcaagtgataccccacacttgagaagcttcatctcaaagatttacaaatgaatgatctctaaaaaatcttagcataaaaactttaagctcaaatgatacaagaaaaactaggattgaatggtgcactaaagatatgcaagttttgaaataatggtgcactaaaaaatactcttccaaggctcaaatataatcaagaaagatttgggaaggttaagctcttgaaacaatgaagattgaagcctttttatagaagaaaaaagtcaaactagcagttgggggtttgaccggttgagctaggggtcgaccggttgactagctgttagcattaaatgcttgacaggtgaccgttgggcctcaaccggacctcaaccggttaaggttcaaccttgaccgggaagagaaggccactgggagagagataaactttttggcctccctcaactggtccttgaccggacgagcacaaccggtcgaccggttgagccattttttggctcaacacccaacctttttcaacttaaaactttttaacacaagtttgaaaatcatttaacacaaggttttagttgaaaacatgaaatcatccaattcttaaaatatttaaaacaatattactctttgatgattttggtgcataaataaagaattgaaatgcatgaaagtcctagtgcaccaacaactttacaaagagatcttatgaagttttggtcttgaaaaacttttatctttgaggtggtcttcttcttcatgatttctctttggcttgatttatttttgtgattgccattttggaaatcgtcttgcctaatcacacttgaaatatgatcattagttctaaaccttgttttgttatcatcaaaatcaagattaatcaaaccttattttcacataggatataatatatccaactttattttaactgattgattgtgaaaacaagtaactgaagtcccaacaatcatggaacataatagttgatcaagaaaaaaagcttacattatcaatcatctataaaacaatcgatagagttaaaattagtatatcatttttagggcttattgtccttttttgaatgctagatggaagaatttttgtgtaatatgctactgtggctaataaaatattttagtgcaaaatattgtaccctttaatttatgtcaatacccaaattgaattaggaggaagaaacactcattggttcaatgttttatcaatctctttggtacatcacaaatttcctcatatttttcatacctaaaaattcttatatccatctatcaaatatatccaattcttcaaagacaatctcatttttgagttttgttttatttgttattgcatcattgaatacgataattctcaatagaaaaatatttaaagtccttttgacgatatttttaaaagacatttttaccataaaaattatttttgaaaaaaaaaataaagttttgataaaatttatacaatatttttaaaaattaaaaaatcgtgtatattacttcttaaaaaaataagtaagcgatgatttgttctaaaaatgtttttagtgaacaatatttttagctcactaaaaacattttaagagaattagtggtaaacatatttaaactgtgaagccaaggtttggttaatcttgattttgatgataataaaacaaggtttagaactaatgactatatttcaagtgtgattagacaaaatgatttccaaagtggcaatcacaaagacaaatcaagccaaggagaaatcatgaagaagaagacttcctcaaagagaagtgtttttcaagatccaagcttcataagatctctttgtaaggttgttggtgcactaggatttttatgcattgcattctttacttatgtaccaaaatcatccaagagttattttgttttaaatattttaagaattggatgatttcatgttttcaactaaaactttgtgttaaatgtttttcaaacttgttttaaaaggttttaagttgaaaaagttggttgttaagccaaaaaacgactcaaccagttaaactggatgaggaatcggtcgaccgcaagcttaatcggtcgaggtctgggttgacccctacctcaatcggtcgaggtccgggaagacccccagctcaactagtcgagggtgtaaaaaactttctcttttttccagaacggttgttcaaccggtcaaggttaaacctcaaccagtcgaggtccggtcgaggttcagttgaggcacaacagtcacctgccaagcgttaaatgctaacggctagtcaaccggtcgacccctaactcaaccggtcgaacccccaaatggctagtttgacttttctcttatataaaaaggctccaattttcattgtttaaagagtttaacattcccaaacctttcttgaatatatttgagccttagaagagtgtttttgagtgcaccattgttctaaaatttgcatatctttagtgcaccattcaatcctaattttcttgtatcatttgagcttaaagtttttgtactaggattttgtgagatcatttatttgtaaatatttgagagaaagtttctcaagagtggcgtattatttaaggggttgttcaagagtgggatatctcttgagaagtgtgaagggtgcttggagccaaaagtccaagaggatgaattggaatcataatccaattgtattgcttgaaggcttggtttggaagccttgaattagtggaacctcaaacttgggattaaagctagaggagagtggatgtaggccgggttacgtcgaaccactataaaatcttgtgtttgcattctctcttccctactcttttaatttatatgcaattgtttttatattgcttattatatatttgcatataattgtttcttacattcacatagtttaaatttgcaaaaagagaccatcaccctattcaccccccctctagggtgattaccataggttgtattaacctaatttttctaacataaaccattggcatgaaggttaataggataaataaagtcggtagctaaatccaaaatccaaaatccaatgtgtgctcaaactcaaaagaaggatgacatggatagacccattttctaaaaggcaacaattgggcatataacgcaacacccacaatagaggtgggagcgaatttgtttgtgaccttttttctggtcttaactttgaaatacaaatatcttagactagtactcaaataaaaatatcacaatcaccaagaaaatgtattgttgaagactcttcaagagatgcacgtggtcttcccaattttccaacctctcaaatggttctcttcatttttgtcatagaatatatttttttgaccataaaaatcaaaataatttttttttctaactattatcaaaagtgttggattaaatgtgaaccattagaaaatatttgaaaattatgattaacttttaatttttttaaattttaaaaatttaaaatatattttatttaacaatagcaaattaatgctagataaaaataattgatgaaaaaaaaagaaaataattagtccccttctccaaataaaatgtgttctattttttttttttggattgaaataattataataagttaatgatacttttttcaaatatttatatctcttttgtctttcctagtgtaaaattttataaataagtttgtaaataaagtttatttcatgtgctaaatttggaacaaattataaatatcctttagaaaaggatttttaaaaagaaaatttgggaaaatttgtaatagaataaaaatatttttaaaaaatataatcaatttttattttttcaatctaaaaagattaattaattttttaaaacataatgcctaaaatacccatattttcatatttttatatatttaagaaaataattgaagtggcttgtgttatcccaatgaaaatcatacatgtactttttgtttttttgaactacaacaatctttaaaaacttcctattttgaatattactatttttattataccgatttattactattttgaatgtaaaaaatgctaaaaattaaggtaataatgtatattaaatattataattttttttattgtttaaaatatatatttgtttgattaaatgttaatatgcctaattttttttagaaaaaaaattattttccgatatttcttgtttgaatgagagggcattggacctgttttccggtggaactagaaactattttttagaatatttttattttgaaaattatttgtttaaataatttcaagaattccaggaagtgaaatttaaaaaaaaaaaaaaatgaaaaggaaagaaacgactcagatcagacatcggcaagccgattctacaaatgggtaacgaagaagccgcgtaacaactgcaaggcagcaaccgaaagcaaacccaaaacaaaacccgt

SEQ ID NO: 13086 - DNA, 4431 bp, Vitis vinifera
  Intron number 3 from transcript GSVIVT01033832001 (locus G SVIVG01033832001) derived from phytozome v7.0 (chr-ID chr8 ; pos 17372657 to 17377087 reverse strand)
gagagtctgcggcgagatctcgagctagaaaacaggtacttgttcacaaatgcaactgtctctgagaatcatcataacgcattagactggaatcactaagtagattaaacccaaatgaaaataaaatgtgctggatgtttcttgccatttgatcaatttcagcttgccttttaatggcattttatatcatccacttatatttatcatcaacctttgatagctaatctcatcatcactggacatctggttaaccattgtttccccacctctgaagagagtcgtcatttggttagctttgagttaagtattaccccatatggctggtttataagagggtccaatgtctttcttatagccaccacctttgttagcttttgcttataccaattcttgcattttcctggcatttaagagatatattcaataagttgaatattagtattcaggatatgagaaggcattcctgccactactaccattaaattagtagtcattttctttatcaaagaggcactgatgagagagaaccttaatcctttctattaacatttatagatgatagtattaattgttattattagatttcacaactagtggtatacgacagtgggtagttgaacagttgttgctgtgagttgataattaccattagacttcacaacttgttccttcgatacatatgatttttacttttataagtttttctttgtttgtggaagtcaatatacaagtttggcaatggaaaagaggaacaacactatctttgtggaataagaacgagaaaaacatgaatgaggaatggtaaggcaagcttggtttcttggcaggacctgcaagttttctttgtgggataagaacgagaaaaacatgaatgaggaatgggtaaggtgagcctggcttcttggcaggatctgcaagttttcatgagacacaagtttcagtctgttgaacagaaatcgcatctaggataccgtccaagtataaagactcttacttcggttcattgaacagaaattgcatcacactaacggtcaagtaaaatgatgtcaaaatctgttcttgtgagacttgttgtgggtcatcatagaataatggcaaaataaaataatgaccatgggtgttagctgagaaaaagacaagatagagttatggccaataattttggcttattccgtcaattgatattggctggaggaagaaaataatggacaagatgtaattttttcttcccaaattttcattggtatgagatcttggtgaaatcatcaatatatttggctggcctgagtggatgagtcttgatgacaattgggtagtattgactctcagtttgaaattggaaccaaatttgagggtcttttgcagccaaacaaggagatcttaacaagaattttgaggttagctactggatttgggagagaatttggcgtggtgtcacttgttgaattcaacgttctttgctttacacctgaaggctagaaatggtagaggatagctcgcactaattaatcataatacaaagagaaatggtgaatgcagttagcaccatcccggggtggagactgaagcccatattataagttaattgtatcaacagccatttgacaatgtccaaaactgcaattaatgaggagatgggtttttgaatgatgaagaaaattagaactctgaaaaacactctgcctaaagtctggattagatcatgaagatagacacgaccactaggattctagtcattcagaagagagaatggaggtggtttgtgagtaggaggaaattatcaaaagttcccttccacattttaatgcgcttttaactgcttccatttgaagtcttaaatggaaataccccagttcttaaaattgattaactattgtatgatgtatccacacaaccacccacccccacccaaaacccctcaaacgttcatacttgttgttgcatgtagaactccttttaaaaatgggcccatgatggaagacgctatgaatcaagttgtttggtaataacacccaaacaacctcattgcaatccaccatccatttgctttttgattgggaaaattgaccaattggtgcaattcctttttggtaatggtttggaactactattgtgagatcataaatttgactaatgcttcgagttgaggagcatgtgattggtgcccaaaccaatgacaaaattgtaatgcaaatttatttattatgggagatgggcagctactacacactgttattagagaattgttgcctaacacatacgctgtatacataggaagtcttggaacacaatggatcagaggacctggactccatcataactgaaggttgaagtggtacaaagcttgatgggcaggcagggggcataactttgtatactagtgttccaaggcatgatagatggcacagaaggaacattcatggccagaaaagaggaagggggccccacaatgcataggacatgaaaggaaaaaaaaacattagtttgcaggagatttaaggatatcaagtctggaggaaggaataaatggacaacgtatatgttatgatcccatgaatggtggtcaaaatctttggtaaggtgaagtctaaaagtgaaggcatgtagatgtatgtgattattttacaactgatagaaagcaaaagctaagatagaaacatatatatatcaagactactgaatgtgcacaacagaaatggaagggacaaatgcgacagatatatgtaaaaaatcttcaacaaaagttagaattaggatcctgtcttgggatcatgacatttactacatttcattttctattttttttttctctcattttttacttttgaatatatacggaattataccatgatatctcctatcaactatagagagttttcctagtaggctaacattatatatgtaatgagtttcttttaactaagtagacgcattttaaagtcacgaggatcaactgggttgaaaatcgacagtatctattataaataatattagagtggtttcccgatctcatggtttaggtgtagatacaaagaatagaaaaacattatatgttttaggactcaacaaccatatctaatttttttcgtaccctctaatatccttcatggtacaatagagtgatttttttttaatccgtggatataggcatacttggtcaaacctcgtacctttgtatgaataattttatctttatattcttgcattaacatgttagaattggagattctgccagcataatagaaaccatatatacaaatctgtgctaatctctatttgagggtcaactcttgctagatgagccaaattttccaagaaagaggagaattggtaccaatgatttccgattgatcctaatgagcaaaaatgctatgggctgtatgaagtgtaagacattttatgttgcaatctatctggtctgtcagagcagaaatcatttccaatagcccacatttgttggagttgggatagtcctgtcaaaacatagtccacgaatctagttataggagcttccaattttcttttatatatattttaatttagttggagtgcttcctacaattatctccctgattcatcaatagtggctcagaaactaccttcgagtgttttgtgggcaatatcagggcgcaatacaaagtaaatgtttgattctgagaactactctttatgatcctctcagacaactcgctagatcatcttctggaaacaggaacagaaattgggaagtcctggatgaaaggcatagctggttagagaatcacttaaaaggtaactaacgaaaacctagcacaacttcaacattaatggaaaacatacaaaggaaaccaaaaatgaggctcagtttctatgttggtgcatgattggcattggtaggagatactgagatagctttacgttttcttcctagcgtaacctgatgtatgcgtatctactttattggaacaaattcaaaagagctgcatcatgctacctaactagtgccctaaggatacttgttatggttctgacatttgatcctgtaaacattctattgactttgattgtcgccattagcatattagtttccaccaaagaatgtgttgggaattgatgaaatatgcacaaaagtagtaggttttttcaggtaatagaattttttgtagtgaggaaattgaaaataatttttccaattgtttgtggacaagaaaagaatgaaagcagtttatgcctctagagtttggagtagattgtatggtgggttcctcacaaacaagtttcacagtacatggaggggtcatggggaaatttgttacaggaaatattcaacttccattaacaaaatacacagttttacaaaattaacttggaactaggtttttgcttacaattacatgttacatatgtctttttgcaggcttacacagttgaactggaagcagaattaaacca

SEQ ID NO: 13087 - DNA, 1436 bp, Vitis vinifera
  Intron number 1 from transcript GSVIVT01011796001 (locus G SVIVG01011796001) derived from phytozome v7.0 (chr-ID chr1 ; pos 4085200 to 4086635)
accgttctaatttttgccaccggatctggaattaggtgaatttacttttgactcccaagttcagctgctgaactaaggcaaaaaaaatttcttcccccaaattcgttgtgttgtgttgttttgttttgatttttatgaaaaatcgaaattagcttcaaattatacagatgcgtcgtagttgcattggggatggttgagtggtgcctttagttttatgatccccattaattaaaaatctaggacatgtatttgacaacgacattgaaactgcttatagaatttagatttatgggttgaattgggttctgcaaatggcaatttagtgttaacagcttttggtagagatattttggattttggacatggtttggtttgtatttcctaggtatccctagtgctttcaacagcgattgcattgattttggcagtaagaattaagatacttttagaatgttctggagtatcaggggtatttcggcagattcttttcagtaagctcttgatctcaaatcaaaaaagggaacccaacataccaatcaaactgtatagcttaattgaccagtctttcaattcaatcagtgggaccttcttggattttcaggttgaatgttttttttttttttttttgatagatgattttcatgtttgaatttggaacttacaatctgagttcaagaaattttaattttgaggttgttgatgtgtggtgatgattctcaagtttcaagggtccaggctgctagtttattcggataatttgagttatcttctcctcaaacatgagtctcggtttcaaagttttgggaattgcttgaaattgtgaaaactaggcacttatgaatgattctaaaatccttagaataaaaaaaagatatgatttttctagataatgggagtttcctaaagttaaaaatgacttctttattcaagattatattgtattcttctgaatgattagtttagcatgctttgtcttcaggcaatataagttccaaactggaatattttattggtagtttttgcatgtttcctctgttgataaaacacagtgcaaatgttagattgctcaggaaagaggttggcaagtagttaggaattttgtcagttagaattcagaaagtggttccatgttccttggcttgtatttttgtgacataaaggtttcagaataaagtctattctttccatatgttttgatatagcatatgttttaggtcttctcttaatcaatttggtaaataggctactgaaactagcatttccaggtttcattttttgttgattttactgtttgcaaaatagtcaagtattttcttataagcttccatttaatgtgcttttctttgctatgtagttttgcttatttggctaacttttgacttacttttctcttgttcgtagtccaatccgatctctcattgagtctggattcagtg

SEQ ID NO: 13088 - DNA, 7903 bp, Vitis vinifera
  Intron number 1 from transcript GSVIVT01036803001 (locus G SVIVG01036803001) derived from phytozome v7.0 (chr-ID chr1 9; pos 22340723 to 22348625)
tcaaagccaagattcaggtctttttttttttttttctttttttggatcactgctatttctctttttctgaatttttatgtggggtctgtttgtttccctagaaaatgggtcctggagtaaatttttcgcctcttgcaatttgtttgagtttttatatggctgtcagggtttctgattgttgttttttcaaatgggttttctgtttttcttttaaaaatcttatctgggttctgtttatttcccccaaaaatggttcgtggattttattttattttattttttatttttttctgtttctgatgtattggagctcttaatcgttgttagggtgtctgattgtcgattccttgtttgggtttttctttctattcctattcattccgctcttggttctttcttttgttaaatcttatctgtgccctgtctatttcccagaaaatggttcctggaattttccttttctttcttgctcctggtgatgtatcggggctttgatgtttgttggggataaagatagggtttaaccgaatctgatatggactcattgcaaatcgagggtttgttgtctgaaatgcaggatactgagcaaatatgtattacaattgatggagcaagatgtttaaattttctgtttcagttttcttgtgattggagtttgtgcttttcaaactaattgtagtgttcggggtcttatatattgtgatgatttgagtaaggctaacatacaagatattggattgatggctaaagaatggggagaaaaaaaaccttatttgtgattgagggatttgattcgggttttgggaatgaagatttgatttgggttcttgtgaatgaggagctgaagttttgatttggttttttgtgaatgacgaactgaagatgaggataatgatggtggctgacccactgcttcttgtcttgccaggactaaagaggccgattttgtttagttgtctcttgagctatgcccattcgatcgtccttttggatgatttgtctgtctttaattaagagcaaggtactttatctttggtaactgtgtgcatgctggtaacagtgttgtgctgacaagcctgatagaaaagacaacatgatttcagaaacttgaggggaggtcttggtaactgtcaaaattcattggggaaatcagagtaaattatgtcaaattataaccattacatatagtttgcagtgaaaatatgggtttaaatgattgttttgtttgttgttaagttattattacaattttctagtttttgaattaatccatttatttgagtttaatgcatacttaaatgtatttggaatgattactattttatcattagtgtgcaatatggtatcataattgatattctcaagtggcaaggtcccccagtggggattgaggaagttcatggttcaatttcatgtggagcccccctccccattgtcgtagatatatgaatatatcttattggcatgtgttcaccacattatatttatgcaaattaatgcttgctattctttctatttcacactatgggttcgataagcaaaagatgagcattaagatcctctgtgtgtgtgttggttcttggacttactgatttgattcagttggtagaaagttaagaactgcaaagataagttttaagaaaccaaaaggcttgattctctgaaactgaaaaaaaagaaaaagaaaaaaagaaaaaaaagaaaagatagattggaattttaaagcatcgaaccttttaatagatttttttatttttatttttttataaacatttaaaattctattttgtttgaattttatagtggtgagatctttgtaattttcaaactaattatagtattcagggtcctttacattgtgttgattcttgtgaatcaaacatgaagatattggtttgatggataaaggagaaacccttatttatgaattgaggatttggttggatttgtgtgattgtgagttaggggctaaagttttgattggggttcttataaacgagaagcagagctgaagtttgatttgcgaattaggtgctgaagttttgttctgggttattgtgaatgaagagctgaaagtttgatttggttgtgaataaggagctgaagttttgacttgggtttttgtgattgaggagttaaggatgaggatgatgatggtggctgaccctcctctctctctctctctctctctctctgtgtcttgtcttctttctctttttgctgtgtctctcttttatatttcggttggcagcaataaaggtgaactagtttgttccctcttctctgattccaccattttgcattctctcatttttctttttctcatatggttcacaatgccattgccctctaccatatcgctataattttggtcaaccccagttagctggattttgatacagacctgagttatgccttgaccaatcatccttttgaatgatttctcttgatttaatttaaaagtcaggtttttttttttggtaaatcatgtttacaatgttggggtgacaagcctaatagggaagggcattgttatttcagaaaaccaagggaagatctcttatatgtatttatcataaattactttttataatttgatgtgcacttgaatataatattatgttctcaaagtagaatttaaccataaaaaaacacttttttttgacaagtgtaagtgtattagaataaaaagaagtatacatgatgtgtacagaggaaccaaaaaacgcaaaagaagtgcgggaatacaaaaactatcagccacgccctacaaagagcctatctagtccataaactctaacaacaataatgatccgttcccaatatgcattcttacccactcctaaaaaagatttaggaaagaacttttaattgtttgatctgcactttcatagttattgaaaactctcctatttctctccctccataaggtccagaacacgcataatggagcaactttccaagtcttttttcttttttttacaatagaagaaccacaccaacttagaagaaaccctccctctaattgaagagtgcatcacccactggacattaaacaaagcaaaaattaactgccacaaaacacgtgcttttatgcaatgaagaagaatgtgatcacacattttttcttcttctctacacatgtaacatttgttgggaatactctaacccttccttctaagttgatccagggttagaatcctagcctaggttgcctcccaagcaaggaagctaacttcgattgggacccaggaattccaaacaatgacatgagggaaaggctccatttccccattcactaaggaggagtaataagatttaatagagaagttaccattctttgaccccaatcacaccatggtatcctcagagtctaagctaatggagtggttatacaatctctcaaaaaaagcatcaacctcctttagctcccaatcatgcaattgtctaacaaacctcaggctccagctatcactgtccccttcatccaagcatcttttgaggaaactatagaataaagggtcggaaataagtccctcaagactgtgcccccacaccacttgtctattctgaacttcatcctgttgctagacccaactttgaaacctgttttttctttgagcgcctcctaactacttctgattgccttctacacccccactccatacccctctcttccttctttagagcaccacccctctttttgctatctgtacttccctaatattacccgtatccaaacaatattatttaaatatattattagatacattctcacagtagaatttaactataaaataacaatattataagatatagttaaatatattatatatgtctaattgacatgtattcacaactaccaactggcgttttatttttttcaaatctaatggttactatatggaatgtctcatgctatggagtttttaaggaaaagataggtttgaaaagatcctgtctctctgtctgtctttgtctttctctctctctctctcacacacacatgcacttagatacggaaatgtgcttgaatatggatgattttctgaagtgtggccttagccttttttagagttttcttctgtacccaatatgcacacgaacagattagaactgaataatgttgaagtactaattggcccttgttaaggtcttcttgtgcactctgttattgttaaaatgggcatttttgtgtaagtggatgatgttttgatttggcctacttttgtaagctatagtttttcttgtgtgatatttctggattgctatttgtttcttcattttaggccttgttttgaagctcattgcttctgctcttgtttctttcttgatcttcgtctgggagactcaaaattaatttattgagagttctccaaggaagttcctaacagtgactgatcctctgatgcatatcaatatatggggatgttcttactttcacaatggtatacattcccattcagtactcaaaagttttggattaaaaaatatatcggtttcaattcatcgaaagtatatggctattttagatattggaatcaacattttatttgtttatttttctttatggattttttttatttaaaaaaactaattcatttggtgtttttttctggttttttttttagaatttttctgttctcttttagaagatgggtgggtagtgatgtaggacaaccctaggatggttgcctacactcaagggtaggtgggctagggttttatttttagggtgtaaggagaggaacaaagaataaattttatggtagagaaaattataagataagaaatagagagaaaagaagaaacaatgaagaaaagatggaaaaccttagagtctcattaaggccttgtaggagtctcacctagaagaaatcagtggaatctcaccattaagggttgcaaccttgcaatgaaagaaaatataatattattcatatcaaatcatccatttaatttacattgattagcctatttataggcttctctaagaaatccaaagtctagtaggactctaatgatctattatgattctaattctaattataacattcaaagtctactaggactctaataatctatcatgactcaaattctaattatattataactcaactaactaatcctaattacattccaacaaataccaatcccaattcaattctaattaatattaatcctatttaaagtttgcttaggtcttccctttcttccttgattaaactctaaaagacttttccccatcaattccctccggcttgaaagaactcggctccgacgagttagatgcttgatacaattcatagagatcagggttaagcttctgaaaatccgttgttgtaatccatgtattctcagagtgtggtttgccttgccatttcaccaaaaatttttggcatccaccttgtcaagtagacacaagttgatcatcaagaacatactcgatctcaggacgtgggctaagagtaggtggtaattgaagatccaactcttcacttacatcgttgtgatgaccatggtagatatacaaatcttccacgttaaatattagactaaaatgcaagtctgaagggagctctaacaaataagcattctcaacaagttcttgtgaagctatgttcaaactgctacctccatcaatgatcatggtgcataatctcccttggcaagaaatacgtgtttggaaaatgttagtacgtcgccaatcttcttctccttttacctttgggacaactaataaaggtcgtactacaagactatgcccttccatcataccatcatagtagacacattcttcactaacttcatcttcattgtaggtctcttcttcctttgggtaacactccaattcagattctggttcttcaacacaaaaatgtaaacctttggtagggcatacaacaacataatgaccatgcccaccacacttaaagcataaaggagtcatgtctacttttctatctccaatactcattgaagttttacccttattaccattcttatgagccacattcgaagtttgtttagtgttgcccccaccattcacatgattagaagttttgaagtttgatgcgcttaaaggtttgcttgttgtcttgttggaaaaagtgctcccaatttgtgaacttggacgcttggaaacccgaaatttgagccattcttctattttgagggctagttgataaacatcatctacggtataagtatgtgcatttatcatctcaagttgaatctccattcgaagtccagctttgtagcgggctgcaagttgagcatcactttcctgcacttgatttcgaatgctcaattcatggaattcttctgtatattcttcaacggacttggtaccttgtttaagggaaaacaattttgtatacataagttgttcataatcagtcaggagaaagtgctccttcatcttcaacttcatctcgtcccatgtgtcaataggtggttggctagttctatgaacttgattctcaatattatgccaccatagacgtgctgctcctttcaattttgccttcacaaaatgaacttttctattttcgggcattgcacaccaatcaaagtaatcttccattgacataatccaatcaagaaaagttgttggatttagttttccataaaattcagcaacttcaagacgtacctttttagtcacatcatcatctagcttaaaaagtctggcccttctttgagtccccatcataaaattgtcttgttcttcgcgtgatcgacttagcgattgtctaaattgatgacttgcaatctcctcttcaatcggttgtttttcttgactcttttctaataacttcatgatctcatcaagtttgctatttagttgtattatagcatcttgatgggattgttgtgtggctgaaatttcctccaagcgtattgtagcgaaatcttgattgctagaagtttttttggaactcatgcttgtataagttgctccgttccttaattgcatatgccttcaagccatgtactttggctctaataccaaaattgatgtaggataaccctaggatggttgcctacactcaagggtaggtgggctagggttttatttttagggtgtaagtagaggaacaaagaataaattttatagtagagaaaattataagataagaaatagagagaaaaaaaagaaacaatgaagaaaagatggaaaaccttaagtctcactaaggccttttaggagtctcacctagaagaaatcaatggattctcaccattgagggttgcaaccttgcaatgaaagaaaatataatattattcatatcaaatcatagagagaaaaaaagaaacaatgaagaaaagatggaaaaccttagagtctcattaaggccttttaggagtttcacctagaagaaatcaatggaatctcaccattgagggttgcaaccttgcaataacagaaaatataatattattcatatcaaatcatccctttgatttatattgattaacctatttataggcttctctaagaaatccaaagtctactaggactctaataacctattatgattttaattctaattataacatccaaagtctattaggaccctaataacctatcatgactaaaattctaattatattataactcaactaattaatcctaattagactccaacaaataccaatcctaattcaattctaattaatattaatcctacttaaagtttacttaggtcttccctttctttcttgaataaactttaaaaggctttcccccatcaattctgggtatttgagattggtttagaaggaactttgaaacttacaatatgcctcaatcatctccaatgtgttgcaatgtgtctaactaaaggtgaacatgtgtatttcaggacaaggaaggcattcctcctgatcagcagagatt

SEQ ID NO: 13089 - DNA, 6680 bp, Vitis vinifera
  Intron number 1 from transcript GSVIVT01009543001 (locus G SVIVG01009543001) derived from phytozome v7.0 (chr-ID chr1 8; pos 9222872 to 9229551 reverse strand)
ctcacaataaggcctcaagtataaaataaataacaatgaactattgatatcgttaaaattctcctttgggtaaattttaacatatccagtgttcacttggagggagcttaaaatactttactattttgtgtcatttatatgttacctttgggtatccattttacttttctaagcaacacaatataaaagcattaattaataattagcagaaattgactctactttgggctagtctcattctcctaattataaagagaattattaagaattttacaagtctccctttattcttttatgcaatttaataaatacgaggctcactaattttggttactttggcaactatctaaactagttaaccttacatttataaattgtctaataatgcattagagaacgatcctcgaacagcgcttggaatggatgcctacagcacccaaaactggcgcttctcatcgacatttgaaacgcctaaaaaatagcgcctacacgccatctatatcacctgaaatggcgtttctggagcgcctaaatacgacgtcgttggggcgcctggaatgcgcctggcatggagcctgaagcgcgcctggaacggcgctacaaatggcgcttggactggctcctaaagggcccttagaatggccttgttgcactccttgaatgacacttcttgaatgtttgaaacagcgccaaacgacacctttttcgaccatcggattagcgccaaaacggcacccctcaccggcatcgcaagtgtcatccccgtcactggtagcggcttttggacggcatctctccagtcggcgttgcaaggaagacacagtgccttcattctacgcgctgaggctggtctttattttgtttagattttctcctattcgttttggtgagaccaattaattgaagataaaatttaaaaaatttaatccttataaaacaatgattatgaatatttgaattcaacttggctctgataccaattgttagcatttaacgtgaaaattaacacacaaattcaagatcattgaattcaacacatctcaaaaatttaaagaattgattacataccgtttgaagaacacgcggccatgttaaatagagagatccccttcaatttgtaaaccttaaattcttaatctcttcttctccttatcaaattttaatacacataattatttcctttaattgatggaagagaacttactcacaaaaggggttttgtatatttcttttatagataggagaagagggccaagaataatcgttcagaaaactattctgaacgtgttattctaataattgttttattcttatttagccactccatcaaagggtaaatatccttacaacagttattaactattttgggcattctttaattgactataagtggataaaaattaaaacactaggttagtgggccacccacttaattttaatgtcgaaataacagtagcttccaataatccggtattgtatatctattactgaaaaacaaatgagtgatgaattgttataataattgtgacctactattgatccctttcaggctttaattttcagtggtgaagtgactaacgagatttgtgggggaaattctcatttcttttctataaagcccctctacatatgccacctgttcttctatcattgattaatactgatcgaattgctctcaatgtcacaggtttgcagaagtactgtcacaagagaaacgccttcatgatgccaaatcccagatggatgtgcagcaaattaatcagaaataatcttaaattgaagtttatcagttccagttcaattaattagtatattattaaataaatgccatgtagtgtgataacttgatgtgttgtgtgccttgtttgaagacaacaatattgaagtgatgttgcattcctcaattaacatttgaagtagtttaggatatatatgttagcatcttccacaataatcttattttatttgttagggcaagtgtggaaaatttgagtagtataccttaatattcaagttatatatagtcccagttgcagttatcaaataagatacggtgaaggctaggtgcccattcaacgattcttcttcttcttcttcttcgtacatcagttgtatcttctttttcttccttttagccttcctcttccagaaaagctcatggatctaaccattctcagttttctatgacagtaaaaggacttcttcctcttcctcccaacaaagccccagagcttatggacaactaaccattctcagttcaccacgacagtaaaaggataagcataccccaactctcaaccccatttgtcacacaaggagcagtaactgcatatggaagttgttatgcatatgaaatgcaaaccttgctcaaaacagaattactacttggaatacatggtgcagtgattaaggagaaaaaggaataggattttgcttttatatttcgaaattatgaaacctgctgaaagagatgcaactgaaaaacatctagtggtcttttattgtcatgctgtttaattagaagtaatgtgtgaacaagcctatgtttttagcatcgaaaaatttactgaaaataagaaagaaagtataaactattggacaaggaaaaagttaggctaaaacgagatggaagcttagacttctacagtctaagttgtcaaaaccaacctattctcccattcagcgttgaaagttttatggaagcataacagaatggtataccttaatttgttgaattctctagtactattcattcttgatgcacaaggttgccctgcaatcagcgccaccctgattgacgctttcatggtcattagtattattggctgttggcacatggaaatgccattacctattaatcgccgcaccaattgactcctccgcaaccagataaggcaccacctctcacaaaaaattaatgataataaagtatgttcagaatgtcaattaccaattcttaatcgcaacaaccaggtatgtcccccttatcatgtcgctagacacttgaaccacagttatttatgaacaaagtatcgcctttgttacatagtgtttttgactggttagtataatccatctcatgttcagcttgaccacttcacctaactattcttacctacaattctttgagagtcctcttacctaaagttcccacactctctatgggattatcttcttgccaaagaaaatggatactgttaaattttagatcatacagtattgtattcctccaaagatggccatatccaagaatccaaattcaaagcaaatacacatcattgaaattaagtggaccagaaagatctccataaggttatatatgtacatgcctcgtatcattatatcaatatacaacttctttatttgcttaacgtacaagacttcaatgcccatacatacttcatcaaaagagtacagggagtcctctaacttcttctttacacacttaaaacatcaaatagcttcatactatcacaaaacctagtatcctccctagaaaccaacttgttcaatccgaaaaatgaaaaaagttgtatatgtttgacacttgcaaaacaaatgaaacgaattagacatgatgcttaaacacaatttaatgcaagaacccagaaccagtttctttggttacagttattaaatctaaaactcgatagtaattaattattttcctctttgttggcacacacaccatcacggattgttactttatcaaaaacagaagaggcaagttgggtgaaatattatcttaggtttgatggtgggtaatattgtgaaagtttcagaaggactatagtgctcttttgtggcagaagaaataggcgctgaaagtccaagaataaagacatgagagagagcttgaatcagaatttaagcatttcaatccccacctacaaaacaatagtgccacaccaaccccactactccaccagcctcagagcgcttgtgacaaacaactcaccaaaacgccaccaccaccaaaatgacatagcatacccaagtactggctgctgttccaaccatgggaactggagagaatataatttgaagggaagagaggaatttgaagagagaaatctccgaagaaactagggtgccgaaattttttatttgaaattataataaaaaaaaagtttaatataattttttaatttgaaattataataaaaaaaatactaaaaatttgaatatttttaaaattagttaaaattttaaaaaaatatataaaaataattaattaattttaaaatttttatttatttttcttcatattttcttttcttctattaatttccttctttattttctttttacacttttttcctcaaatgttacacgagtcaaaaatgttaatacaagagtccatgaacgtatgtagataatctacgaatgtcttatttttctgtggtttccctaggactctattaaccattactggccagcggtcccggacagcaaggtctggtgttcaaggcaggggttaaggtcgtggcagtgtagaactaactaggattgtatttatcaatggacataaactgctggtgggtggtgctcctggttaattagctgggtctagggatccaataagctaaagtaagagaaccctaactccaattgaatctaccttaactccaattggctgatttctcttcttccttcatcttagctgaagcaaaatggatgggttacaaaggaaattaacttcaagcactcttccttcagccccatcttcatccagagtaaataaaaatgctagttaattaagggcttcaatactgttgtttctgaagaaaaagggaaagggtttacaacgaaaatcttctattcattcatgttttctgaagatcagttcagaatacccaaaagcatgcctatatatagagcctaaagaactacactcgtaagtgactcaccagattacaaaacagaacaaaacagaaaatacaacagatttattaccaatacaaaactgccctactattctaataaatacctttagattttcaacattgactcatttctcagttcatcccagcctttaaatcatactctacattgtgaacttctttggtagaaagttgtgcaaactatgaggacaagaaaaccctatctcatatatgaattgcagcagatatttaagttgagatcaaagctacatataatgaaacaaaactttttagtagaagtagagttcattaaataaattgtatagaatgcgtccattatttatttccttgatcagatcaagtctatataagtaataaatgtaatcaaatggactttgggggtgataaagcatctcaaagagttaggaatggattgatggcattacagcatagatagctagcttccatgaaatagaaacgaagggatggctttggaagggtggaatggtcaaggactcaagggcactgattgaaaagatcaaatctaaactgctttcaattaagttagggtttgggtcaaatttgggatttgaaatacgggcaggcattgagttctcacaatttctgaatattaatgcccagctaagcccagcagctaagattaacatgcaaagaccataaggaacaaagtatttccagcatcaatccccaattctttagagcttagttgaccagtcctttctttttttcacttcacggatgcgttgcatctttgcctaaccatgataaacaaacatgattttttcgttcatagatgtgaagttaacttttaaataccaattgaccaccgtttggtcgaggtaaagtgaagtccataagggatgctgtcacccttcatacttccaaccttgctaaataagtgcctaacacagattgattaagataaaagtactgaaaactttttgtagtttaatataatacaacctatttttagttagccataactaccagtcaaccaagtctttgcactgcacataatctaaaattcacaggactcagaactgtaattataaaaagcattggataaccatgtagttttctacaaactatagaagccaatgatcgtgtgtacaattttacagatattaaatatgaaaagcatgagtttattaggtcaaaaaatcatgtctaacaggaaattatataaaaccttgctgcttaacattgaattatcattccttgtcattcacagtgccgtgttggccagtacttttcattgccctggttggtgttctttcaaaatcatcggcatccccagtcaagcacatcgatttacaaacacaaaattgtgtgcatttaataataattttttttttttggtttgcacatttagccttgtctccatcaagattctttgcaccagacatagctagaaaccagaatcatttcataagacttcagtgtttccatgacctgttcacaaacttcattagttaggaaaaaatcctatctcaacctttattgagtcacctaatccttcttaccagctattctctttggtcttacctacagttgccaggagtcatgtctatgaccatttggctagcttctataaaacaagaagatactggttgcttgtggacttttcaacttatcccgaatgatgaatccgcggtccaacttgaaccaggtccatttagaaaagtatgagcaagaaaaatgagggatatatgctaaggagtctataaatactcctgtctagttatcaaagagaactccaagtctctctacatttct

SEQ ID NO: 13090 - DNA, 1548 bp, Vitis vinifera
  Intron number 2 from transcript GSVIVT01033883001 (locus G SVIVG01033883001) derived from phytozome v7.0 (chr-ID chr8 ; pos 17033894 to 17035441)
tccaggcttacatctcctatcgcgtcatcaccaaggtaatttcttaaagtaaatgttctctcgtgctagtttcttccctcattttttattttattttatttatttttttaattttgatttagttttggttcaaattattacattagggttagggtttcaatgcccagtcaaaaagattttgtggatattatgatatcttctgtatgcgtgtgtggatggttatttttcagattttgattatacttatgggctttcttgaggttgatatcgatatcatattccctgcaatgtttgtaaatttggagaattattaaccaattgttgctttgcattgtttgatatgggatttgaatgctgtggtattttggttggttgaaagtttgtttagaattcagtacagaagattgttcactttgaattctttacatgggatcctaaccaattctattgctagtttgatggtattagtatgtcatcttaagagactaggacatcttagatcctgagttgttcaacaccaattcatgaattgttgtctactacatctgtgtactgagcatgtgcttttctcagtaacaatctctcagtgtattctggatttttcatgttttatgttttcacccaatatgctaggacaatcttcatgtagcatcatgcttatgtgcaatacaaaagcactcaatgatacagtggagctgcctctcttgtcctacagtttgtttgtttatgtatgcttgtgctgcaatggtagcttgcaggatgaggtttttgagaatagcaaagtaaaatgttctgaggaacaatgtttagcaaactgtaaatcattaaataactgggattatactattttgcttttatatttgtgttcttacaatttggatgcataatattctgccttagtcacatttggaaagtcaaaactggtggatgatttgctatctatctaactggtattgagcagtattaatatgcttttcatgttgagaagtgttcaaatatgcttgatcattgttagagaattggcataaacatcatggcttttcaaataacccctctgtaaagaagcaaatattaattgaatccttcgagattaagaaaacaatagatttctgagtaatgcctttttcattggaatggtttaaagaaaggcctggcctttaagttctataattgttttaagcaccatacaaagtttgatagctgtttcagatgaatttatttttattcaatttaaactgtataactgctgtccacagcaggcagtgcccttttattgtcatttaattgggaatattgctgtccaaaataggcaatgcctttttattaatgttcaattagtaatgttgtatatttctcataaactagcatgtctgttgcaattgctctttgtgttctgttcaccaatctacatcattgtttttgtattccagctttcccttataagcatacagtggaacttcaataattttggtagtttacaatttggaggcttgattactcattgttttggcagacaaatttacctgagtaccaaggtcaggagaagat

SEQ ID NO: 13091 - DNA, 3434 bp, Vitis vinifera
  Intron number 5 from transcript GSVIVT01037816001 (locus G SVIVG01037816001) derived from phytozome v7.0 (chr-ID chr3 ; pos 7566091 to 7569524 reverse strand)
gaaaattgattaaggtaaatcatatgccacgtattggaggtgtaatggttttgaacttattgactacatgctggcactttgccttatttggatgaacatatcctatttattctacatttttatgtggtctttcatgaaacaaaaatattagtggacaagttagctagattcatggttaagaagttcaaggagcggtttttgatccttgaacagttgtcagttgatctgttgaggaaattcattatatggatccttttatccactctctatgtatagggtattaccaagagttatgcaatgctagcaaaacaggaaaaatatctttgttggatctgtgaacttgacatgtgttatacatctcataaagggtcagtattgataataagagaaagaagttgaaacaagaacagaatggatggggctttcactagtgaagtttaatttggagtgttttaatggtttttaggttcatatagtgtaatggtacttgaaatggacatggtctaagatccattaagaagaaatgaatctttttgtggtagttctcatcataaatagccacatctaaatcttttcacaattttatgtcttctatatctgcatctcaatattttctaactaatatcttctaataccactggccagaatacacagtttctcaatgatacagctgatatggcatccatatattttgacatatgggctgtgttaacgagaaacagatggaccccaatttcttcctcctttcttatagttctttttctttttaatttgtttgattcttaaggctcttgttatgaaacttcagtctttcaggggcatgttccaatgcttcaggttaagaagcttcttcaaatgacttgaaaaaggaaggaattctccaacaaaattttatgaatatataatcatatggcaaaacaagcttctgtgtttttgttggctcaaaagcttttgtgtttttgttgactctcaaagcagatacataatatgtacccaatggaatatacatttttcaccatatacaccacttagttaagctaaaattttgtttacaaaattttaaccctaaatcatgcatttctgtctaatttaactctttctaaaatttcattcgagatttccttgttccgctgcaaattcctttcattttccaaatcaatattgttattcaattttgttcaatatgcctgttgatgtcttcatgcttttggatcatcgacatacctgttgattttgaaatatgggaccatggtaataatgagccactttgaagcaatcagcttgacttgttaagcagttcataccatctctggccatttctgaatctccataaaaatcttgtttccttatctggttgagttcactctaacataggctgacttgtgaatcaagccgatatattttgggctaggctcaattggctggtgaggaaaggcccacttggttggcttgtatgggttggttgagtccatttattcaaaaggtttttagtgctagtgcatgtgagagagatatataaagagaggtagggttacgacaactctgtcttgactgtttgagttgaaagatgaaggaatcccaccaggtaagtgctcttctgttcttctttcctttttagtaattttctcttgccgcctcctcttactctcagttctttcctatttgttttgttatttggttttggaattttatctttaaatgctatgtttggctcatagggttttagggtttcctcatcctcttacattccctagcccgatagtttcctgtaggatttagagacaagagtttggtttccttcttccccatacttacctctctcaattatcttctatacttggagatcatggttcaaataactgtgaaggttggtgtgattttgatccttttggcggatgtgtcatttgtcacaggttttgctttgtatgaaccattttttcatgcactgagttgattggaatcaaacttgagcttggggaaaaatgtctagccaatctggaatatgcttggtgaagtttggcacaaaaccaatcaagatgaaataagaatacttgactctacttggcttggcttggcttatttcccttcctagtttgaaagtttgtacctttggcaattaaattgactttctcaatctcattataatgttttgagtgccattattcgatctcattatagtattctcattgcgattattcaaatgtgataatttttgtagtgcttatattatttttgaaaaaaaaaatgtattaactttatgatatatataaaacagcatttgatgttttccagcaatattttctccaccaagacgactgggagaaatatgggaaccctccttgtggggagtaggtcatacgcctaagcggacaaaagtttgtgatgaatgaccggggccttagaagtacttattgcgacctcagtcatgtatttttatctcttttagttttttttttttttttttttttttatcagatacaaaacatgtattatattaataaataataaaggtacaagagaagggtgagaggtccttccctcaaaatacagattctgatcaaagacttacaccccactatacaaaaactatatacagggcaacccccaaccatctcaaactatatacagattctgatcaaagtcatgtattcgtatctttgatttgtctttttgggacttcatatcaaaatggaaaaacagagtttattatcaaatttctttagagggtaaagatcatttaatttctcagaaaaccaagcaactttttatgttattcactggtacttctagaatttggtttatatatggttttttagttggtgatatataactaaattggattttcttgtatatattgtttttgtatggtgagatatgtaccctgatggaactttattctcaagttgaaaccattctgtcttgatcatcacaatcatctggattggcaattgaggtttgtacttataagccaatagcctcacctagagaggagagcaacaccctcttgtgctttgttagcatcatctttcctcttgaccctactaggatatatattgtataggttctagttctcttttgctgtcaattgttgttcttttctagcagttttctatctcatggaaggacgtctcatctttcttatatgtaggctatttatgatacttattttgattctttgcaagagaaaaggaaaaaaaaatgagattagtatttcaagcaaactgcagaagaactgtgtcatggttgggaaaacagtgccttacaacgatatgggactgtattaaataccctggaaaattaggtggcttgttcagaaaatgggtcagttgatgaaattgatttgatatagttgtttctggtcttggactataatgttagacattgctgactttcttacaggtgaaacgtaagtacaggattgcacatactccagc

SEQ ID NO: 13092 - DNA, 2201 bp, Vitis vinifera
  Intron number 7 from transcript GSVIVT01000234001 (locus G SVIVG01000234001) derived from phytozome v7.0 (chr-ID chr7 ; pos 20257062 to 20259262)
gaaggtaattctttcttatcttttctacttttttgttccttgctagtttgtggttatgtgttacttgatggatttgatttgtggaaattgttgctattgtgtctgtctgttgcttttctttatcaaactattttctgttccaaaagatttttgtttgcattactactgtacaagaatggttacttgttggatgtttaaaaccatttttataaaatggtattgattgaaatcttcttctattataacaaaaaaggaagggaaaaaaaagagtacttgtgtagaccagtgttttcaaatgtgttggtgaggctcacttcagggcatgccttgacgcgaagcgttgccaaaaggcgttgaagcgttcacaaaagtgctaggctcctaaaaggcacacgcctctagagttgaagtgtatctagggcgtgcttccggtgcgccttcaacacatcagtgcttgaggcataggcctcggacgtgtttttgttgctgcgactagaccaaaaaaaataaaaaaaggtttgtctttaaccaaaagaccctatggaaagtgcaatcaaagtggaaaacacaaaaaaaaaaaccctaattcttaattcactgttggtgaattgtggcaacggctcactctggcgtagatagcttcgacatctccccattgctccaacgagatctcctgatatggtcctcagcttttcttctccctcttcggtttccgttcttttctccaattctaatatcttttcttctcccaaattggttttatattttatttttcattttatattacccttttttttcctttttttttttcacacctattagtttcttccttatctttcttttttgttttggtttttcaaaaagtatctcgatctctttgtttaatgaagctggcctcctttttttttttttttttttttttccctttttctattttaaaaattagcaaactactaatttctttttctataattgattttatagtaaatagtataaatttttagatagttgatttttcgaaatagtaaaaaaatttagataattaattttattttactttgtaattttctttagttattaatttttttcaaacaacaaaaaaattagacgatcgatttaatatttaaattatttagaatatgaatttgtagactttgatcttcattatataattaaattttattattttatattctaaaaaaggttatgaaattaatttgagatttaatagcaaaaatttatataattcaattatcttttatattttttatacattttaaattatattttaatagttattaattctaaaaatgatagtctcaaaaggcttacacctcaacgcttcaaggcttacaccttgcctcaaggacatgaaaacggttcgccttacgctttcgcctttaaaaactttggtgtagacaaagtccaggtggatgcagactatatttcaagctttgaccattgtgccatagggatatggactagatattcccttaatataatgactaatgagtgtttgaccagttgtatactggtgaacaggataatgattaacgaatgaatttattcagactgaaatttttttattgttatcaatttaaaaggggaagataaaaaacaaataacagggctgttgctataaatgattgaatgtctgataaaagaaaaaaaatgattgaatttcttaatgtgttgctattattttgaattttcatcatggattggttagatatccataattaactggatttcttcaagtataattggaattaatgcttctcttttcttcttgttctctttgttaccctgcaataacttttggtgatgcatgtgaagtactttgtttattgggctttggtattttccaaatccacttgcagcatttctttttattagagaatatgttgtttctagcactatgaggtccttgatatttggcatgcatgatgggcaatggtaggaatatccattcaaagtccagtttattgaaacattcaccctgcgggaattttattctgggtatgagaataataagctctgcacctggttctgtggtatcagcatctatctgagatggcatggcactatgtatatgacacctaagttcctgatcaatgcacatcagacaattctatatctcaatgttaatcaaatcaactgatttctgactgtgtaaaatatgatcacttcaggtatcaatc

SEQ ID NO: 13093 - DNA, 7100 bp, Vitis vinifera
  Intron number 2 from transcript GSVIVT01021594001 (locus G SVIVG01021594001) derived from phytozome v7.0 (chr-ID chr1 0; pos 7739741 to 7746840)
aggtaatattatgccgttgctttatatttatgcatcaacatatcttgccttcttacttctaatgcaaagaacttagcaacaaacaagaatataatcctttcttgaactctttagagttgtttgtacaacactatagctcctcagagatagcattcaagtctctaccaatctcatttagattttagactctatagcttacattgagcagtttactttatgcccaaaattctgattgcacaaggaactaggcaccggaaatttccttaagacaaaaaacctattgaaataggaaggaaagatttggtgataatatcagcaaataattaggagatttgttagctgtaaatatttcatgtaaatagaatatcagttaattaggaaattagctattagtttcctaattctatgtgattctatcttgattttatgtgtgtaatctccaatataaggagaaccaatgtcagtctgtaattgtaaggagaataatacaaaaagtattattctgtttttcctcatctttttcaagttcagatggtatcagaacctgctaagtaattcagaagagagaaaaaaccttaacctattttttgtacttcactaatcagcatctctcacaactcaaccaaccaagcctgcaacaccttccccaaataccgattcacatcatgttcaaatcaccactattcgcctcaatgatgataattatttatggtggtcccagtcagtttggatttacatcagaggacggggaaagattggttatctgatgggagacaagaaggcaccaacaccgaaggatccaacatacgcaacttgggatgcagaaaattcaatggtgatgacttggctcgtaaactccatggacgaggatattagctccaattatatgtgctactccacggctaaagaactctgggacaacgtgaatcagatgtattctgatttaggaaatcagtctcaggtttatgaattgactctcaaacttggtgagattcggcaagaggaagactcggtcaccaagtatttcaattcattgaaacacctttggctatatttggatttattcaatgattatgaatggaaatccattgaagatgccactcacaacaaacggattattgaagctcatcacatttacaaattccttgctgggctcaacgtggaatttgatgaagtacagggacggattattggcagaactccacttcctcaaattggtgaagtgtttgcagaggttcggagagaagagagccgcaaacatgttatgttggggaagaagactactggacctgctgaaatttctgcccttgttaataccgaggctgctgctaataaagcagccaattttcagtgaaaaactgaagagaagtcacgtgtatggtgcgactactgcaacaaaccatgccacacccccgagacctgctggaaaatccatgggaaaccagcaaattggaagagcagcaagtctggagacagaaatagccgtgcgatgcccactgccaatgaagcagaaacaagtcccttcaacaaagagcagatcaatcatcttctgaagctactgaaatctaattcctcatatggtattcttagtgtttctcttgcacaaacaggtagtgaacttagtgtctttgcttgctatgttgattctactccatggatcattgattctggagcctctgatcatatgaccagcctgcccaatctctttagcacttaccatgttctggccttgaaaaaattagaattgcagatggtagtttctcacccattcctggaaaaggtttgaaaaaattatctgaaaatatagatctaaaatctgtcctccatgtccttatgaagctaaccaaagactctaattgtcgtattattttttgcaattcttattgtgaatttcaggaccagaactcagggaagaagattggcagtgctaagatgataggtggacttaactactttgatgatgacttctccaatagtaaaaaggttcaggcccttagtagtgttaggtctaattctgtttatgaacaaataatgctttgccatttaagactaggacaccctagctttccctatcttaaacatttgtttcctactttatttaagggtttggattgttcatcactttattgtgaaagttgttgcttatctaaaagtcatcgtaatacttgtttgcaaaaatcttatgtgtcttcaaaaccattttatttaatacatagtgatgtttggggatcctcatgtatcactactatttctaagaaaaaatggtttgttacctttatagatgatcatacctgtttttgttgggtgtatttgatgcataaaaagtccgaggttgaaaatttgtttaaagatttttacacaatggttgaaactcacttccaaacaaaaattagtattcttcacattgatgatggaacagagtattttaatgaaaaattgggaagttttttgaaagaaaatggtatacatcatcaatctacttgtgtagatacctctcaacaaaatggaattgctgagagaaaaaataaacatttacttgaagtggctcatgctataatgttttctatgaatgtttcgaaatatctttggggagaagttgttctaacagcctcttatttaattaacaagatgtctacacgtgttttaaaatatagcacgcccttaaaatattttaagagtttttttccattatcaagaatatattcggacttatctctaaaggtttttggttgtatcgcctttgttcatgtacccaataataatcagtccaaactttatcgacgggctgaaaaatgtgttgttatagggtatgcctctaataaaaaaggatataagtgttgtaatccccaaacaagaaaaatttatgtgagtatgaatgtcttgttctttgaaaataaatcctactttaacaaaaattctctttagggggaaattgagttaatagaagacaatttttgggatttatctcctttaccaaacatgattttgactactcatccgcctcttattcttagaaatcaaagtcggaaacaatgtgataacactagtggaaataatgaagggaatcctagtcatatagtgctaaacattactatatctgaaacagggagagaatcactaaaaccgggtacaacaaatcccaatactgaacttctggtttataatcggataggacctcatcaaaggagtcaaagtcagcctattcctcttggaaccgatcaatctcaacctttgggaactggacctccaattgtcacaagtaactctattcctaactcatcttcaattcctattatttctcctagccaagaaccatcagacctcaatattcctatagctgttagaaaaggaacttgaacctacaccaaatatcctattgccaaatatctttcttataaaaaactctctcataccgatagagcctttacttcaaaaatctcacacctgcttgtctcaagaaacataaaggaagctctggatgatccgaattggaaattagcagtaatggaagagatgaatgctcttaaaagaagtggcacttgggaaatagttgatttaccaaaggaaaaaagaacagtaggctgcaaatgggtatttactgtgaaatgtaaggctgatggtagcatagaaaggtacaaggcatgattagtagcaaaagggttcacccaaacctatgggattgattatcaggaaacctttgctctggtagctaaaataaactcaagtaaagtcttgttatctttggttgtaaacttcaactggccattacatcaattagatgtaaaaaaatgcctttttaaatggagatcttgaggaggaattttttattagtctaccacttgggtttgagggaaaattgggactaaacaaagtccgtaaactaaaaaaaatctttatatggtctcaaacagtcccttagagctgggcttgagagatttgggagtgttgtgaaacgatatggctattgccagagtcaaacagatcataccatgttttacaaacacaatagagaaggtaaggttgcaatcttaattgtctatgtggatgatatagtcttgataggtgatgacaatgaagaattggagagactaaaaaagaggcttgcaactgaattcgagatcaaggatttgggtatattgaaatacttcttggaatggagttttctagatccaaaaaaggtatatttgtgaatcaacataaatatgtacttgatttacttaatgagacgggtttgttagggtgtaaaccagttgagacacccattgaacccaaccttaagctacaatcttctaaaactgaaaaaattcaacagaaagaacagtatcagagacttgttggaagactgatctacttgtcacatacacatccagatatagcatttgcagttagcatggttagccagtttatgcattcactaggacaagaacactttaacgaattctcagatacttaaagggaactcctggaaggggtctactgttcaaaaaatgtggacacttgcaagttgaagcctatactgatgctgattgggctaggagtgctactgatagacgatcaacttctggttactgtacgcttgttggaggcaaccttgtcacttggtagagtaaaaaacagaatgtggttgcaagaagcaatgcaaagggtgaatttaaatcaattgctcatggaatttgttaagtgttgtggattaagagactattagaagaattgaaggcttctaatccgttacctatgaaggtgtattgtgacaataaagctactatttcaattgctcacaatccaatgcttcatgatagaacaaagcacttaaaggtagacaaacacttcattaaagaaaaacttgaaaatagagtaatctgcatgccttacatccctactatcgagcaagttgcagatgtgcttacaaaacgtcttcctacaagatagtttgacaaactaataggcaagttggttatggaggatatcttcaaaccagcttgagggggaagtgttgaaataggaatgaaagatttggtgataatatcaccaaataattaggagatttgttagctgtaaatattttttgtaaatagaatattagttaattgggaaattagctattagtttcctaattctatgtgattttatcctgattttaatcgtgtaatctcctatataaggagaaccaatttaagtgtgtaattgtaaggagaataatacaaaaagtattattctatttttccttatctttttcaagttcagaaaaccaatacgaataagaagcatacctaaactctcatggttgaaacgaaattttgaacgtgccaaataaactcatttcactcatttctgtatccatattgttaaaccaccaattttcttaaaaacttgagcttctaagatttgggttcacaatttaaatcatactctccaacacccttcctcacatgtaacctctgttttgagcttacacatgggttgttgaacaaccaattttcctaaaaactcacacttgaaagattttggttcacaatttatatcatactctctagtaccctccctcacatgtaacctccttttttagcttacacatgggcttaataaattgggcaaataaacatatgatggtgaggtttgaacacatgacctcccatcaaatgagactctaataccatgttgaactatcaattttcctaaaagtttaagtttgtacaatttggattcacaatgtatatcatactctccaacacatacaaatatttttagcctaaaaatgatcatttaggatctaagtaacagaaacacttgcacagaaaatcatggggttcttaaacataaaacacctcaaatattctagaagacatgtttagcacacccttgatgcatctaggattattaaataactcttttctacattctcagatagttggttaatgtcaaagcaacaagttacctagcattttggagttgtgtatgtccaaccacaactcaattttctaggcatgaggtagtagctcctaaatgattgttttgtaccaattttatatgcatgtggcgatgttacttagctccaaaatgatttctttttggatcaatatatcatgtgggcacacctagatgtgtctatgatcataaactagattttttttttttttttttttttaaatgtcagatgtaggttttaactctatcaaatgaacaattggagatggctattattctttgatacaaaagagtaaaattataaaataaaagatatagacaatcttaactctagtagaaagctaattttaataataatataaaaaaaatctaacttcaataaaactttgactaaataataataacaaaataaaacattatcacttcttatacatacgtctaacataagtgtgtaatttaacatttttatctccatcattagttttttattttttttctttcgtcaacactttcaaaaacttgtctaaatctaaaaaaaaggttctatgccttaggctattcaactttattaggaagtgactataaaattggcattctgattccaatgttattaagaagtgacaattaaatataggattttgattcttctgtgagtccttcaagacctaatgaaggccatatgtcaatattccatcttctttttgggtgccaaaccaaaagaaaaaagaaacgtgattatatgtgacattcatattgttaggtagattaccactctggaaataatatctattgaatatggtctatgtcttgttagctcattgaacagtgtaaggagtgtccaacatccatagatgactaactttttccttccttagtttgagaaatcatattaaatagaatgatttgatcaccctagatggtctagaaacaagttagtccatgttcaacacaaaatgagactccacatatatctgaatgacacaacatgatttgtccagctaatcctaaatggtaactaggatcattttcagtatacaaactataaaatgaaccaatatagcatttgagtctcttttgtagtctctttagaatgctttcatttgttggacagctaaacatgatcctatagtccatgaacagatgggttttctttgttcctttttgcaggtataaag

SEQ ID NO: 13094 - DNA, 1443 bp, Vitis vinifera
  Intron number 9 from transcript GSVIVT01000831001 (locus G SVIVG01000831001) derived from phytozome v7.0 (chr-ID chr1 3_random; pos 2664922 to 2666364 reverse strand)
ccgtgtacgtcaaccaggtttacactctcaactttgtcctatcaaatgaaaatgttgcacaagatttcttttatagcattattgttgtgaatgcatattattaagtgcaatcaaaatgatttcagaggaagcaatatgagttttggctggggggttgaggtgggaaaaagaatccttttttttttttctttttttttcttttttcattttttttttctttttcctgcctttattcttcatctgtgaacttgaacttattaaaactgggaaatccctattggcctagtttctgtatgaggatggactccttgtatacccgaaaaattgagtaattaactaaactaaattttgttgttttagtgtttttcttgattaacaatatgagcttcttggctttgatatttaaaaacagttatgtagtggatgagaattctagtttgctctatatcgagaaccgtttttatgttggacagttaaaaggaaaggaaaggaaaggacaatgcttaattttacttaaaaatggattccttgctcaagatgttttaggcgttgttttttcctttttcctttgcccctttctttatgaacttgaaacagagtagaaatatcttcagtgagactcaccctgagaatgaggtcccataaaactgatcaagaagtagatgttcattaaggaatgttctcaaatccagtcttgtagaaattcattatatcagtgaaaaccatattaaggggcttggaggaggaatactgtctgcctcaattgatgtcctaaaattttctgctgtcacaaattctgtcataaggctccattgcatttggaactagcagagaccatttcaatgctgttaaaaagatactaatttttccttgtttaaaatctgaaaactgcctttttgaacctgtgaaaagtcatccccttcttgagaggatcctagttattgtctaagccttaagttagatgaaatagatctacatttgtgtgttttaacttttaaaggaactcgattgatataaaattttcatttatttctttgacatacaatgtacagattaagtcatatattgaacttatagatagtttcatgaaaaccgttcttttttagtgcttaggatgcatatacacctcagaatcaattaaactatctactaaatgacctttatttgcgaagttcaaaagatttttgcatgtggacagcagattcttccattttattgataatctgcatactaactactttttgataagtaaaaatgtattaaaacaactaacaaaataatgtatagtgagacaaattgtttaccaagtagcaagttctcgggttgatccctcatagaattgcatacttcctattgctatagcatcctctttaatttactagttctgtgttctttcattttcattaacacattttctttcacatactaccttgcagattcaag

SEQ ID NO: 13095 - DNA, 3490 bp, Vitis vinifera
  Intron number 3 from transcript GSVIVT01024449001 (locus G SVIVG01024449001) derived from phytozome v7.0 (chr-ID chr1 6; pos 2725076 to 2728565 reverse strand)
ggcaaatcttgtacttggttttgagcaggtaacttttcttttttcctctattattattattattattattatttttaaacattcatgtgcttttttgaaaatgaatcatgttttcccttatggtcaagtgtttttttgagcagctctgcattgtttttgcaatttaatggtcaagtggtggactggaatggtaatatgataaaatgttgagattttttgcattaaagcatgacatgctagatatgatactacgaatagtttaatgaacagtttcaaattttttagagtgaagtacaggaagaggtcttcttgtctgactgtgctttgattgttcaatgagatttatttaatttccaaggaggttcatcttatattttcattttacaaattgtatacagaattttgttattaccttttcattctgtcttttagtttggattttggtttgacggattacatgtagttgataagaacttttcttcagtggtcgtcttgacttccagtgatttttttccacttttcattgttgtttctaattgagctgattttgtttgtgtatgctgttacccttacattcagacaaaccgtttaatgcttgttttcacatcttcaagacccatataaggttttaggcgcttgctagtgatttttaaagcgtaaacactttatttatgtgtgtgtatctatatcaacatcaatcaccatatcgagcttcttgaaaatatgtagattttgattgctgtagaaaggcaaaatttaaccttttacaagttaatgtgtaatcaaattaagttaattatgactaatagaaaaatcaaatgtttataattaatttaaattgtgattaattaaaagttggcacttgacaagttttctaccaataaaataacatcatgtgtagcatgggcccaacaaaaatgataattttaagaaagaaagtgaatactataaaatttagccttctaaatattcttaaatattatttttaattaaataataatatttaaaggattaagactaccaaatatggtcttttaaatctccctaaatattaactctaattcaaaaaataatatttccaaggaattaaaaaactatccaattatgataatttcaatccctataaataaggttaattccaaagctttcaagacgagttacaggataaaagttggaggggagctcttcaagggagatccaaaacttcttcaaatctttaaaggagaattcaatctttaatttctttgaagtatcttttaatcatcaaggttctgtttgagaagtgttttcgaagacacaactgaaaaatagtttttcagaattgtttttaaaaacaattctttgatgttttgttgaacaaaattttgtttgggaactaaaaatgtttttaacctgttttctatgtttttaaatatgttttaaaaataacttttatttatagtactttatttttaattattctccatatttgtatagttattttttaaaacaaccctccgaaaaaaagtgaaaacaactaaaagatgttatttgaaaatatcctattttctattttctcgttactaacatgtttttctatttttttattctaaaaaatagaaactatttttcagaacaaataacaaacaagccttaagattttcaaaacttcaagtttcaaactttaagatcaaaatttacaaaaagacctttttgatttaagatcaaactactcaagtccttgatcattattgttcaagttaaggcaaagcttaagtcatgtcaatgctcaagttacatcaaggtccaagtcacaccaaggcttgagtcaagttaaaactcaaaactaaatcaagtcaagacccaaattaagcttaagctatttgagatcatgcttcttcaaacccttaattaactaccaggaaaggaagaatcagagcacaagatagagattatacccacattattcttcaaatcaataaaatccaatttgaccacacattttttctttaagagaaattcgtgtgtacagttgtcactactaatagtgatttaagaaatggtagaagctaccagaaaacatggacattttggaaaatacttgggtaatataggagacacttcaaatcaacagatttgaggccatgatggttaggtaaactttatgaggaattatatgcccaactcttctattgattgcagaagcctaaactcaagcgaaactaacaaacaaaagtacataggaaacagaataatatgctaaaagagaaaaaaaaaatataaggaaggatgagaaagatgtggtagaacacaaggggaaaaactggatctgaaagcggtctaataaaaaaatccagcttgaaaaggcacatggaggttgataatcccctacaagctcaatgaaagaagaagtgcttttcctagcaaaattgtcagcatcctgattcgccttaaactgaaggaataaactattttatttgatacattaagagttctactgatctactgaacacattggttgaggacaccaaggaaatgacagccaaagagtttcctgatccccattgaaggagcctgtttaagcttttcagcaatacaaatagtttggccccagttgccagatgaattcatgttggcttagagcaagaggagttcaaagaggacactgcagagacttggaacagggtggttaaagtggaaatgtgattttggagtgttgtgtgatccttaattgggaaaacctttgcaaggcaacaatgagacttgcatcatttcgtggatattgagggggataagtggcaaaaatgataaaaactagtgtaagaaatgaatttatctgttgcaggctaggggtggcactaattgagggacaagatgagagagagctgttagagttgtttcttaagacgattcatacatgtgcaacttaagccaataaatatactagtaagaagtaggttgcttcaaattgaagatgcttaaaggacgagaaagacaagaagagaactaggattgaggagtgagagagcaggcacaatggtcatcaatttaacggaggacagggccttagacaatgccgaatcataagtaaggtttggcctagctggccccaaatatttttatagggcattattgttgttcagtcacaattatacatttgtcgttatatatattttcatggggttgtcagctgacttggcatgttcctttctctttgtaagatttagatgatttaaaaaaaccatataagtcaactaccctagctattagctgacaagagttagaaacctatggttgaaagatgcatggcttttatcattcgctgcagaatatatatgctctctacttaatatgcatcatcagaagtattattctgcactacggttgttttctttatctctgaaacattttagtattgctttattcttttttctttgtttcttttgtgcatttttgttttcctagttgtgttttttttactaatctcaaatgtaattgtaggaaaaccggt

SEQ ID NO: 13096 - DNA, 2242 bp, Vitis vinifera
  Intron number 4 from transcript GSVIVT01010873001 (locus G SVIVG01010873001) derived from phytozome v7.0 (chr-ID chr1 1; pos 16566779 to 16569020 reverse strand)
gtgccaatatcctgttcccaaattctgtaccttcactataacttgagaacattcatcttaacatggaaattgtgataggccaaaattactattgttcattctaaatccatagacaccattcatgctcatgaacgaattagccgagctgcacacttcttattgatcctttattatcaaatcctagtatcagtttcttggatccttcctcattcatattttcagtgtagtaggctataacgcgaattgtaggttgtatgagttcttgtagattccttccttgtttctgtaatattaacgacacactccagcccaatcccaattagagaaatttcctttttatttctcacagcagatgctttttcactgtcctgattgtttgaagcccattgagtgcaagaggaaaattgtctgcttggtgagatgatacaaatggtttaagatatgaaatccttccgggacctagcatttgaataattttagctggtaagaattcatacatactccacaaaggttgaactagatggggtgtctcttaacatctttttcttgtcgcttttgcatttttctttctctccattactttgtttttctcctacgaagacagcctttttgaaaaccaagatcctaggaatgtttttaccatttgaagtgaggtggaatccatagtgaggaggttctagagggcatttggagaggatctgttaagcttttagttctgcttaaagggggaattctctcattcttgataagcagaagcaatatgtataaaatgtgctatggaggggggtatataaaaaaaaccctaaaaagctaaagaagagaaaaaagatcccaaagccaaggccatgggaaaaggccttaggccaatcccatcccctgatgacatcctgagaagacaaaatccccaatctaagtgaacctatagcctgtgaaaatgaagttaaatgctgatagctccccccataaagattctcacacaaaagacctttccacagaaagaggccctcctaaggaggtgcataagaacatggtatggtgatgtagagggggtgaaggcccttggaaaaagtgccatggaaaatgacttgaacaaaaaagggaaccatttcagagcacttccaagctaaggcatctttaccattcattcttgtggtacacctatagatataagactgtcaaactctccacttgctcaagctttcaatgatgataaaatctgatagatctcaagttcctatacttcctctatctacacactatacatcagcaatcagagcttcttgataaattgccaaggcaaacaaatccaaggaacaatatttaagagcactttcctcgcaccagatttcatttcaaattttaccatatgacctttgtccacaggaatattagtttgatcatagaaagcatcacaacccttactaatagcttctcaagcccctcccctgttttgcccctgccgtctttcaaataccattggccccctttgcctaaatgtgctattaggactgagagtacttatactactaagcttggagaatcgcaatcaactgacaagtaagctagtgtctaggctcttcaaattaagaataatttgcatgaaggtccaatgcgggaaatcttgaactctgaagaatgaggcagattatttaaattcagtgagtgatcctacttttgcacaaagcttgagaaaaatggaggaaacaatgttacaggagcccattaacttggtaggcatcaagattcagattttagcttggatatattgaatgactccaacattttgttactttaaccaatttgaggtaaaacttctttcagaaccacaaaagtgttggtattaaccttctagcatctgtcatttgtcacgttagttctttttaaggttttgaaactattctgataacaattactatactcataataaattgttgcgatttaatgaacagtgtgacagtaattataatgattgtgactgtgaatattggtcattggtctgatgttatattgattcactgttcacaaccaaaatgttatctgtgttagtttttatggattgcagagacaaattctctctgttttatgttttattgttttagaatagcaagccactggcaaaatttgtatactgagaagtttaacaaaaataaggcagactttttattaagtatttttaattccatttacacatttgttttcctaaaatttgatgttgtaggtgcttcagttgaagccgaggtac

SEQ ID NO: 13097 - DNA, 3071 bp, Vitis vinifera
  Intron number 4 from transcript GSVIVT01015356001 (locus G SVIVG01015356001) derived from phytozome v7.0 (chr-ID chr1 1; pos 2944682 to 2947752)
ctcgggctactgctatcgctagtgggcacggtgctgtgtgcaatagtagagagcataaggaggagaactgccatcaacgaagggttggctgataaaccagatgcggtaacaagcatgtctgcaatgtggttgatcccacaatacagcttgtttgggctggctgaagctatgaatgcagttggacagatagaattctactactctcagtttcccaagagcatgtacagcatgggaatggctcttcataccctctcaactgctctatccagcttggtgggggcggctctggtgaggattgttgatggggttacagggaagggagggaatgttagttggctttcaagtaatattaacaaaggccatttggattactattattggcttctcactgtgatgggtgtggtcaatttggtgtattatttcctttgttgttgggcatatggacctatggatggtgagcctttggtaagggatgaaatggttgaaagtgaagaaaggcctcaaagtagagcaactccgttagcttgattttcatgtttttggatgtttggaaagtaatcttggttgagatcttcaaacatcttgaactcagaaaatgtagatacaaatacctcaattcattgcagatattgtaaaaataatatatatattatttttacaatatctgcaatgaattgaggtatttgtatattgtaaaaataatatacttcagatttttcttgtcattgagcaaaccattgtcatccaattacttctttgaattaatctcattaaatatattataaaataatattaatatatttgttatttgatatatatgttatttttatatattgaataatataatataaaaaaaagtatttataaagtttaaatattttaatcatggatattattcaatgtaagagaatttttttttaaatagaaaatattgaaatataatataatttttctttaaagattgaaaaataatatatgtttcatgttatatttttattcctttgaaaaactaaatataaatataatataacatatcactacattggatatgctatatcattcctattaaatataatatataaggatatcatatctcaatgaaaatcatatctattttttatataattagatatgatattttataatatacataccctttaatttcttatcccactaatcaaacataatccaatataatataaggccaaggcatggtaatattcaatacaatctaacttaaaacatatcttaaatacataatatatatgtcatcatatatttttcttgcatatataatattttatattatatatgttatcatataaatttcggccatttgattaaaagagatagaataatcccaaatttgtaaatctaccattcatatttattaacgtaaaaattaatttatttttaataaaaatacccctatatttttcttataaaaataatattttctttaaaaagttgtatgaaaatagtcaaaatattgaaagacattgaagttaaaaacgagtactttttcatacgtttgggaatgtgccttttcactcttcaaggcaattttataaattcctattacctaatcaacctacatatggttgatcttgcaaacattattggagaataaatttaaggtaatttttgtaaaatattatgaattaaataaagcaattaaaaatacgaggaagattaagaaaatggcattatgtgtagatgtataatgttcttttctggaataggttattcatattagttttttgagaatttataataaaaatatgataaaatttgagaatatatttaggttatgtttggttttctggaaatactgaagaaagaaaaaaaaatgtaaaggaaaatgattttttcaagtttggttgtcctataaaaaatatcaaagaaaattgaatataattaaaactagttataaacttatgcacttttaaattatttaatatctatattgttgaattaaaataaataaaataagtttgaaataataaataaaaataatttatcgatttttaatctattttttatttttctttactttttatttttttatacttttttttttatattttctttcccttgcattttccctcaatttttctaggaaccaaacatactcttaaggtaaattttttaaaatattatgaaaaaaccaagtaaaaatatgaagaatagatcaagaaaatggcattatgtataagcatacttaaattttgaaatggaaatttattttgaaaacaatgtaatattacttttagctatgtttagtttccaaaaaatttgaaggaaaatgcaagagaaaaaaataaagaagaaaagtagaagaaaataaaaagggaagaaaaataaaaataaatttaaaatcaataaattatttttatttgttatttcaaatttatttcaattatcttaactcattaatataaatattaaataatttaaaaatacataaattttaattatatttgattttctttaacattttttatagtacaatcaaatatgagaaaatcatttttcttaatattttaataatgttgagaattgttttttacatttatttttaaggatgatgttcgaaaagtgagtttagtatattaaaaggacaatgtttgaaaatgatttggaataaaaataagaaagccatgtttgatataatatcaaaaaacaattattattatttaattactttttttaaatacaagataaatgttttgaaaaataaaagcccttccaagaaccatttttagaaaatgttttcatcccacccccatctcagtgtttttgaattgaccatcaaacatgcccttattatttctagtaactcgatcatccatcaactaaaacaatttatttgaagaaattaagtattattaattaaataaaaagatggaagaagctcttcaccaagaacatttccaggcctcctcgaactgaattgagagtgaatcttaatggcgtcttccttgtatatagattagaggcgggccaaaggctgcagcagccttgaaacgctgtgagcaggaagttgcagaagagaggccggccggagaaga

SEQ ID NO: 13098 - DNA, 12950 bp, Vitis vinifera
  Intron number 1 from transcript GSVIVT01029996001 (locus G SVIVG01029996001) derived from phytozome v7.0 (chr-ID chr1 2; pos 8788123 to 8801072 reverse strand)
cttcaagagcaggctgatgatcatcctgctcttattaagttaagatttactataatattttatttttctaaaaccaaccatcacactatctcttattcacaagtataataaatccaccagtcatctttctgcccaaaagctgaaatatttacaataatctctaagttaaaaaaaatatttccaaaaatattttacaatttaacaaaatataatttaacatacaaaagtccatataactcaaattggtacatataaaaagagaaatataaatttaaaaacaactattattatagttcttttactttctagaacgcttcttgaacttcttgtggtccctctgaaactatatttgcatctaaaattttagaaaataaagagatgggcatttccacgttgctcagtagggtgttttacacccaaataggttagaaattctaggtcaataacacaaccatatgtcaaaatacaatattacatttacaatatatacattaaaagaaaccttaaccatataaatttaaaacaatcaaaattatcattttccttattcaatcatatgtttagtatatcaacaattctaaatttacaaaataaacaagtcattttagttttgaataatatattcaaacatacacttgataaataatacaaatccttcttccaaacgcaattatgatgcaaatgcttacacgcaatcacacaatgcactatggttctcaagctttcaccaaaggatacacatctgtacctaaatatactccccattcggagtcttcccgaagtaaacttttgggactttcaccttaaagatctcacttccttcttaatttgccctctctgggatcatttcattttttttttcttttcatttttgccctctccagggtcttttcattcttatttccatttcacacaaccatttcttcaatctttctttttcctcacacaaccatgatgtatgaagtgcgatcacatcatatttcaacatccaaaattaataattaaaataataggatgcaagatatactctcctcaaagcacaacctgaactttcacgattcatacaaccaacttattcacccaaattaataacaccaatgcatctttattgccactgtgttgcttactgaacccggatggcaaagtgatcccaaataccaaaacttcaatgcagtctcatggccaacattttgaaccaatagattggagcatagatatgatcatagaaatcctccattaagttcacttccccataacctcactcctcaaatcccagcaacttagccattgataatatcatcccaccatcaacaacaaacaaagaagaataaaaacataaaaatagagtatgaacttagctctatttcatggattgtcaaagagctaggagaaggtggaatccacaaggaacaagagcatgatttttatatctcaagttcagagaaggaacaatgcatcagatatttacaagagaaagcaaagataaaaaaaaaaaaaaaaaacaaacaaagccaaaacagagcatgcatacagagagttagatccaacaaagcaaatgagtggcccttgataatcgatcaacaaatcaatgctcagaaaaaaattgttaaaattaaatgggaagggtagggatcttaaaaatttttattttaatttttttcctcgtatttttttatgaattctaagtgaaattattatgaatcaacaattttattgatatttaaaattcatatatatatatatatatatatatatatatatatataaatatatatgaattttaaataaattttggaaggtatttgtaatggggtatttttatttgcaatttcctattatgttgaaacattgtaagataaatcaaatatatcgggtatgatttggatacaaataattaaaataataataatttttatttaaatataaaaattaattgaaatttacttttcaaagataatatttgttataaatagttaaaacaaatgtataattattaattttaaaaattgaagttgacattgaaattcatgttggagcaattccgaaggcccactaggccaaactaagattgactcggaccagtatggtccgtttaaatgcctacctttttattataagctcactaagctgcatctctcaagactctagtgaaacacaatctggcccaaataaattttccgattcaatccacttcctacaattccgccaaaaagaaataatttcttattgaaaaaatggttaaaaataagaatagcaagagaatcaagtattgctcaaaagagtttttttttttttttttaaaaaaaaaaaaaactactatcttaaccttaaaaaaaaaaaattgaaaataagtaaaacataagataagttacaaactaaatgcaccaaaagtaaattcaaaaatggaatagatggttagggacaataacataaacaagtaggtttatcaattgttgaatccatagaatctgtggtctccctatgcattatgaatttttttctctgcttcaaataataataataataataataataatgtttattcatactaataaacaattcttcataatcataacctcctaatttccaataattataattgaaattattttgaataaacaatgttgaaaccaaacaatatttcaacataataggaaagtgcaaataaaaataccccattacaaataccttccaaaatttatttaaaattcatagattttttttttttaaactttaaatatcaataaaattgttgattcataataatttcactcaaaattcataaataaataaataaattaattaattaattaattaattaatgagggaaaaattttaaataaaataaaaaattaaaaccctacccttcccatttaattttcacaattttcttcaacttcaaatacaaattacattgtttattcaaaacaatttcaattataattgttggaaattagtaggttatgattatgaagaattgtttattagtatgaataaatattattattattattaaaattttgaagtttttactatttattttttattttttatttttcatcattttcgttaattttattgctattagtatgaataaacattattattattattacttgaagtagagaaaaaaaatcttaaaattaaaacaaatgtaaatttgaagggtatgggtttttacttcttcttttttcataaatttcatcaattttaagtataattagtatgaataaacactattattgctatttgaagtggagaaaaaattcttaaaattaaaaataaataaaaataaatttgatgggtttaaaaatataaattcaaatttaaatttatgatgacttttatttatttacatgatattaagtatttcattattataataatgtattgttaataatagaaaatttttgtactctcatttgattatataatattaacacttattaccatgtatctttaataatagattcatattcatgtagaatatgatatatatatatatatatataatttttattcaaattcaacttttatttatttatgtaatattaatatttatttaatacattttaaattaaataagtactaatgctttgtaatcaattaaaaataagaccttgaggaaaatcaaggatatgtgtaaatataaatttataataaaaatttataaatataaacttatttattcttgataatacatggatatagattcattatttttaactgataataataaaaaaggcaactgtgttggcctcatttttcatcactgttgagggattggagacaagtatggttcaaagtcgcgatatcgatcattgactcagatgatctcgagatatgttagtctcgacatcttgattcagtatcaagcaatacgcaaaataagataattagaaatttcataaaattataaaaatgttatgtaaattatatataaaaaatagatagaaattaaataagcttaaaaacttaataaaacaaaaaaatttcacatttaactcaaagctatttataataatactaagaattggggatttaattctcaatctgccacataaatacatttaatttttcattaaatcccatctcataccatccatatcattttggactcagtcatttaatttaatttaataagttaccatcaaatcctatctcatatcatcaatgtaaatccatataaaatgcattttttactttaccaatttgggctcccaatctcgcacaccttgcacaccaccgttgctgtcaagactatcgatagatgacaccacctgcaattgcaaatttgcaactatgaaagacctcggatggggagcaatctgactatgaggggttgcctggccgacgtcgccgttgtaagattcagtccacttgacgagttaccaccaccgacaccaaacctccaccctccgatgattctcgatttttaggaaaatcaggtaagtaaatcctaaatcatgccctcatcattcggtggtttctcctcttatttccgaacgggtcaggggttgggttttttctttttcgtctttttttatcttctgggttaaaagctccaatttcagaatcataggtgtttgcttttgaaaggggaatctttgatttttatttttgaaaatactctgatgttttattatgattggaaagaaaaaaagaatgtttgaaaatttttctgtaatctaactgagtcttactgatttcatgccgagtttgtgcattatatcgtatcaggtgttggtctcgtcgctgcaggtgccgaggctgttgatcagtatcttttggagtctggaggaatttaaagtgtctctgcaagtatttcattagcaaatgtgttaaaggaggctggtttttatttgttccactcaattgttataccttatgcacttcaatttcttgtaagaaagtgtaattgtagtataatctgtctcttttattaggatttttgtaattgtttttcaattttggttggatcttggaatgagaggtgagcatatttgggttatgagaaaatgtgggaaagaaaagtagagagtgaagtgccatatattgaattttctattgtttgggaacatagaaatgaaatttctaaatataccttttccttgggtctttcttgtgtaagaatgggaaatattagcacttgctattagtttatacttcctatgttaagaggatattaccgagaggtagttgggaggcccagctaaacaatatgcagaaaatatgttttataagttcaatcataattctatcatataaaaccatatttgcaatgaaacatctaatagccatgtgggtattccagcgaagaataatcaccaataatgtattaaagaaaaagaaaaaaggaaaaaaaaaatactctcattactcaaaatataacactttcaaaagtacaagaagaaaatatgtttttttgttaataacttcttatggaccaaacctattctaaacttggggtcgctgcacctcttgtcctccttccttatcattgacattttttttattcttgaacatgtcaaagttataaaatgttttatcccaatagcatgttattttaactaagaacatggtccacatgaccagaaggaaccatccaaaatatgggattaagatcaggatcaaataaaagcaagtggggttagatttgtttggaatggtgcatggccacctttgcatggccacccttatgccacgtgtcacttcctttttttttttttttctcattttcaccattcttggtttaaaaaaatatttttttccaaatctcatttttttcgcattattttccagattcttcatccttagagctttcaagtcccaaaaatcacatttttaataaaattttgttgccattttcttcggcatggatttccataacttccatgatttctaaaacattttaaaaataagtgtgaattaaattctgtaattccaagtgatggaatttacgaaattaattcatacaggaataaattgggttttggtgaaggcccaacatcagtgattgtttccccgaaaaataaatttgacttaattgtgatatctgatgattttgtactcgattcagtggcttgtgagctatgttttatgtccattatttgtgcactaacctcattttatgatagcgcgttgccgcttgctgatcaggtacgcattttttctcactctaaccatcatccttatatgttttggctttcaatatgtgatcatgtcggtattcattgtttttattattgattgttgcgtcaacttcattttattagtagagacccgactttggggacttaaaggggtgctacggtctttaccgtaccttcccgataagtaacctgacccccaaactcgatccaattttttacagaccaccttttccaaaataaggagtcacacttagggttttctttcttattttgtttaccctttaaaaataaaacaaaaataagtggcgactccaagtcattttctaataaataaaattattttcaaaataaaatcaagctcgccatcgagtggaaacgcatgagcctaaatacggggtccacatatatttttttgtaaaatatttttaaaaaattatattataatgcatgtattattttgaacagataataataaaaagggtaattgtgttgccctcatttttcatcattgttaagggattggagacgagcatggttcaaagtcgcgatatcgatcattaactcagatgttcccgagatatgttggtctcaacatcttgattcaatatcaagcaacacgcaaaataagataattagaaatttcaaaaaattataaaaatattatgtaaattatatataaaaaatagatataaatttaataagcttaaaaaattaataaaactttttcacatttaactcaaagccatttataatactactaagaattgtggatttaattctcaatctgccatataaatacatttaatttttcattaaatcctatctcataccatccatatcattttggactcaatcatttaatttaatttaatatgttaccatcaaatcctatctcatatcatcaatgtaaatccatataaaatgcattttttactttaccaatttaggctcccaatcttccatactcgcacaacaccattgttgtcaagaccgtcgacagatgacaccacctacaattgcaaatttgcaactatgcaagaccccgaagggagagcaatctgactgtgagagggttgcctggccgacgtcgctgttgtaagattcaatccacttgacgagttaccaccgttgacaccaaacctccaccctccgatgattctcgatttttaggaaaatcaagtaagtaaatcctaaatcatgccctcatccttcggtggtttctcctcttatttccgaacgagtcaggggttgggttttttcttcttcatcttctttgatcttttaggttaaaagctccaatttcagaatcatgggtgtttgcttttgaaaggtgaatttctgatttttatttttgaaaatattctgatgttttattgtgattggaaagaaaaagagaatgtttgaaaaaaaatttgtaatccaaccaagtcttattgattccgtgccgagtttgtgcattatatcgtatcaggtgatggtctcgtcgctgcaggtgtcgaggctgttgttcaatatctcttggagtctggagaaatttaaagtgtctctgcaagtatttcattagcatgtgtgttaaaggaggttggtttttatttgtttcactcaattgttataccttctacacttcaatttcttgtaagaaagtgtaattgtagtatgatctatctcttttattaggatttttgtaattgtttttcaatggttggatcttagaatgagaggtgagcatatttgggttatgagaaaatgtgggaaagaaaagtagagagtgaagtgccatatattgaattttctattgtttgggaacatagatatgcaatttctaaatataccttctccttgggtctttcttgtgtaagaatgggaaagattagcacttgctattagtttatacttcctatgttaagaggatattaccgagaggtagtcggggggtccaactaaacaatatgcaaaaaatatgttttattagttcaatcgtaatgctatcatataaaaccatattttgcaatgaaacatctaatagccttgtgggtattccgacgaagaataatcaccaataatgtattagaaaaaaagaaaaaaggaaaaaaatactctcattactcaaaatataacacttatttaacactttcgaaagtacaagaagaaaatatgttttttgctaataacctctgatggaccaaacctactctaaacttggagtcgttgctcctcttgtcctccttccctatcattggcatttttttttattcttgaacatgtcaaagttataaaatgttttatcccaatagcatgttattttcactaagaacatggtccacatgatcagaaagaaccatccaaaatatgggatcaagatcaggatcaacaaagttgcagctgctgttccacttaagaaccgaacatgactcaaaataaggagatatcttccatcttcttcaattttgatagttccattagaatcaaggatttcataaaccacaaccatcatgaaatatataaatgatgcaaataaggagatttgcatacctatgttgtgttgggcaaatggggaaacattctcatattggtatttcgcaaggacagttgaactcagaattgtaaggaaagatatgaaagttgatgaagttttgtcatgaaaacaataaataaataagtaggaaattcaattagatttatgaaaataagatactagtagtattaattaaaaatgttagataaatatgatcaaattaataattttatctaattttagagaatatgagtaaggtaaggggatattgaaaacaaaatggagatgaaaagagggaacaaaatgggaaaaggacatgagaaaatgcggcataccgcatgccttggttgtgtggccatggcagatattgtagatgttgttgttcttactttgaggcctgactgggagggatattgtagagcaacacactttgaagcctaaattaattcacaattaattcagggagggatacactttgaacacgcgaatagtagtgagatatgaaaccgcgaaaagtggaataatagtgagatatgaaaccacgaaaagtagaatagtagagtagaatagtagtgagatacgttttgaatatgcaggtagggagtgaatttataagtgagcgagaggttgaatagtgcctggttgttggtagtgagaagttacggaatagtccctcgagtcaagtggtgagttgtttttatgtgagtgtaaagtttcaagtaggaatgtgagattaggatttagctcaatgcttgcttaggaatgacaattttccgggtaattcgggtcacccgccccgtccctattgggacgggtatgagaatatcctattcgggtataaaaagggtttggggaatatataaaaacccgaattgggtttaaggcagggatgggttttgcagtttctgccccgccccgtatgtgaattaccaatttacccttatgtcattacaaaatacccaaaaagtcctacacatataatcatttcttcctcaagttttagggttattttgctcatgagagagttagagggctttcgctctcatttcttcccgttttctcatttcttcctaaattgctcagggttcttttgctcgtaaaaggcctttcgttttctcatttcttcccgttttctcatttattcctaaattgcttcttcccatttcaccctaaaagcacaatttttgctctaaaaaccaaaaaccaaattcgtagacaacaaattattagggtttctatggattcctcatttccaggtaagaaaaccctaagttttgaggctttgttagaatgtcttgtttttcatatttttctggttttggtttatggatttgagattttttgggttgtttatttgtagatctgtgcattttgttctcatatgtgcagtttgtagttttgttgcacaacaaatgcttgattaaatgtgtttatgataacccatataacgtttattgaaatttcagagacccatgttttgtaaaagcataattcccgaaaatacatttgggatggggatgagattatcagctcttttgtaaacaggtaagggggacaccaactcgccccgccccgagtttgggacagggatgggcaaaaaaatatataaccgggatggaaatggggtaggggtggcatgtcccatacccgccccgttgtcatccctatgcttgcttattggttgtacttgtattttttaagggtatcaaagttttaataaatatatataatatttttagttttgaatcgatgtgggataaataatttttatttcttttaaaactgctgataacacaatatccaagacaaaaaaaaaactatgtatcaacaaagaaaactaactcaaaaataaaaatatatattataatttaaaatcccctatacacaaaaataaaaatataactcatttctacaatctaataatgtaaatcattaaatactatctaataagtgatttattttatcattaattttttttgcattcttcatgtgctttatatatcttctcttaattgatgcaagttgggatatacttctcttttatttttaacattttaattttatcctttaattttataaataaaaaataaagataaaattcacaaatgtatatataaaaatgtccaagaaaagattccacatttcaaaagtttcaaatagataaaaatttgttatgaaattttattattaagttttgaaggtggaaaatcataataagatacaatgtttaactactgcaaccactttaaaaactactttgtttatcatttatcaatatttattacaaatttataaatttaccaaaaattcttcatgaattattaattttttctttaaatattttgatcatttcacttaaaatcatacaacataaataatcttttatcatcttttctatcatatgctaagatgtgaataatggatggtaaaagtacaaaataataataataataataatgaatatattttgtttttattatttattttttactattagtaaccactcgatatctttgcacgaggttgaggtcatggtaatgatagcgcaccaaataacatttttctaataggtgaattcagggctttttatataatgttagaaaacgtacgaagtaggtgattttagggatttttatataatgttgaaaacttggaagtcagaatttaggacaaaacacaactatatatataatctatattacaatttaaaaacccttatacaaaaaaattctacaccaccatgaaatgcatttaaaaagaaaatgaaaatgaaaatccttgttatagtctaataatgaaaccatcaacccctactaccgatttattaagtgatttatttaacctttaattattttttatattttttatttgcagagtatatcatcccttaattaatgtaagttggaatgtacttttttcttcataattttatttttattttttaattttagaatagaaaataaagattgtgatatactttcttttcgtattttctaagaattttaattttttatttaattttaaataaaaaataatatatatgagtgatgataaaatttacaaaataataaaatacaatgtttttccatcaaaacaacttctcccatcgagataccaataatctaaccatggtggatgaagttatttactctagcccccaataatctaaccatggtggacgaagttgttaaatctagcccacttgattctttgaggaatactgcccaaagttttggggaaaccagaggctgtggccagcagttctcatagctttgtttggtttgaattggaattactactctgtccttagatttgtaagattgaccactgattcatgtaggtataatgggatattcacctacatagtttgtcctcagtctaaagtggtgtttgtttttttggctttttgctaaaaatcatttagttttagaatttagatggtttgtttttttactttttaatgacttattataaactttttactaaatagaaaaaatcaaaatatataattttttctaaatagaaaaaataacacaatgattttttttactttttaatacttaataaaaataaaatactaaaaaataaataatctaatatttaatacgattaaatattaagattctatttagaattaagtaaaaaaataaacaccacgttaaggcagcccattgtttggtttgtgaacccacttaacgcccaaagagtacggaggatgaaaccactgttttccaatggggcaatgtgtagggccggacttcaaccacgtgtccatttctttgtttagtcttcatcctaccacacagtctacatgaacatatttcactggaattttctttttcaaaaatcataaatttaaaaaatctcttttatgattatttgttcaattaaattgattgagagtttaattttgggcgttgtatctactttatcacctcttcatcccctatgtgaccaaatctgccatattttttcttaatgcgcttgagcttgggtctaatacaagactgacaagctttttaggaattgggtctaatattctaacagagaaactataaattaaattaaaatgtattttcaatttctagctaaatgatttgggttttacaaagaaccagtcacaatttacagcaattccaattttcccaaccctgagcaattggttgtaattcgggagtctccaagcaaaaattccatgaaattgcttcactgcagtttcttcatcttaattttccataactttcttggaatatgccctctctggatgcttcaagtgcaggctg

SEQ ID NO: 13099 - DNA, 2375 bp, Vitis vinifera
  Intron number 2 from transcript GSVIVT01021576001 (locus G SVIVG01021576001) derived from phytozome v7.0 (chr-ID chr1 0; pos 7357223 to 7359597)
tttgatcgagagatagttgtgagggaccgcagccggttccaccatttcaaagatggacattgttcttgcaaggattattggtaaatcatatgatgtctggcatccacggagtttttgtgtattccaaacagcatccattgggatgttgaagaattgaacttgagagttgatgacaatcatcaaagaccgctgttgaattctgtgtggcatcaatggctgattattggtggagaagaagcatcttatccatcatgttcttttgcatgtatcaattgtttctgtgctaaaagctcccttggttattctaaattccaaccacatcattgtgacctgtaacttcttaaatttgaaagtcaataataggccatgtctgattttttaaaaatttgagagaaaatgtgacggaaataaaatagaggaaaaatattgaaaaaaattaagaaaaataaaaaaaatagatttaaagttaataaatcatttttatatactgtttcaaacttattttattttttaaaatttttgtatataaagattaaataagttgaaaatgtataaatgtttaattgattttaattataggtatgtattgtatttcatttagggggtgtttggtacacgggaatagggagtgagaatagacatctcattccttttctcccttattcctatgtttggataaatgttaagaagacggaaatgaaataacaaattattccggcataaatcaaatccaacttatgagtcggatttgcattcattaaaagtaggtggtattctgattcattaaacctatttgataaaataaaataacctaaattactattttaccctcttatcttgttcttcaaacccgatgtttatcttctttgcaaaggtagagatccattcatcatccacttcttatcttctttgcaaagctagagacccactcatcatccaattctctgcaacaagtgattcttccaaattgaatcaattaaaccttccacgatatttaaaaaaaaaaaaaatcaatttataatttatagggttttggatgttcattttgattgttggatctaggattcgtcattgtttgctacaactaggttttgaaaactctcttctacattttcgatcaggtttaccttattttctctttcttcttctacttctttatatgtgtttcttcttctctataaatcgattaattttttttttattaatttatgtttggaatctttgatgtttctttatcttgtattaatggaaactggagagaaaaattgaaatggttgaaaaaagatttttcgatttcacgtgtttacaatattgaaaatttttaatggttaggaaaaaaactaaaaagaaaaaaacaaacaaaaacaaaacttttggtttttttttcccatttgtttattattatcggcgtcttcctttcctagttaaagctatggattctgccgtctcacagaaaatctgctacgtttccgaatttaaatattataataaataatttttttaaaaaaatataattttataactacttaagcatgacaaattattcaaatttttaataaaaataataattgaatatttgtgtattagggttatatgattttttatggttaattttttatttattgagtatatatatattttttagtcttattatttaataacaaaaaacctctcaaattttatttttttaaaataaaagtaaaaataaaaaaaatattttaaattatatgtaaggatattattgtaaatttatttctttttcatttccattcctattattatcaaacattggaatgaaaacaaataatcattccaatcttgcattcctaagttcatccaaatgttagaaatgaaatcatcaaattcattccattccactaagaaataggaaatgaaacaaaatattattttcattccctattccgacgtaccaaacacccccttaagaaaatggaaaataaaaatgtgaaagggaaattaaagtaaaaataaaaataaaagtatgtttggtagtaattttataaaacgtttttgatctatttaacaccttaataataaaatttttcaaatattaaaaatatttaaaacgctttttataagttacttttaaatgtttaatagtaacgaaggcaaaagcaaggaaataataataataagttaataacattaatagcgagtgtggcgggtgaagcggagtcagattggcgggttgaaattttgaaaaaggtcctaacccccaaagcccaaaatcaaaagtggcgccacttgtttctccatccctttaattctttacatttcagaacgtattcggatccttcatttttcttcttcctcctcaatctttcttcctctctctccaaatcgcttgcagcaaa

SEQ ID NO: 13100 - DNA, 7768 bp, Vitis vinifera
  Intron number 1 from transcript GSVIVT01021490001 (locus G SVIVG01021490001) derived from phytozome v7.0 (chr-ID chr1 0; pos 6067703 to 6075470)
tgttgttgcgaaaatatttcgcagccctcttgagtgtctgcgaaatctcgcagacaccattttcacctgcgaaatgtgcctgaagcttcccgatatttttgcaccgactcttttagatcttttcttcagatatttttgtataatttccattttctccttgtattcaaccactcatgtaattccttagctaggaagtatccaaggaagggtaaattaccttcctatataaactctcttgtaaacactctcagggaacgctgggggagatcatgtaatccaatatatagaatcaacgaacagagcacttgctctatttttgatatatattcttgtcttctctttcattttcattttctagccaaccaaactctgaggatttttccacagaggatgagaggctaagctttttgtctcttggagtgaggaaagccaggtaagtttccacatgcataatttggaagttttgttgttttagtttttaatgaagagaaagtgtaacccgttagtgatttctatgtttttagttaacttaaaacaccttagagtcacctgggccaacacttggtaaggcaagtgatttccaaccatagagatgcactagtttaccccttgcgagcctctgggaggtgacttgtaggtaggattttctggaattgccaacacttggtaagcttttggactccaaggagacatccattagttatctcttgcgagcttttgaagggaagtccaaggttaaagatcaccttgaatggcaagtgctaggtgagaggtatgagccattgcaaggtgcatcagtgagagggatttaatgtttgaacccattaatgggaagcatctgtacaacaccggttagagaattaactatatgttaattctctaatgcgaggaaaataaacaagtgaccggaactccctttttgcatgaggaatctgagcctagtgatctgaaactccaagaaacatcttttctttgtaagtaaaatcagttactatttttggttagtttaaaaccgaaccttgttcattcaaacatctttgtgttttcttttaaagctaaccttgaaatgaaaaggcaccaattcatctttgaattaatatcatttgtgaagtgaaaacccatcccagtgaacgatcctagagccactatgctatagtagctttgtctttgctaccctagtatatggtgtaataggttataaattttgttgattaatccctcaatcaaggagcaccagctgcacacgaatcagttgagacaccaattgggcacgaatcaaatggcgccgttgccggggatcgaacctcgaatcaaatggtgccattgccactgccattgctagggacgaatcaaatggcgccgttgccggggatcgaaccccgaatcaaatggtgccattgccactgccactgctagggacgaatcaaatggcgccgttgcaggggatggtgccactttacagtgataacacctttctagagtacttgtgatcttcatcacaagtttggtgacttttcttttccttttactaactctttttatttctttattgttcatgttttagtatatcttttatttagtttttagtttaccttaatcttctttctttgaattgtttttcttttgttttcttttgtgttctctgtttttaattcacaaattgctagttgtgcatgccatattgaataccatagcagaggaagccatgaacttcatgagttatgtggctgaagtttcaagagaatggggtgaaccaaatgctagagatatgggaagaatgacgtctcaacctaaagctaagggtgagatgtatattttgaatgatggtatgaacatgaaggcagagattgcagctatggaaaggagattggaagagctagaaatgaagcatatgcaaccagtgcaagccatttctcagacaccattgcaagctatgccttgtgccatttgtctatcttatgagcacttggtggatgagtgtcctaccattccagccgagagggaaatgttaggtgattgcaacacctacaatttcaattggagggaccatccaaatttctcttggaaaccacagccacctcagtatcagcaacctgctcaagcaccacagcaagcctcaaaccttgaacaaactatggtgaatctttgcaaggtcgtgggagattttattgaaaagcaagaagccaccaatgctcgagtcgatcaaagaattgatagagtggagagtactttgaataaaaggatggatgaaatgcaaaatgatctatctcagaagttagatattctccaagattcaatctcaaggcttgccaacctcaacacagtgcaagagaaagaaaactctccttctcaacctagtcaaaattctatgagtatccatgaaatggaggctaaggagggaaaaccttcacaaaagaaggaagtcaaagaagtgatcactctgaggagtgataaagaggttgatctgcccacatgcaagctagagcataaggtagagagtgaaacagagaaagaaaagagggaggaaatcaaaggaaagaaaaaggggaaaagtacagagaaagatgactatatagatgaagaaccacagaggatagtcatcaagaaagaattgatgaagaaacacatgcttccaccttttctccaagctttgtttggcaaaatcatacagagaaagccccaagtgagagatgcaagcttcatatgggatccgggcaagctaaatcaggatcaaattttttgatggacttagtctttttaaagactagctagtccatatctttttgttttgttaatttcttgttttaattttgatttcaatgctttaattttgatttcaatgctttaattctaatttgttttgatgtaatataggtttttggatgatcaaaatcaagaggaattgcaaagaaattgaagaaaaaaaatcggagcaaaatcggagtcaaacggagcgaaaacaggggaaaaacaggggtctgcgagatttcgcagcctctgcgaaatcggcattttgttgccaaaccatttcgcaacactatagaagtctctgcgaaaatttcgcagctgcgaaacccattttggcacacgagtgccacttcgcagcacaggagcatctgtttcgcagctgcgaaacgcattgcgaagtgaaaaaggctgatttcgcaacaaaagtcccattccgcaaaggatttcacggctgcgaaagcacttttggcacacgagtgccattccgcagcacagtgaccctcatttcgcagctgcgaaacggctgcgaagctccaaagcgtgaaaattctcaatttcgcagtcaaagctccattccgcagggtatttcgcaattgcgaagcaggttttggcacacgagtgccatttcgcagcacagtgaccctcatttcgcagctgcgaaacggctgcgaagtcccaaaatgtgaaaaaacccaatttcacagccgcacccccatttcggcaattgttggacacatctcgatcacttctcaaagttcaaattatacatgcaatatctcatttgaaagcttggtaagtcatgagtccacagcttcaaacggtgctagatttggatttgaaacggaaaagttatggccgtttgaagatgactgtgcaaaccatgagcggaaatgtcgcacctcaattttgctactgttggacacatttttgaagcacttcatggagctcaaattatgcatatgatatctcgtttcaaagcttgggaagtcaggagtccagcgcttcaaacagtatgtgatttggaggtgaaatgaagaagttatggtcatttgaagacaagcgcgcaaagctgagcgagaatttcgcaaccgagacgccatttggaagggtgtttcgcagctgcgaaaccactttttggcacacgagtgccatttgcagcacagttcccctcatttcgaagctgtgatacagctgcgaaatcatctttgagctgcgaaacctctttttggcacatgagaaccattttgcagccccgtacactcattttagagctgggaaatcacttttgagcatcgaaatggctgcgaaatgatctccaagctttgaaatggttgcgaaatcacctccaagctcagaaatggcctgcaaattgcgaaattgacttgtgaaatggagggaggtttgcaaaaacaccttgcaaagccaagggaagttgctaaaatgccaatagagccctgcaaccatgcatatgaagaggagagccccgagcaccctgggatcacacacaccaagcctctcactccatttttgacctccttaaaccatcaaatcccatagctaccaactgagagctccagttggggagactatgccacctaaggagactaccagaacagaggccaaagtcctgatccaacccactcaagaggccaccatagatacatcagctccacaggaccttaccactacttgatcatctctttatttttgtctttacatattatattagtatagataattccatgttttgatgtcttatattctgagattggatgtattactgatgatacatcatatatagacatcatttttgtttaaacttggcatttttctatttcctctactcactaactcttatgttttctttgaaacatgtggtttctcctatacgactcagactccatgtcactaaggaggtaccacttcctccctatttttcaatcgcttttgtcacattgaggacaatgttcagcttggttggggggagagttgaggaagtaagtattgttaataatgctaagttattttggtaatttagttgttttttgcttaatttttaaaatttttgctttaaactccatggatattaaggattaactctcaaaattaaatgagagaagtcgagtttcaacttgattacatgagtcttagagtttgtattatgctcttctaaaagttgatgaattgttgaaactctcattgcatgcaaacttatctcttccaccttaagctattcgcacacacatacattagattccggttataagatgtgaaactttctcaccctctaagcttgagaaatcataatttgacacctttaacctctctttaatagtgttgggacacctcataaagaccaatgagtctttgtaaaaaaaaaaaaaaaaaaaaaagaaaaagaaaaaaaaaatagaataaacttctttacttgccttgaaacctgagcatggtccgaaggggtggcgaaagcctttaaagcctggtgccctaagcctttattggttgggagtcaccgatcctctgcttgttacataggtgaattggttaagtttagtaagtgaaaagaattgtgaataagaggtgcgttcctagcctatcaagagatggttaattttgctaagcttaaagaaagccttaggttggggggagatgatagttatccatactatactcggaagctaatcacattaacacttagcttttagtggaagaatttgatttggatcttttgagagtggaaattcttttgatgcttaaacttgcataatatccattctttgtactctatgatcaagtgaatgctttgacaactcttattataggttgagtttcacatctttattgatccatggatgtccatcatgccactcatataattttttggagtgatttgcatgatcccttttatgtatattattatagtttacttagtttttatctccttcattgctaagggactagcaatatgtcggttggggggagtgattactactcaaaaagtgctattttgtagcttgtaattaatccttttaaacacttttaagtagtagttattgcctttcaactcaattaaaatgttaaggacccttgcaatcatttctaatcaaattgtgtaagttttggtgtttttgttagtaatttgatcaccaaaacaatccaagaatgagggagaattgtatatagttcatggaaaagcttttggaagctcaaattcatgaagaaaccaagctttggagccccatatccctttcccaaagtcgttcaaagtatgcaaggaaagagcactggagagaggaaaaacagagtgaagaaaacagaggaaagccagttgcagtcttcttttgcacttttggagcacttcccgaagtcaattttctacattctatataccatttcaaagctcgggaagtcaagaatccaatgcttcaaacggtgcgcgattcggagttgaaacgaaggagttacagccattgcaagcagatcactccaaagtgttgcgaaatcagccttttgttgcgagaatttcgcagcctttttgtatagtgctatggaattcctcctgaagctacccgatacatgccgcaagctggaacgctgagaacctcaaggtggaagccaatttcacagccctgtgagtttaacttgttgttgcgaaaatattttgcagccctcttgagtgtctgcgaaatctcgcagacaccattttcacctgcgaaatgtgcctgaagcttcccgatatttttgcaccgactcttttagatcttttcttcagatatttttgtataatttccattttctccttgtattcaaccactcatgtaattccttagctaggaagtatccaatgaagggtaaattaccttcctatataaactctcttgtaaacactcttaggggacgctgggggagatcatgtaatccaatatatagaatcaacgaacagagcacttgctctatttttgatatatattcttgtcttctctttcattttcattttctagccaaccaaactctgaggatttttccacagaggatgagaggctaagctttttgtctcttggagtgaggaaagccaggtaagtttccacatgcataatttggaagttttgttgttttagtttttaatgaagagaaagtgtaacccgttagtgatttctatgttattagttaacttaaaacaccttagagtcacctgggtcaacacttggtaaggcaagtgatttccaaccatagagatgcactagtttaccccttgcgagcctctgggaggtgacttgtaggtaggattttatggaattgccaacacttggtaagcttttggactccaaggagacatccattagttatctcttgcgagcttttgaagggaagtccaaggttaaagatcaccttgaatggcaagtgctaggtgagaggtatgagccattgcaaggtgcatcagtgagagggatttaatgtttgaacgcattaatgggaagcatctgtacaacaccggttagagaattaactatatgttaattctctaatgcgaggaaaataaacaagtgaccggaactccctttttgcatgaggaatctgagcctagtgatctgaaactccaagaaacatcttttctttgtaagtaaaatcagttactatttttggttagtttaaaaccgaaccttgttcattcaaacatctttgtgttttcttttaaagctaaccttgaaatgaaaaggcaccaattcatctttgaattaatatcatttgtgaaatgaaaacccatcccagtgaacgatcctagagccactatgctatagtagctttgtctttgctaccctagtatatggtgtaataggttataaattttgttgattaatccctcaatcaaggagcaccagctgcacacgaatcagctgagacaccaattgggcacgaatcaaatggcgccgttgtcggggatcgaacctcgaatcaaatggtgccattgccactgccactgctagggacgaatcacgtctggtggctggggagtttgctt

SEQ ID NO: 13101 - DNA, 9024 bp, Vitis vinifera
  Intron number 20 from transcript GSVIVT01037358001 (locus GSVIVG01037358001) derived from phytozome v7.0 (chr-ID chr 6; pos 15143401 to 15152424)
aaaaggtcaagtattactagttttgattttgtttagtcttgcctttggatgctaacattaaggaagaggttactaatacctattcatggggagccttcttgaagtggatggtaggttacaaacccaagaaattgattaaattggatttaatcaattttcatttcaatgtaatatcttagggtattgaagtgcagttggcacattttagtggaatgtcaagttaactttagaattggattatgaaggaaccaatatttttcctatgggtcctactggctttcgcttgagctcaaaatctttgttagcacaaagatttgagggaaattggagttttaatgatatgtatgcataagcgttttagtaaaagcataaggttgcattgaaacttatgattatttgttttaggttttattagattaggaaaactaattaattgaagcccattagggctaattaatttattagaaccctataagctagactaagtgacccaagcccaagtgggaccaaagtcacttaagcccatagaagagtctatataaaaccttaggaatcctagggttttagggttagatctaactttcaaatcggtggtcttttacagaaaaccctagccttcattgctctccctctataattgtgtagccactgtacacaagtgctaaggatcaaaggagcgattaggtggaaggatgcaaggtttttgagatccctgcatcaattggactaggatttgggaacattgaaatgcaaaggtacaattttagatactagatctaggttttattgccaaatatttttggttccattgttgatagatctagtggccctaggatcttagatgcaatcacctttgatcttgttcctaaagaaagagaatgtagtactagattatttcactgaagaagactacaatactaaattgtttcactgggtggctgataaaagttaatcaaaaggcaaagggtagacgatcaagacttaatctagattggagattgatggttattattattattatttaaattgtttcatagggtggctgataaaagttaattaaaaggtaggaagggtacacgatcaagacttaaatctcttgagaaatcagttattattattgttcttctaagattggagattgatggttattgttattattattattgattattattattattattattattattattattattattattattagggtatagggactattagattggagattgatggtttagagtggccttactttattattattattattattattacccttaacttttttagggtatagggattgttaaattgggagattgatggtgtggagtggccttccatttataagtctagtgcaaaatggcaacaaaaaccttttaaagaaaacgaaatcggggatgcctattagattggagattgatgatttggagtggtcttccatatgagtctagtgcaaaatggctagataaaccttttgaagaaaccaaaattggggatgcaattttccaaatggatagagataaggctttaggcctagatggtttcaagattgttggtccatcttaagagagtttttagtccatgttcttgaggaatttcataatatataatcaattggagtagtaatacaacattcactgtgcttgttccaaaaagggtttgtaatattccgatcaaagactttagatctaccagtctagtgtctagtcttttataaaattatagcaaagatttgttcttggtaccttaacaatgtaccgtatgagaatatctcattctcttaaggagtctttgtttagggaagacaaattcttgacgtcatgttagtggtaaatgaatagtagatgcaaagcagagattcaagttggtcctttaaagtagattgtgaaaatgcttatgactatgttgatcttggtttcttaggtcatatgtcctttgaagataaggttttgggtctagggagaaattagtttgttgattttgtagtactcatctgtaagatcctagattacttgggtggggggagttctcaacaattacaagtggtaagtccataatatgtagacacattttaaagcaatgagtgctagtgggcctattatagtgcatgatgtacattgtgggcccaaatcctaaaagcttaagctttgaggaaaattagttgttcaacatggtattagagcctcgtttggcgggaggtcactgttcaaacatcatcacatatttatttccaaaagaggctattttattttcttaatttattaagcccatgtgtaattccaaaggaggctacacatgaggaaaggtattagagtacatgatatacattgtgaggaactaaaatggttttggtttttgttgccgatttgcctcttcctctgtgattctctcctgatgagttagcaaaattcttatcataaaattcatggagaaaaagatgaagtgcaaagttgaaaggattattgtggagaaaaagcattttcaggtagagtttgaaggtttgaatggtggaacttgggtatcggtaacagagaggagccgaggtttcgtagtttcattaggatttgacatggaggagctggattggttgatggagcatttgaagaaagctgtggaggtggaggcttccaggggttttgtaagaaagatcaggggtaagactaagaccctcttgatggagatatgcttcaataacagagggaggttcatgaaaattatagaatttgttacaaaaaggaaacctttatttcttgtcgtccccgagggcgtcaaagggaaaggatgggaagatcttaggaaggcgatcctatcagtgcaagagtactctgaacgagacggaggagcttcgaaggagaagaatggtgatatccggatgaatagggacacttttagaggaggaaggtcatatgcagaagtggtggcagaggctggtttgaggactggaggtacgttgtcaaatggaaaatgggccagagttgtaatatgcgaaagccaagaaaaagtccaagactggactcacgaaggaagagccattgcgaggatgatggggatgaaaggaatggtgtccataaacctcattttcgctttcaaaggatgcttctttgtgagttcaacaaggagagcggaaagagttcatgatcagggaagactttcagtgaaaggaaggacgattctgctaaggaaatggtcgcccaaggaaaatatggtggttcaaggaaagttcaggagaggctggctagtattgaaaggtctccctttccatttgtgggatgaagttcagttgaatttcattttgaagaaatgggggagggtaacgaaggtggaaaaggaaactttgaagttggtggacttgacgagggcgaagctgtgggtggagatgcttccaaacgtcgtgttaccagcgttgcttgaggtggaagatgaggaatggtcctatacagtagcagtttcagtcaccggagaagacgaagatgtcgacgctgtcaagtctgagataaaccatagcaggaacgagtgggtgagagtgggtggttgcgtctctcagtcgtcaaaagctgcagaagggctacgaggtagcgttagggacattgagtgctagagaaagaggcgtcttccccgggcacgttatcggcaatcaaggacgtgtttggcggataaaggggagacaggagggagagggagcagatcgggccaaactgaagcagattttattgggcccgagcatgagtcctcttttaaagcccacaaggttagggcccaaagtgggatgaggcatcgtgggcttcatgatggcccagatgcccctcaagcccaccggtctgcatcggcttcgtccatttctccccagcgagctgcttcttctacaaaggcgatcgcgacgctctgtccagacggtgcaagggccggcgccgaggttttctttggtgaagaaggtcgggtcgttgagataaaggcccagttccttcccaaccctaggccattgtcagacaacaccgtgggctgtaagtttaaaggcccgtcggggttgggccaaaacttaggaggaacgaagccctctggtatggaagtctggtcgcgaagggaagaaattgaagcgaggaaggggaaagcccccgaggttcacatgagagatgctacgcaggaggaagagacggcaatttcaaagaagacgtggtctaccctcttccctccaagcgccgatcgacgacaggggcatcgatgctgcagtgagcctattttcacacggggctcgtcgtcgtcaagtgaagaccgcaacatggaagaggagtttgggatgggctttcagatggagcgaggaaacagagtgaatcctctctccagatgtcctctgtctggtattctttcgaaggaggacacctcagcgagccgtgttgaagtcaaaggagggctaacgggacgagtggggtttgatcctcgtggctattcagtcatgggttcaccttctaattcaataatcagaggtaaaggactcatctttgaggggttttgcgaaattccgggagccaaaaacttggaggtatgtcagccctcttcttctcagcctcccgagtcaccttcttttccttcctgtagtccggattctcctttgacgcatccctctggtccaattcttcccaattcagtccctcttcctcagtctcctacggaaaaccaaggcatctcaaaaaaattttatgaaaaaggtggtgttgactatttaaatcatggtgacatacctgaccatgttgaggaggagaaccagtatgctttatctaaccagatgtcagagagctgtaaccctaaggattctattgttaggtcgcataaggaggtttcgggtgatttccttattgatggtttgtcccccgggaaaatggccaaagtgcgagaggtattatgctctcttgacattaatgtgtattctaggaggaagagcagaggccccacagggcattgagacatgttggttctggctcggaaggttagggtctttgtgttttcccatgaaaattattagttggaacgttaggggtttgggttcaaggaataagcgtaggatggttaaagattttcttaggtcagagaatccggatgttgtgatgattcaggaaacaaaaaaggagaattgtgatagaaggtttgtgggtagtgtctggacggttagaaataaagactgggttgctcttccggcgtctggggaatcaggtgggattttgatcatctgggattcaaaaaatctgcgtagagaggaggtggtaataggatctttctcggtctcagttaagttctctttggacggttgtggacctctttggatttctgctgtttatggtccaaacagtccctcacttaggaaggatttttgggtggaactttttgacatttatggattaacctatccactatggtgtgtgggcggtgattttaatgtcataaggagaagttcagaaaaaatggggggttctagcctaactctaagcatgagggactttgatagttttattagagaatgtgaattacttgacccacctcttcggaatgcttcattcacttggtcaaatatgcaagagtctcccgtgtgtaagagattggaccgttttctctactcaaatgagtgggggctgctctttccccaaggccttcaagaagccttaatcagaaggacattggattactggccaattgttatggataccaacccgtttatgtgggggccaacaccttttaggtttgagaatatgtggttgcaacacactaatttcaaggagaactttagagattggtggagtgggtttcaaggaatcggatgggaaggtcataagttcatgaggaggcttcaatatgttaaagctaaattgaaggagtggaataagttttcctttggagagcttaaagaaaagaaaaaaagtattctcaatgatttagctaactttgacaccattgagcaggaagggggtctcaatcctgttttgttaagccaaagagcctcaagaaaaggggagctagaggaattaatattgagggaggaaattcattggagacaaaaagccaaagtgaaatgggtcaaggaaggggattgcaactctaagttttatcataaagtggctaatggcaggcgaaataggaaatatatcaaggagttggagaatgagaggggcttagtgctgaagaatgccgagagtatcacagaggagatcttacattactttgagaagctttacacaaatcctacaggagagtcttggggtgttgaaggattagattggtcccccatttcggaagagagcgtgttaaggttagactcccctttcaccgaagaagagagttctaaggccatttttcagttggatagggacaaggctccggggccagatgactttactattgccgtattccaagagtgttggaatgtgattaaggaggatttggtgagagtgtttgttgaatttcataggagcggaattatcaatcaaagtactaatgcctctttcattgttctaattcccaaaaagagtttgtcaaagagaatatcaaactttagaccctttagtttgatcactagtctctacaagataatagccaaagtgctctctaggcatttaagaggggttctacatgagaccatccactatactcaaggtgcttttgttcaagggagacaaatattggacgcggttcttatagcgaatgagatagtggactagagaagaaggtcaggggaggaaggcgtcgtattcaaaatagactttgaaaaggcatacgatcacgtgaagtgggattttttggatcatgtgttagaaaagaaggggttcagtcctagatggaggaaatggatgagtggatgtttatcttcagtatcttatgcaatcttggtgaatggtagtgctaaagggtgggttaaggcatcaaggggactaagacaaggcgaccctttatccccttttttgtttactttagtcgcagatgtactgagcaggatgcttatgagagctgaggaaagaaatatgatggagggtttcagggtgggtagaaatagaactagggtgtcccatttgcaatttgctgatgacaccatattcttttctaactcaagggaggaagagctgcagactctgaagagtcttttgttagtgtttgagcacatttctgggctcaaggtcaatcttaacaagagtagtatttatggcatcaatcttgatcaggctcatctttcaagattggctgagatgcttgattgtaaggcgtctggatgacctattctctatctgggtctccctttgggcgggaatcctaaggcgtgtggattttgggatcctgtggttgagagaatctcaagtagattagatgggtggcaaaaggcctacttatcctttggggggaggataactcttatccaatcttgtcttacccatttgccaagttacttcctatccttatttaaaattcccgcttcagtggctgcaaaaatagagaggatgcaaagggattttttatggtcaggggttggggaaggcaaaagggatcatttagtgaggtgggatgttgtgtgcaaaccaaagacaatagggggtttgggtttggggaatatttcttggaggaatctcgctcttctagggaaatggttatggaggtatcctagagagggatcagctatttggcatcaggtcattttaagcatttatggttcacattctaatggttgggatgctaacactttagtaagatggtcacatcgctgtccttggaaggctattgctcaagtctttcaggggttttctttgattactcggtatgtggtaggaaatggggaaagaattcggttctgggaagatttgtggtggggggaccaacctttgggaacccaatatccaagactatttagagtagtcgtggataaaaacatttctatttcttcagttctcggtccatctcggcctttcttgtggaatttgaatttccgccgtaacttgtcagattctgagatcgaggacttagaaggcctcatgcggtctcttgatgatttgtatctctctccttcggtcccagatgccaaattatggccattatcctcttcagggcttttttcagtcaaatccttttttctagcactatctcaatcttctggatctcctcagaactttccttcaaagttcgtgtggaattctcaagttcctttcaaattgaagtcctttgtctggttagtggcacacaagaaggtgaatactaatgatatgttacaagtgagaagaccctacaaagcccttagtcctgatatttgtatcctgtgcatgaagcacggggaatcagcagatcatctttttcttcattgcaccttgacgattgggttgtggcacaggttatttcagttagctaagatggattgggttcccccaaggagcatatatgacatgatgtccatcaaatttaaagacttcggtaattctaagagagggatagttttatggcaagttgcgagcatagctctaattcgggttgtgtggtgggaaagaaacgcaaggattttcgaggataaagcaaggaattcagggttcctttgggactctattgttttccttgcttccctttgggctttctgttccaaggcatttaaggggattccccttaatgtgattcaactggattggatagcggtgtgtactccttagggattggttcttagtgggaggtcgtttgttttatgtgtattttcctgtaatttagttgtctttggtaggaggatttctcatccttcttcttgtacttcttttttatattaatatatctttgtggcgtttccaatcaaaaaaaaaaaaatgatatacattgtgagccaaaatcctacaaacttaagcttgtaggaaatttggttattcaataaggcccaagagcacaatatccaaacaagatggtacatatcaaaaaataaaaaatatatccatacaagatggtggattgtgaaatagatttgttgttaaagtggtttttgagttaagctggaactctttgttagtt

SEQ ID NO: 13102 - DNA, 4177 bp, Vitis vinifera
  Intron number 2 from transcript GSVIVT01025945001 (locus G SVIVG01025945001) derived from phytozome v7.0 (chr-ID chr1 8; pos 26890886 to 26895062 reverse strand)
agtactcaaacaacaagtaataattttctccaccatttcttcaaccatctgctgaattttctatgttcatctttctccattttggtgcatcatacgggcaattaatggttttatattgatgagattaatatcatcagaagttgcagaaccctaatgttattaaagcaaagaaaaaaaaaaagaacagtggaaggaggagatgcaataaatttgaaaatctaactcactgcagattatgattttttatgaggggagtcagattccttttgctttatttaggaagggattacatgggtacctgctttgatatttatgataattttcttttatcaaaatttaaatgaaggaaaatgcagataatattctgacatttcatctggcatctgctgatgaatctgagaaaacaatttcttcttcatgatttttcactaattacatctttgactgatataaggaaaatatcagaaagaacactatacctatagttagaaacttcttcaaagattaactatcagagggttctttttattgtatgtttagtgcattaaaaaaaataaaaattataatgaaaaaataaaaataaaataggaaaaaaaatcgaaaaagttgaaatccaactatcagttacactggtagtgctgatatgcatgcaagggaagacaatctaggcaacaaccagttagggtttcttgtcctagctagttcttcccatctctccttactgttcctttccaataatatttaacattgtaatctgtgagaatctgtattccactgtccacagtacagtatttaagaaaagggttatggcccttttcctcttccactctttgttcaagtctcagtttctctgctcttctctttccatttccagctttgggaggcttggagcccatgtatcataaatccttcccttgtttttctccatctttttgttttgggtttcttcagcctaaaagctgtgaacctttcaatggagtcttttggtcctctcttctctttcccattctcatttaaagtgcagtaaagtgatcagctttcactgctctttgtttttttcacttggtgtgggcaatttgtggatatcaaatctcagaaatgggacggtgtacatcagcacccattacatctttgtgtgggtttgaataaatatttcatatcaatcatttcatgtttgctcaatgccatccaagattttttttcttcacttcatgtctcattttcctccttgatttctcccttgttcaaggaaaattgaaaatcttctcatagttgagatagtatttaaaataggacatcgatcttacatgagattttaccttttttttttcaaaattttaaattattttttatactttttaaaaatacttgtttttacccttaatcaattaacaaaaaaaatgaaaaatgaaaaaaagaccaatttgaattttttttttaatgttgagggtgcatgggggtgggggtgggggtggaggggagaagtcttccttattatttattaattttaatgcattatttttagtcaaatccaattatattgcataaaattaattaacatcatctttgatcatctttaaatcatatggattaaatcgtattgttgcttattttccttattcaaatagaataaaaattattttaagattctttattctttatatatgagagaaaaatagaagaaataaatttgataaaatatgtgaaaaaattattaagttcaagctttttttatttattttttacttttcatcatttttttttgtttcttttttttctctctcttaaattttcgaagatttaaatgcaacccctacactttacacctaagagagtttgaggaaaagtaggagaaaaagaaaacaaagaagaaaaatgaaagaaagaaaaagaaaaataaagaaatatgtttaaattcaataaattgttattacttatttttctaaaattatttttattcttttctctcatatacaaccaaacaaaatttcaaaaatgtaaaatttttgatatagttttcattagatttgatttttcatactttccataataatccaaacaagatcaattaataaactgaaacaaaacctacaatgacttcataataacggaagtttaaaggaactaaggatgaattgagatagattcgaggatggtgtcataatgataggagtccaaatttggaggtaagaataaacttaaataaactctaagacgatgctccaatgatgaatttcttttttaaaatatttgagtaggcatttgtcattaatttttctaactacaaatagattaccaataaaatgatcataatccctttcaaccgaacttgtcggttgttgtattgttttttatgatatttttatgtaacatgttaaattataaaataaataaataagttataagaagaaagaaaaaaccaattcaattccaataaaaacctttgaaattaataaatggtgggatatgtgatagaggtgcaaagtcttgggttcaattaccatcattaagaatccctggattattcggagttgattctaatgggtgtcgttggaatccctaaggtgtcgaagccatgggtggatttgaaaggccctatcacagtggggtttccggtttataaaaaacacacacacacacacacaattttcataatagaaggtagaaaaaagtgagaataaggtagagaagatgttttttcctagctataggtactctagggttttgtgataatagatttggatttttttccccaataattaaaattattaattcaattataataaatataaaaatcaatgagaaattccatggaaacccaaatcaaatgttgcaatatagatcaagattagcatttacttatatgcatgcatgttaattagtttgaccttaaagatcttgtagtactggttcccaatataaaaatgagagcctatttgggataactttttaacacctgcatctagtaattagagatgaaacatacattatttgtattatgtaatctattttatgaacaaaattttaaaaatgctttaataaatagtgaggatgactatgatatttcaaaaaaattttactaacaaaaatgtcgataaatcatttataagtgttatctaaatgcccttaaaatcacttatttaaataatagaaattaagctagattaataatgaatgaaaagaaaaaaaataaaatttgtacaaatcatccagtttagtactggttcgaacccccttcaagctcaaaaggtcaatcggattggactaggatctggtcaacagttcgattgattgatcaattcggtccgatctttaaaacattacaaataacttatcttatgtgagttttggtgcatctcatacatgcaaagcagttattgaaagccaatacatatttcatacaaagtccacacaaagaaactcaaataaaaaaataaaaaaatcagagaataaaatcctcatggtaaagttgcaccaataagacctatactgcatacagttgcagagtggcagtgctcttcattgttctttctcttgcttttcagtggtgtaatccatgagaatctgaaccatctggcagtgtctgaaaaagggaggtcatagcagtacaaccaaccactcatttttcatctttccttgtatcttcccttgtttgcaaaatctcagtttttctggttgtttctttccacttttggctttccgcaaactttgaatggagtcttgggtcttttctctttgcctctcaaagctgcaatcactgctcttttttagtgctggagaggagaaaccaggacaagacttttcaactgctattctccatacaaactcatgaaactgatgaacaattgagcagtagggtcactgtgtatactgtatagtgattttaatcatttttatgtctcataacttgtgggtgtttgtactgttacttcatctttctcatatcaagtcatagtcctttcacaaacttgtgctgtcatctcccatcatatatggtttcctcctttagggttttgctttccgccttcacttttgactacttttggagcaattttctctcttgaattctatggtatgtaatatttcaatccattttgcaacaatttttttaattcattctatttttatatattggaaaacagcataaaatcaaccatagataggtacaagaaggcca

SEQ ID NO: 13103 - DNA, 6625 bp, Vitis vinifera
  Intron number 3 from transcript GSVIVT01035977001 (locus G SVIVG01035977001) derived from phytozome v7.0 (chr-ID chr4 ; pos 6718239 to 6724863 reverse strand)
ctgtgagtaaacagtgaaatctttggcctttctaatttaaaatatgttgattgcatttgggtttatctgatgtatgcatgtcatagacaaattgagttgggttgtgaaaattagtatttatggtttgatatattgaatcgtcatccattttgtatctttatccatcttgggaggaatcaattatattgttgtgttgtggcacattattctgatgctagtttttccgttatgggcctcacagctctagtcagataaaaatgaaactaaactattttgagtgcctttgaagttgatcttttttcaataaacgaagcaatgttgctaataacggagagaactcagataagacaaaaaatttgaaatcattggaggagcctcttacgatgccacactttggccaatttggttcatctgttttaacagcatcatttgaaaactgtgctagctaattattttaatggttaataatatggctagtatggtatttctttagtttcatccaatggaaaatcatctatttgataaggcttccatagctataaaaaagtgtgatgtgtggttattaggggccttgttaccttgggcagattaatcaatcgaagaagccttgttgttaatgattcattgggcatcaaaccatatttttgctgatgaagttgaaagaactagattattggctgatttgttttgttgacctgctgttcagtatggttgtttcggtttctttacttcttgttttattgaattaatctgcttttttatgaagcttcttcttcaagtatttctgtttgtaatgttatttactgttttgtattaaatatttgctttcactatatgcacacacacaacatacaagatagtacacgaaggatgagttatcccttaaagagaggaacaactatacaataagggagaggcaaaaaagatagtcactgtcatccaatgttatcaaaggcaatcacctaggtcgcctaggccatcaggcagggtaccttttgaagacctaggcaaggcgacttgaaagaggcaacacctaagcaatcgccttaggtggttgcctttgaccctgaattaagattaaacatacttagattataatttcattcaatctaacattggattaaataaagtataagataaaatattatattatcaatcatagagataataagatggagggttatcaatctaatcttgatggaagtaatgacaattttaatttcaataatgactatgatgatgatgcctaaagcttctctagaatgttcaatttcttattttgttttctattttgctttttagatgtttgaaaaatcagaatatacatttagataggatgaatatctttaaacaatatgatgttttttataatatggggtataatatttaacactttcaataattattactattttgttaattttataagacatcgtgagtgatgaaaaattactagtgttgattgttgaagacaacacttatattggttgaatatcgaataggtaaatatatgtatatttttttatcgccttactattgttaggttatcaccttaatatcgccttttgcttttgacaacattgctgtcatcatggtattatttcttgtatggtaaggattatggtttttttcttgtttgtgtttttccttgcggttgctcttatctattgatgagaccccatccctacttccattctcatccaagttttttgttttctagctctcctccttgaatatttttttggtccattataacttgcaatgttgtgcaccaccattcattaatatggagcaagcctgttcttttagaagttattttaaacattttttgggggtattatatcagtaatttttttttttttttgaaattttcattttaacattttgtgaaatccttctaaaaactaacagtttttttttccttttctttttccttgtatttttcttgcctttttcttatgtcatggtatgtatttcaaagctgcatgcaaaccttgttctcatggacccttatgggttagtttcttatgtcatggtatgtatttcaatgctacatgcaaactttgtactcatggacccttctaggttagtttataggggcttgtcgttttttttcttgtttttatttatttaccacatttttctttttcttacattgtgaacaaggtcttctctcacttgttcttcttgtctcttctaataaatttgttttctaataaataaaaaaaaaattagttcaatatttaatcctgctataataacatttcaagatttagttcaataagtagggaactctatctaaaaagatcttaatacacatgaatttggcttgatcaatgaaatggtgtgactcaagggcaatgagtgtatttgaaatatgttggatgaggtcaattatgagaacacatttgggagatactatcacatgcattatgatgacacaattcacattatcactatgaccattgactagtctcctccaaccaaatgttgtaattgctcgacaaattcacaagggtcaacccttccaataaagcaaggatatctccttatctatatgtgtgtgtgtgtgtgtgtgtgtgtgtgtgtgtgtgtgttgtatgtatgtattgattgctttgactagccaaagagtgagatcttgcaaagttaaaaactttgtattttgggtaattggtgttaggattgtggagacatgcttaagatggaatgtacattctttcttcaaagagaatcatatctccttgagttaatttatatcatctgattgctagcatccaagataaatccttcagtaaagggagtgctgaaacaatcctctattatgtttgtataaatgaatataacattttggatagcattataaaattattaaattaggtcttgtaggaatctaagattcttatacatcataaatgggttgacaataaaagttgtgtctctccaagggccatttatagatattgaatttcatctatttagtggatgctatttaatatctaaaacatggtgcttgtttggatgtatttggtataatgggatttgaataacatattcacaatcattgactataattaccttatttataggagtgaattttaattaattactcttgtaatttccttcaatatatgcgcaaaaatccaatttttaatttttcttccaagttctttgattaagatatgattaatcaataaaagcatagaacatgcaaccccacaaaagggcataggatttttgttgaaagccacctacaaaatctcttagagacttactctgctagtacctacacctactctcacatccacgatgcaacatctccatattccttagaggactcttcaacaacttgaggggatgagattttgcaaccacgaactcaataaattgtgatttttctttgtgaaagtgtttgttaaagtacagagggtgataatataaagcttaggtgcaacaaaggcaaaatcgcgtgatatgaggtgtatatatattgaattaacctaatggacttgaaaatgatttaaaaatcttattttatcaaaaaatggtttaggaaactcaggaaatcttggaaactagtgattcttgatcaatccagtgttgaccacttgagcactatttaaggccaattaaagcactaggagggcttgggctgtcattgaggatgcttgcgtactcttatataaatttccatttttcaattttcacatacccaacttcctttttcctctgctataatattcaattaaagtttttttatagattaatctgatgttcgatttccatatgagtacattctatatcttttatgtcattatttccaataactcaaacctacttatctgtgtcatcctggattgatttcgttgcaatctcgagtcttcataagtagtgtagattacatgaaagcatgtggagtcctaaatgagaatgaacaggacaaaattcccaacataactaaataacctcacaaaagtatgaccaagtggtatctgcttcagctaagcctgttatgataccaatatttgaagttcagtattttgatttattgtgaaataactcaatctattgagagatgatttagtgatcttgctcaagaattggagatgactcgaacatctttggttctttgatgctatttattggtgtaaacatcacctagaggttagatcttatcaaggcatattttaaaattttcaaaatacttgtcaaaccaacatgttaccaaaaaaaaaaaaaaaaactatttaacaagttacaatttcaaatataaaaaaactgtattgaatataaaaataggcacgatagtgttttaatatgggtactaatattgggcaattagatcatgatcaaactctaagaaaattgactaattttattaaattttatttaattacattttatttttaatacaagtacataaggatacgaatttacttttgttatttttaggataacataattcttagaaattaacaatttcttgtgtcgacatcaatcaaaaggtcataattaatttttaaaaatttataattaattaaatttaacatgaagctacgaaataaaagaatttttaatgttaaagactaggttgaatacatattcttatcactctttaaacaatgttaaatgtgatgaaaatttattttattaaattttttggattatttaattgtatttattttttggtaccttctttataactttattttttattttttaagcttccttactatcatattatgtctatggtctaatactaatttgagataccaagactgatggtcctcaagatctcccgaattgatgaccgatactatgactttgaaccatgccctagacctcccttctcttgagcctaatttgttacttctttatagaaattctttaaagaggtggttaaaccctattcctcttgatttttcacatgcaacttgtatgaaagtaaagacaataagggcttgtttggtaactattttcgaaaacaattttgaaaaatagtttttgagaacaatttttgaaaagtgttctctaatttttatagaacaaaagtctgtttggaaacttaaaatgttttaacctgtttttaatatctttaaatatgttctaaaaataatttttatatctagtgttttatttttaattattctacattgttgtataattatttcttaaaataaccctcaaaaaacaagtgaaaacaatagaaaacaactaaaagatattatctgaaaaattgaaaatatcttgttctctattcttaagaacagaaaacaaaaaatagtttttggttgtcaaatgtgctttctgtgttttttgttctgggaaatagaaaactgttcttaaaaattgttccgaaatagaccctaaatgtctacatgagccttggctggacttgtgatcatatcctatgtcataggagggacacctttcttcttcctctatatcgatcaaactgaatatgttttgatttatttggttctattttatgattcatgatgaacatgtaaatcagttgtctttttgttcaagagaatatttttctgtgcagcttatttcaattgtctcttggagtgtttaagatttgtttttacatttttatcaggtttttttcttctttttatttatatttttttggaaggatatcttgtcatttattgtacttactaattcatttatacgaatttgttgttcctgatataaaaaaaaagggaaaaaagaaaaagaaaagttagaaaaccaacaaaggggattctttgggtgtctgtccaacaaaagcgttaaagctgatttactgtaataaaagcttctttatttgcttgccattatcatatcatatctcatgactttgaacttgaaggtagagatgtgactgcagtggaagtcaggttttacaaatggtcagtgcatccactggttttgcaaaaccaaatgaactgctgagctttctgttttgaactcatccttgggtcattacaaaaccaaagtctcctttcttattaactaaatgacacaactaaagtcttgtgcctatttaacttgtgtagatatttgatttctaatgtaggttctgtgtgtgatttgttgcttaaattttttttttcttttttctattaaaatatcacacttattttatttgtgattgcttaatagtgactgccaaaaaattataattccatcaaaatttatacattgtctgttgtggggaagtgtatttgatggattttgtttacaatttgtgctccagtctgaacgtcactgaactgtttgttgaaaatgtgaagtgtttacaaaatggaagagagatgaggattcagtttgtcaaatcatctctcttccattttgtatagtctgaaggaatttaagtgcatttcagagaaatgtaagatgggttatcaactcaactgcaattccatgtttttgtttcatgcttacaaatttggtatcttggcattgtctgccttttggtcatgatcctcacaaataaatgtttaattttcaacattttgatcttggcttattggaatttgcatgttaatttgtgcactaaattgaacttgttagtttatttatgcatatatatatatatatactgttatttaccatggttatttgttattttagc

SEQ ID NO: 13104 - DNA, 6095 bp, Vitis vinifera
  Intron number 4 from transcript GSVIVT01025710001 (locus G SVIVG01025710001) derived from phytozome v7.0 (chr-ID chr8 ; pos 12771619 to 12777713)
ctactcgggaaggggaagacgagctaaaacttggagtatgtatattttttgttgcacagatatctccatgtctcttcaatgttgctcttttgattaattaaaaaagtttcatcatgtaaaggggatctatatgaattcttttattctaactgatacaaatgcaatttattagaagactagatatgcttaaaatttgaattccttaaactaattaaaatgatatttgtcgatcaaagaatcccccaaggctgtagctcaatggaagtgacctatggcaataacctagaggcctcctcagtgttcacaagggtaaagttagaggggcagacccatatcactcagggtttgcttcactcatatctaggataaatgcctttctgtcattccccatcatagaaagagagggaaaaaaatctgtcaatcaaaaatagggagaaaattttctcatttgttaatttttgcaccaagcgttgattttcaaatggatgagagttttttctgtgtaacttaggggcatgttggacataatggtctgtagaaaattttctttattcaatttaatactgcattcattctgcaatttacaatggagtatttttctgtgtaacatagtgacatgttgggcataatgctctatagaaaattttcattattcaactttaaaccgcatttatgctgcatttatttcttaccattttagtttatttttatttttatgttattatcatttcttgtgttgcagatttttacatcacacttgattgttcagcaattctaactaggatgttaattgattatgctttcatttcattcacacccacacacacatacacgattgatctctaagcttatgttgctaagtgacttgttggatgtgatgctgtatataaaattttcattattcaatttagtactgcattttctgctttactgttttgtctgtttaagttttttttgtagtaattgtctcttaatggtctgcctatttttatattgtacttgatttttgactcacaagactaatctctaagcttatgaaacaaactccatggctataaggatggggcattatgtaagttacttgagttgtggaattcccatgggagttcttgaagggttttttcaatttgttgtttttcatataattatattattgcctataaaaaatgttattatattattattcatgttattgttactattatatgtccttcagtgtgttggggttggtttttgttttgatactaacccttttaagtggggtctgactcttttcaggtttgagaatatgtggctgctccaccctaattttaaggaaagttttaggctttggtggcaggagtgttaggttggtggttaggaaggtcatcgatttatgatgaaactaaagtttgttaaatctaaatttaaagactggaacaaagagttgttcaaagatttaaaagagaagaagaataatattcattcaaacattgtttggattgactcattggaacaagaaggaaatttgacttttgatctctcaacattgagagccttaaggaagtaagatctaaaggaagttttgttgaaggaagaggttcttgggaggcaaaaatcctgttaaatggataaaagaaggagattgcaatttaaagctctttcataaagtggccgatggaaggcaaaataggaaattcataaagtccttcatgtttgagatgggagtaactttgagcaacattgaaaatatttaagagatagtgaatttttttggaaagctctaccctaaacccttaggtgtttcttggaggatggaaggtttagagtggttccccatcactggagagagttctacttggctagaccatccatttattgaagaagaggtacgtcttgctgttttccaactaaataaggacaaggccctttgccttgatggttttactattgcagtgtataaagagcgttgggatgtgatgaaagaggcttttatgatggtggttttagagttccacggtaatggggtaataaattaaattacttatatgccactttcattgctcttatgccaaaaaaagtcaaaacactcaaaatctcagatttcaagcctattaacttggttacaagtttatataagattataactaaggtcttatcaaggtgcttacgtatagttctccatgaaactatccatatatctcatccttcgtttttcttcactttaattagtacatcttttgtttttgaactaaaaaaaaaaaaaaaactaaccatatatctttaggagcctttgttgagggaagacaaattgtagatattgttttgatagctaatgaagtgatggatgagaaaagaaggttagagaggaagtggtggtcttcaaaattgattttgaaaaagcctatgaccatgtggattgaagttttttgtatcatgtgctagaaaggaaaggtttcaacacaaaatggaggtcctagataaggggttacttttcttcaacaagttttgtagtcttggttaatagaaatgccgaaggttgtgttaaggccactagaggtttgagacaaggagaccctctttcacttttcctttttaccattgtagtggatgttctaagtaggatgatgatcagagtagagcaaagtggcctagttgagggtttcatagtccgtaggggtaggactaaagtatctttttttacaatttgcaaatgacaccattttttctccaaagccactttggaaattctacaaatccttaagttaatccttttggtttttaggtaggttttttttttttgataggtaaataaagcaaatatattaaaagtgcttgaaaagggcgtacaaagtacacacatagtatacaagtagcaaccgaatacaagcaaaagtaaagaaagacaacaaaccaatactcgaaacaaaagacttcaccctacaaccctaaaaaaccctagactttacaaacacttgggtgagtaacaaattgaaggaacctaatactacctcatccactcttcggaaagcggaacacctaaaccctaggccatccaacaacaaccccaaaaacacaacctacaaggtcacttgcaaaccaactcccacccattgcttcgttctctcttttttttgtttgacttgctataattgatcgagcattccaaattttgaagctccctaaccaagtggggtgtggaagggggcctcctctttgcaacttgagctctgtactgctttttggtttccatctttctgagtagggatgcaatttccttctcattcccatccattgacatacccataaacttgctaaatgagatgaatttctggtaagatagattagagaggctcttttcttctgaagccctctcctcaccacttgcctctagggtcgtaatcttggcaaccttgggattattctctaaggcttctacaaccaagcccttgtcagaaattatacataggggcctgtaaacattgcccttgtcctcagctaagaggcccacatcttgcttcctacatggaatcaaactatcgatcctccttgaagaaatatcctcatctagggacatggaagaagttgaagaagaggaccctccccccaaaggacaaactggaaacgaaagattattggagacactttccactggaaatcttgtcacttcctccatgagggcttcgtcagtaagcagcagatggcaagccgatgacagaggagttggggctgcccttttgccatcattgagaccaccttctgcaatgctgcaagctaagggatccctttccccctttaaaacgccctcgctgctcagaacctgttggcccaaacatacctggcccacttcttgcagcccattctctaaaaactcaaccactgggtcaccactccattgggcctccaagctgcaactgcccaaaggaagacgggcttcacccaaagtgacaaggcccaagttttctcttccactaaaagccttgagtggagcccagtcttcacttgggcccccctctctggcagacactgggattgggctggcatttaagtcaacccttggagaaagacccaaggccagatgggcctctaaaacactaggcccaaggacttctaaatctcccttaagtgagcagacttggcccaagtggtgtagctcacatccatccatgatatgggttcccttactcaaaaactctctcctccagtccccatcaccagtcctttcaccttcatcagtccccctgtcaccacccccttttctgacagcttaacagcagcttttgcaagtctacaatctgctccctcacctattgtattcctcatgccaccaggaaacaacacgccaccacctgcagcctgcaccacagttgactccacccccactgccttagcggcacgttaaacaactccatctcccctgacctgctgaattatgcatccatggttgctgcagtttggaataacaagttgtaaagaaaaactggaagagcccactaccacctatagtgagctaggcaaagcttgttcacccgaattcacctggatcctagcccactccaaccgtgccatgaaagcggtgtgttcatccacggccacaaaacctccacaacagtccccaatccttttgaacacctctcgactccagaggtgcagcgggagtcccacatccacacttcctttggtgccacacccttattaaaacaccctactttgggactctacctttccagatgcaagacaaactccttaagtctccttgagcctcttactagcaccctcagcttcagaactatccttaaaagtcaaacaaaaatagagcagcatcaagagctgagagcttcaatccccttttcagagaccaaagctgaatcgcccaccttctcactacattcaactatggcaacgagtcaaagcattcacaaaactcccaacctaacagctcctcagctggtccactctactttggatttccttcaaacctagttgcacccaggctgattctcctaccaggcccagattcttcttggatccacaaaggatcctttttctataaccaccaacgactcttgcaactcctcagctgaggaggcacctttcctagactcagccttaggagctaccccaaggaggtgaagcttctccgccaaaactgtccatcccttaagaaagcctttcccttctgggaagatcagagagaacctcttagcttccttggcaacaactgaacagaataagaatctccccactccatttgcacacagctccaaactaaacctcctcccaccatcctcccaacctttactccacctcaacactccttctctgcagcaggcttccaccccttctattcttaaccatttccgtggctgtgctgttccttgtttctttttccccatcctgtccatgtctctttagctggtggggcttgggttttgtcttgttttgtgggctggcataaaagttccattgtaaggggcatacgaagttgtggcagctggattcttcatgctttgctttggcgcatttggatagatcaaagttaaaactattttgatggttcagagcattctgaataggtataaaatatatgattcttaaatcttggtttgcttggtcgaggagtccaccagggggtgtgaatttatgttatttggatttcatcgatagttatggtaggtgttaagctgatcgatcttgtgcttgttatatttgtttccattgagtttagtgccttttgatgttagcaccctttttggcctggggttagccgccttttttgcttggtggcttttgtatgtatgcatgcatgtactattttgccttttgaaaagaaagttgtggagttgctttacataaaccaatctgctaaaatggacttgttaatctttgtttgggtatgttgagcataaatcatgttctgaacattcttttgctttctgcttaaattagagcttttccaaaatattttagacttgcacatctttattttgcctctgttgctcacttggtgtgcaatacctcaggctatactaaactttaggatgataatttacatgctcatattatttttagtatctgttattcatttataatgagattccgtttgtaggtttttg

SEQ ID NO: 13105 - DNA, 9343 bp, Vitis vinifera
  Intron number 1 from transcript GSVIVT01029137001 (locus G SVIVG01029137001) derived from phytozome v7.0 (chr-ID chr1 1; pos 19270433 to 19279775)
gtattcaatcagtgctttcaggtttataacaatttgtaatatgtacttacaatctatcaatttgatcattcatgtgataactgaaatttctatactaatttgtttatgctaaacctatatttatgtgaaaagatgaaaattcatcatatatgtatagctcagtgttagatatgaaaattatctttctaatgtatagtcttactgtcagccccttagcctcatgacccaatgttgaaggaaggggcctcatgggtaggccttgcacctatgggagcctagacaaagagcaatgatagcctggaggtttggtggtttaaaccccaggagttaaaatgaggaggtcatatgtgagctagacatgcaccacgaccgagctagacacacaccacccgtgtatcgtaggcgagccagacacgcactgcgtgcacaccaaacgagcaccccacgcgcgcctgtcatatgttgactgtggagttggtgcagatggaatgtgaggtttattttggaatataatttataattatttaaatattctattatgtcttctcaagcatgtatgatgtctcctccagacatcttgagaatgacccgtattgctctttaaagagaaggattgggtgactcaaggggacaccaagggaaggccttgaccaaaccaagggggcaccatggcatgaccttgggcgtgtctaggacacacgaacaacacccaagcacgtacacataggctccatgacatgtgtggtgtacacactgtggccgcaatggcacagggcctggtgtgacctaccttttccctatgctgacacgaaggcgcttaagctttatgtagcgagccaactagagaagccatgggcgcaatgccatggttcaatggggcactagacatgcagttgactcgagctcatgagaactaatgattactactcaaaaaccacacattttaaagaataattctcacgagttttacatcttttgagtagtaattatgcctaaaacactcaattaacatgtttttgcccttgtaagagttactaacaagttttatgaagttttggagtcatttcaaggtatgattttgataaattggtgacaaaagagatgaatcaaattgaagaaaacaaataaagttgatgataatccaaatgcacaatgaaagaagtaatgcaattggtttggaccgggatttggagttgatttgaaggtagttggagtggaatcaagagaaagaaatggaggaaatgacaaaaaggagttaaaaaaaactatgtttttcaatttcacgtgaacatgtgaaaaattcgcacaaacgtgcgaaatagactaggaggggattttgactgcagctcaaaggggagaagtgaaaactgatttcacatgaccatgtgaaaattttgcacagtcatgtgaaatgctttaggaagacgaaaatgatgttgatgaactttccacttcgcacaatcgtgcgaaattgttggagctcgtgcgaaattgtattttttctagatttcttagtgaaaaagcctctgaaagacctcttagatgatgccaagtgtctacttgaccttgacctataaatagaaacttgatttactcatttaaggactttttacatttttctaattgtagaactttccagattttctctctctatggaattctctactttccttcattttatctcattttctcattagtcaaacatgccttatgagatcaaatctccaagcatgagtggctaaatctcatttttctcggaagaggaaggatccagaggcaagatctatggtgaattagaaaaatgaacttgaattgcaaaggtaatttgatccaattgattgattaattaaaatttggggatttttctcttcaaattctcttggatgattactacaatgcaagctaggtagattcatcaaattcttaatgctagatttgatgagattgaatagttgcattgtgtgaatcattggaagataatttaagatggattgaatatatgatttgaattgatctcttggataagatgacctgatttgaagagaaattagatataaacttaaagctaaataaaaaatcggtttagatgaaaatttaggttttcaatctaacttgatgaaaattagatctcaacatctattcaccatagaaattgctttctagaaaatccttacttcgagaatttcattttctattaattttcttatattttacatttcattttcctctcaatttggaatcattgtcattttgaattgtaatcatgaattgtcaaatcattttcacttaatctcaatcatttcttctcatctcattcaagccttgattaccaagaataatccatatttgtggacgatacataaaacccactatactatagtagtttgtactaaaaccactttttgatcgggtacaaattgttatagaatagtgaattaggttataaattttgtttcgatccaataaacgacgaaaatccgagcgatcaactatgcatggcatatgggcgcaatgccttgtgcactaggaataaacagccatgagcacaatgccatggcttgttgctgtggagcttgacctgatagtgggagctagtcacatacctaagccatgggcaccttaacatggcttggactcatacatgagtgtggggaaggcacactaatgcactagacacctggtcagctagttggtgcatgctactggtttagatgacaacaaactagtggcaacaagtgagtgattaggacagcatttagctacaagggactggcagatggttctggtgttgatggctggtgcgaagagacaccttgagctgaagaagtgtctccagttgggaggttatgcaagcagttcctccaactgggtggttatgcaagcagttgtggcagttgtggtgattgtagcagttgcataaccaccagtaacctccctagttttgaaattcaaattgtaaactgcaagctgagtcttttaaaaagggcctcctgcatttcttagatagagcatgagagtatgagactgcctttgaatacttaagggttctaagcattgtactctgactcaagtcaaatgttgacactttgggaaaacaattttgtatcttgtagagttgaataatacaagttgggaagggtgttcttgtaatcatgtggttgcctattactttgtttttctaagggttgggaagaaaggttggctaaggaagggtccttagtaccacacactcgatgaaaaaaaaaattgggttgatattcaagggtgtgacaagtagtatcaaagcctgcaccaaagatgattggtggtagtgcaatggaagccttgtgggaaaggattgctcggatggaagaaatgttaggagaatggccatgtgagaatggcaccgtggcttcatgggaaaaacacattgtgggagaaattcaagtgcagaggagtttgctggagatctatgaaaaattctttgaggataaatttgttggcttgaaagtagaaattcagtccctgatagatgacttcaagggcttcctgcagtcttatggagaagaaattgcagtcctcaagaaggttgtgttgtaggaatgctcctcaggccttaaagcccctcccaaagtccgggtcccagagcctaagggctccaatggtaataggaatgtgaaggagtttgagaatttcttatgggacatggagcagttctttagggttgctcatgttcctgatggcgagaaagtgtccattaccagtatgtatttgactagtgatgccaaattgtggtggtgaacaagaatggaggatgatgcaaagtctagaaggccccaaatcatcacttgggaaactctgaaaaaggaattaaaaaatcaattcctccataccaacattgcttgggtggccagggaatcattgaaaatgcttagacacatcggattagtgacggactatgtcaaggaatttagttccttgatgttggacatgaagaacatgttaaagaaggacaagctttttaatttcatgtttggactgcaatagtgggctgagatggaacttaggagacaaggggtccgtgatctccctactaccatgactatagtagattgcttggtggattacaagatgggtggcgccatctccaccatgcagaaaacaaagtcagaagggagtaagaaggctaaggctaagggtaagacttctgagaaggcgggatggaagaaatagaacaagaagggtgctgcaggggtaaaactagtggagaataccacaaaatttgtgcaatagtccacccgaatggtagggtgcttcatttgcaatagcccacacctagccagagactgccctaaaagagaaaaactctcgacccttgtgaatgcagacgacaaggaagaatctgactcagagacccttcctgtagttaacccattgcaactcctaaatgtaattcatggtgagaccctagtccaaaagtccctaatgcatgttcatgtggttgtaaattgtgtgcaggtgaagactttggtggacagtggtgccactcataatttcgtggccaccaaagaggcaaacaagttgggattgaagttagaaaatgataccagtcggatcaaggcagccaatagtaaagcccagaagatctaaggggtagccaagaatgttctcatgcaagttggtgacgggaaaggcacgtgtagcctactttgtgtgcccttggatgacttcgatttgatccttggtgtatacttcctcttgaaggctaaggtggccttgatcctatatttgggtggattggtagtgttggaagaaagacaaccctgtttcgtgcaggccttgagggcaaaggatggtggtaagggtcaacataagatgttttccgctattcagttaaagaaggaattgaagcagggctaggatacttatgttgcagccttgatcgagattaaggaatgacagtttgtggaagtccctgatttagtggtcaaaattttgaaagagtttagagatgtgatgcctgcacaactccccaagaaattgccaccccgacgacctattgaccgtaagattgaattgttgcctagaacaaagcccccaactcaagccccttacaggatgtctcctgcagaattgttggagctacgcaaatagttgaggtaattattggatacaggcctgatccaaccctcaagggctccatatggtgcaccagtgttgttccaaaagaagcatgatgcctctctacgcatgtgtgtggattatagggctctcaacaaggtgaccataaagaacaaatacccaatccccttggtagcagaactgtttgacagattgttaaaggcctcttatttcaccaagttggacttgagatcaggctattggcaagtgcggattgtagcaggagatgaagggaagaccacttgtgtaactcggtatggttcatacgagtttctagtaatgccctttgggctaactaatgccccttctacttttttcaatttaatgaatgatgtcttgtttgattacttggatgcatttgtggtagtatatctagatgatattgtggtatacaaccaaactctaacagaacatgaaagacatttgagattggtgttccaacgactgagtgagcacagactttatgtaaagccagagaaatgtgagtttgcttagaaggatatcacatttcttggacacaagatcaatgtaggcctgatcaagatggatgaaggcaaggtgcaagttattaagaagtggccagtccctagcaaagttacggagttgcggtccttcctcggcttggccaactactacagaaagttcattaaggggtattaaaaaatggtgtctccccttactgacctattgaagaaggacaaccagtgagactggagcatgcagtgtcagatggcttttgaaggcttgaaggaagctatctccactaagcctgtgctgcatttgccagacttgaacttaccctttgaagtccagacggatgcctcagatagggctttgggtggggtcctagtgcaagaagggcaccttgtggcgtttgaaagtaggaaattgaataatgctaagcagaaatactccactcttgagaaagaaatgacagttgtggttcattgcttgcaacagtagagacattacttgttggggagtatattcatagtgattactgataatgtggccaacaccttcttcaaaactcaaaagaagttgagtctcagacagacctaatggtaggagttcatggtcgacttccagtttgaatggttgcatcgaccaggaagacataacataggggttgatgtcctgagtagaaaagaggtgattacctatatttcggccttctcataagtcatctctaactttaatgagagaatcaagcaggctgcagagcatgatgttgcatatggtaggctgaaacaaaaagttaaggggggtatgattaggaggtattggctagagggagacctccttatgaaaaaaggaaaaagatggtatgttcctacaagcggcttgagaagggaactgttgcgggagactcatgatgcaaagtgggcaagccattccggtgaaaagagaaccctagcattgctggccaaatcctattattggccaaagattggtgaggatgtgcaggcgtatgtgaaaatcctgtctgatttgtcagatggacaagaccgaaaggaaaaaggctgcagggttgcagcaacccctcccctttctagaaaaaccttgggagagcattccatggattttatcaccggatttccaaaggttcatgacttcaaatctatctttgttattgtagatagattttctaagtattctgtgtttatacctgctcctaatgcatgccctacggaggaagcgactaggctattcttcaaccatgttttaaaacactttgggttgcctcaagacagtgagtgattgggatgcacggttcacaagccgattttaggtggaattgttcaaactcttgggttcagggttgaagttttccacaaccaatcttccttaaattgatgggcagacaaagaggatcaatgccttactagaggaatacctcaagcactatgtgacagcacacacaaaagaacttggttgatttgctggacactgcccaattgtgttataatctgtagaggagctcagcaacagggatgagtccctttgaactggctatcggggtgcaaccaaggatgcctttggaagtggctaagcaaaagacatgaggaaatagtcctgcagcatataagatggctcgatccgaataggagatgtttgatgaggcccgagacaatctagagaaggcaaccagatggatgaagaagtatgcagaccgtgatcgacgacccttggaatttcaggttgggaacaaggtcctcctgaagttgactcctcatatatggaagaaaatcagtagcaacacaaggcaaaggggtctaattcccaagtatgatggattatttgaggcaataaaacgagtgggataggtggcctacatgttgaagctgcctaagagactcaagctttacccgactttccatgtcagttttctgaagccttaccatgaggatctggatgaaaagaaggtgtagacaaagcgggttcctccattggtcatgaagcaatttgaccaaaagatggagaagatcttggatcataggaccatgggacatagcaaaaagaaccgacgaactgatttcttggttaagtgaaaagggacttcggaagtagaaactacatgaaaaaatgatgttaccttgtggcagtttgaagtggcggtccgggcatactggcagactaagtcgacgagggcgtcaacttcagtaggcgggggtgggtttgtcaaccccttagcctcatgacccaatgttggaggaaaggacctcatgggtaggccttgcacctatgggagcctagatggagagcaaggatggcttgagggtttggtggttcaaaccctaagagttaaaatgaggaggtcatgtgtgagccaaacacgcaccatgggcgagctagacatgcaagcacgcacactgtgggcgagccagacacgcaccgcgggcgagctagacacgcaccacgaacaagctaaacaggcaccacatgcgcaccatggacgagccagataggcaccgcgtatgcaccgcatgcacaccagatgggcatcgcttgcgcacgaggcatatgttgactatggagttagtgtagatgaatggtgaggtttattttggaatataatttataattatttaaatattccattatgtctcctcaagcatgtatgatgtctcctctaaacatcttgagaatggcttatattgctctttaagaagggggaggggagggagggtaggtgattcaagggggcaccatggcatgacactcaagcacgcacatgtgggctccacgacatgtgtggtgtgtaccctatggccagaacgacacggggcctggtatggcctacctcctccccacgttggcacgagaatgcttaagccttgtgcagcgagccagctggagaagccatgggcgtaatgtcgtggttcaatggggcattagacacatagctaactcgagctcatgaggactatgcatagcacaagggcacaatgccttgtgcaccaagaatgaacaaccatgggcgcaatgccatggctcgttgctgtgaagcttgacctgacagtgggagctaggcacatgcccaggccatgggcaccttgacatggcatgggctcacatatcagtgtagggaaggcacactaatgcaccaaacacctggtcaactgattagtgcatgctgctggtttagatggcagctagctagtggcagtaagtgagtgatcaggacaacattcaactacaagggactggcagatggttgtggtgctgatggctggtatgaagagacaccttggactgaaagagtgtctccagctctaagcattgtactctgactcaagctgagacactttgggaaaacaattttgtatcttgtagagttgaataatacaagttaggaagggtgttttccgtagttgtgtggttgtctgttactttgtttttctaagggctgggaagaaaggttggctaaggaagggttcttagcaccgcacactcaatgaaaaaaaaaaggttgatattcaagggtgtgacacctaccatgtctacatgaaaaatcttaacacagaaacatatattggcagttcccactcgttggttataagcatttatttcttactaaatttgttatgaataagtaatgataactaacttactctgttctctaaagaaaggttaatcaacactttaattaattgggttcctctgataacatttgtcaagc

SEQ ID NO: 13106 - DNA, 4614 bp, Vitis vinifera
  Intron number 1 from transcript GSVIVT01038512001 (locus G SVIVG01038512001) derived from phytozome v7.0 (chr-ID chr3 ; pos 10807660 to 10812273)
tgacgcgttgttggaggaggccgctcgctttacaggtcagattccctcagtcctttctctcgggggggtcgggtttttctcttctactccttctttgccctccgacggaaaaggcttgggtccattggtctgttgggaggactcgagaagcttttcgatggatggggatgccgtggagccagggcctttgcgtattgtccaattagatggctcaaagttacagtggtcttcccatctagggcgactcgaagacaaagaaaacaaggaaggtgcaaccgaagccactttcttagacgaaacttttggaagattgctttcatttagtagattcgtggggttgccggtggatggcttcgaaaatgaaatcttgactatgtttcgaagtttagagtgtagaaaaaggggcaaaatttatgtgcaaggaggaaaaaagaattctttactcagatccatcgagagagagctacgaaagttagagtgttccattaagtatgggttcccctcagattcaggaaaaatgagcgggaaattcgttggggaatgttcaagaagtgttgatgttaattagaattctctcttggaatgttaggggaataaatgatgaggataaaagaagggtagtgaaggccttcttacggattcaaagggcagacctagtttgtttgcaggaaacaaaatgcaaactcatgtcagattcggtagtgagaagtttgggttttggtagattcgtaaattggggaagtgtgcactctagagggcaagcagggggcatcttagttttctaggattgcagagtgttggagcttcttgagatggaaacaaggcagtattccatatcatgtcggttcaaaaattgtgatgacaatttcatttggatttttaccggtgtttatgggccagtccattattctgagagagaattcctttggtttgaacttggggatattaggggtttgtggaatgatccttggtgtgttggtggtgatttcaatgtgattaggcttcccagtgaaaggagaaattgcctgaatatgtcttcggtaatgaggcgtttttcaaaggtaattgatgagttgcagttgagggatctacccttggttgggggttcttacacttggtgtgggggtttaaataacagatcagcttctaggctcaatcgttttttggtctcagaggaatgggagagccacttttccaacctttctcaaagcttgttgcctaaacccatttctgaccatgctctcattttgttggatggaggaggaattagaggcagaaaaaccccttttcacttcgaaaatatgtggttaaaagtggagagcttcaaagacttggtcaggaagtggtggtcttgctacaatttcagcggatcctacagtcacattcttgcttgcaagctaaaggctctaaagcaggatctaaaagtgtggaatagagaggtatttggtaatgtctctttgaataaaaacgttgctcttagtcagattggtttttgggacgccaaggaaagagattgtggtctctctttagaggatagtgaggttagaagaagggtagtggaagaggtcagcaagtgggcaggcttggaagagatatcttggaggcaaaagtcaagagaattgtggttgaaagaaggtgataaaaattcaaagttttttcacaagatggctaatgcccaaagaagaaagaattttctttcttctattacagtggatggtaggaagttaactgaggaaactgagataaaggagggggtggttaatgcattccagaatattttgttagaaaaaggggaatggagaccaagtatttcggggttgtctttcttttccttggatagtgtccaggcgaggcttcttgaggatgtcttttcgatggaagaggtccaggatgtagtctttggtttgaatggggataaagcccctggaccggatgggtttactctggctttttggcaattttgctgggatatagtcaagcatgaagttatgggcttttttgctgaatttcacagttctagccgttttgagagaagcttaaattccacttttattgttctcattcctaagaaagggggtacagatgatttgaaggattttcgtcctataagcctagtgggaagtctttacaagattttagttaaagttctagctaatagattgaaaagagtggtgggaaatgtcatttcaaactcccaatatgcctttgtggaaggtagacaaattttgaatgctgtccttatagcaaatgaggccttagatttaagactaaaaagtgcaaagggtggaattatatgcaaggtggatattgaaaaagtgtacgatcatgtgaatttgggctttttattagcaatcttggataagatggggtttgagactaatgggtgaattggatgaggtggtgtatttcttcaatccgtttctcagttttgctcaatggttctccagtaggctttttccaaagttctagaggcctaagacagggagatcctctttctcctttccttttcattatagcaatggaggcgttgtcttctatattgaagagggctctacaaggaggctatcttgagggtttcatggctggtgggagaggaggtgagggtgtggttgtttctcatcttttatttgttgatgacacactagtcttttgtgatgcaagcaaggagcatgtggaggtcttaagttgggtttttatgtggttcgaagcgatttctgggctaaaaatcaatcttcacaaaagcaagctgattccagtgggggtggttcctaattttgaggacttggctagggttttgggttgtaaagtgggttctcttccctcttgttatttagggctgcctttgggagctgctttcaaatcatcccgggtttgggatgtagtggaggagagatttcaaaagcggatcgctttgtggaagagatagtatttgtccaaaggaggaaggttgactttggtaaagagcactctctctagccttctaatttactttatgtccttatttatcattccccgcaaggtgagcctaaggctggaaaagattcaaagagacttcctttgggggggaggtgtttctcaaagtaagccgcatttggtaaattggtccattgtttgcatggagaaaaggatgggggcttagatatcaaaaatctttctaggttgagtaaggcccttcttggaaaatggtgttggagatttgcttcggaacaagattctttatggaaacaagtgattgtaaggaaatttggggaggaagatggaggttggtgctctggcgattcaagggagtcatggagtggggctttggaagacgattaggaaagggtggttggagttcaacaaaagggtggcttttaaggtgggggatggtagaagagtgcgtttttggaaggatagatggtgtggagaagattctttggatgtggcttttccaaggttgtacaatcttgccttctccaaggatgtttgggtagctcagttatgggatcagtccaggaatttgggttgttggaaccctgttttcacaagactcaacaatgattgggagatggaagaggtggaaacttttttcagaaggttacatggccatgcgcttagaagagggattgaggatgtcatgtattggagggtttcaaagaaagatatctttacggttaaatctttcttctcttccctagctccttgcattggtagagagttcccttcaagcttagtttggaatccttaggttccaaagagagtcagtttttttgcttgggaggctatttggggaagaattctaactatggatcaattaaaaaggaggggttgggccttaccaagtaggtgttatttgtgtaaagcggatgaagaatcaactaatcatgtgtttattcattgtcccaaggcaactatgatttggcaccttatttttgctctttttggtgttcattgggttttgcccaattctatcaaggaaaccattcttggttggaacggcacctttgttggaaagaaaagaaaaaaggcgtggaatgcaacccctctatgcttattttggacgttatggaatgaaagaaatagaagaatatttgaagattctgaatcagcggatcaagctattttacggtcttttttgtacatgttctcagattgggttaaggtgcatgtaaattggccttcatggtccattttcgatttcattgattggttgggttgtaagtaagggtttttttgttttttctctccctttggcctagttgccttgtgtacttcgtgtatactgtcaggtgtacttcagactttctttatacaattgcttttacttataaaaaaaaaaaaaaaaatttagaattcttaatgttgtttttatttagaattcttaaagttcaaagaaaggaactttgaactttagtcagtaagagtttgatgcatatattggcttatgatgaatggcaatatcggaattgggttattattctgggtgcatgctttaaaattttatccatgaatgaccaaatacggtttttcattcaaatattcttcaaaatttaggatgagtagttatatttctttatatgccttcatatttccttatgttgcttcaattataggtttcagaggatattggctgat

SEQ ID NO: 13107 - DNA, 38017 bp, Vitis vinifera
  Intron number 9 from transcript GSVIVT01032250001 (locus G SVIVG01032250001) derived from phytozome v7.0 (chr-ID chr1 1; pos 13884585 to 13922601)
gtgtaaagctagttattttcaactttggtggccaggtaagatttatacgataaatttgtcttgttaaaataatgagtttgggccaactttacttccaaaataattcagttaaacctgattcttatcatagaacatccaacatttaatggaattcagttaaacctattcttattgttggaaaatctgccaatttgaaattctgctaatgtgggtggcagactattgaatatttttccagcccatctgagctgtaacaattgtatagttttacatagaatcttctaggattttttcgtttcttagcattcttcacttattttatagcataatcataggcattatttcttagggtatttttatacaattattctcagtgtcctttgccttcattgccatgaatttttttccagaacatatctcatcaattagttttttttaccttctgttagaaactgtcacttcagattaggccttcaatgtacctattttttttatgagctccatatcccttcttcacctcataatgtcaaaaaattcaaaggttgattcttcaatattgagccaagccacaattcaacaatcaacaccactcactgaattctaaaatatagtaggatcctttaaacttaatgggggaaattatttagagtgttcacaattgataaagacttatattaagggaaaagagaagttaagccatctcattggacctgtggtgggcaaagatgatccatggtttgtcatgtgggatgaagaagactctcaaatcatgtcatggctttggaactctatgcaaccagagataagccgcacatgcatgttgctctcaagagccaaggaaatttgggagtctgtgtatcatacctattctaaggtaagggatgcaacccaaatgtttgaactaagacaaggattcacagcaccaaacaaagtattctttccataactgagtactgcaatgttattagaagtctttggcttggacttgatcaatatcagaatttaagaatgcagtgcagcatagctgcaacaatacatcaagagttcattgaacgagagagggtgtatgatttcttaataggtttgaatgtggaattggatcaagtaagggtccaaattcttgggaaagagccactaccatctctaaatgaagcctttgcaatcgtttgagaagaaagaaggaaaatataatgttagaaaagggaagtaccatgtgtagatttgctttagccatctcaaaactaggtgaaaatgaagggagtgttacggttaatgttgcaaactctggtagaaatgaaggtaagaaaacaagtgagaaagagtctttatggtgcagctactgcaagaaaataggcacgcaagggagacatgttggaagctctatagtaagcccttaaatttctttaaggggaatgggggtaaaggggttaattctggctataaattacaagtcaatcttactgaaaatggagaaaaacagcataaagaaagctttggccaagaaatggagctcaacaaggaggaaattaacaaacttaaacaatttatttccaagataggaaaacctgagggacatagtcattttgctcaaacaggtaagtattccttctccttaagtgcctctgaaattcagttttctagcccttaaatcattgattaagggctttcagaccatatgaccaattcttgaaaagtcttttctagatacattccatgtttggtaaatcaaaagattaaaattgttgatggtaccttagtaacttcttaacatcttctttaacattagaaaatgccttacatgttccaaaattatcagtaaatttgttgtctattcctcaaattactaaggacctaaattgctcagtcaactttacacaatctgaattttcttgtcaagacctttttatagggaaagtgattgggcatgctagagaagaagggggattatttctccttgaagctgaaagtggcactacatgtcttactccttatacctatttatcagaacatcatactccagccaaggaacaagtttggttatcccattttcatcttggtcatccacctttttattgttgaaaaaaatattttctaatatgtttgaaaaactaaatgttcaaaacttccattgtgatgtttgtgagtatgctaaacatcaccgtgtatctttttctttaagtaataagagaagttttattccttttagtttgatccatatggatgtttggagaactactaaagttcatagcatttctagggtaggctgtttgttttctttgttgatgattgcactcagtttacttgggtatatctcatgaaacaaaaatctaaggttagcacaatcttccccatttttcataacatgctaaaaattcaatttgatgccaaggtcctaggaataaggtcaaacaatggaagagagtactttaatcaatactttacaccttatctccaaatgaaaggaatcattcattattcctttgaatgataatccccaacaaaatgggatagtcgagcataaaaatcggtatctattagagatcattagagcgtctttcaataagtgcctcttggatagtttttggtgtctttatagaatttagttttcaaacaaaggttggtaagaaggtgatagtttttcaagggaaacaactcaaagggtgttgagtacattgtcttttttctttcctaaggccaataggcaaatcaagatcattaaggctaaggaaatcattgcccctttttttgtgcattaagatcaatataattagtaccttttttctagttgaatgactgggacatgtggagtttctggggctagttgcttcctccttgaatagaccttgagtggcacttgaagatcctcctatgaactttgcatataggattcaaatctgggcaacttggggactagtggcaaaggggtaaactcaaactcatggaattgattaccatgaatccattgcacctatggaaaagataaatactattcggattctattatccttagctactaatcttgattggctattgcaacaactagatatcaagaatgcctttctacatggagacttaaaagaggaagcccatatggaagtgtcactggggttggaagaaaaatttgaaaaaggcaaagtatgcaggctcaagaatgctctttatagacttaaacaatcacctagagcctggtttggaaaatttacaaaggtaatgaaaagtataagatactaccaaagtcaaggggatcatactgtattcttcaaacaaacaaaaatgaacaaggtaacaaccctctattgtatatgttgatgacatagtcttgacaagaaatgatcctgcaaaaatggaaaagttgaaaaggcaactagctatggaatttgaaatcaaagacctagggaaactcaaatgcttcctagggattgaagttgtacactctaatgaaggaattacaatctcacaatagaagtacattctagatctactaaaggagacatgaatgggtggttgcaaaccaatagaacaatctcataagctaaatgaaggaaaaggaagcactccggtgaataaagaaagatatcaatgcttagtggggaaattgatatacttaggtcacacaaagcttgacatagcccatgtagtgggtgtggtaagtcaatttatgcatgatcctggagaagtgcacatggaagtagtatttagagtgctaaagtacctaaagtcttgacctggacaaggcattcattttaaaaagggagggagtttaatcttagaagcataaatggatgccagttggactaggttgataatagattgaagatcaacattagggtattatacgttttaggacgaaacttagtaacctagagaagaaagaagcaatcgatgggagcaaggtctagtgtagaagtgaaattcaaggctatggcacatggagtctgtgagcttctttggatcaagataatactaagtgaccttggaatcaaatgggaagaaccaatgaaactctactatgacagcaagttagccatcaacattgcaaacaatccaatgcaacatgatcgaactaagcacaaggaagtggacaacttgaaaatgggttgatttgtactccttatattcctgcagagggtcagttggttgatattctaacaaaagggcttcctacttagctgtttcaaactgtcttaagcaaactggaaatgagaaatatttattcattagcttgatggggagtgttagaaaatctgctagttgaaaattttgccaacttgggtggttgattattgaatattggaaattctctcttttggaaagagaaaaatagaagatcttttaagaatgtgtaactttctatccaaaggctgaaattcttgtttttgtgtaacttgttaacttggatcaaactgtttataggtgaaagattaatgttcatagttgatttcattaattggttggggtcggtttaagggaaggagtaattttttgttttcttttcctttttttggcgctttttagcaattgttgtatacatcatgtgtaattttattttattttttaattagaaacaaacatatgtaataaataagaaaaaataaaacatgagaaggatgagaaattctactcatgaagtatagacctaataaaaaagagttaagtaaacctcctctatataagaagctatagaaaacctacaaaagcctattaggtgtgacaactcctggccctagaaaccctaccttaaggggtgcaaatcgacaaccaactaagttgaattacactcaaaggataaggtttaaaaatgtctatacaataagtccaaaaagaaacaaagaaatgaaacgcatcccacatcatctctggcgtcttccaagtgtcctcaaagatcctagcgttcttctctctccacataatccacaacaaagagagacattcgatccttcaaatagtcttccctctaatagtgtttccaaaaaacttgaaagaaatcaccatcatattacgaataatgtctagttgaacccacgccatccccgcctatgagaaaatcctatgccacaatccctaagtaatcgaacaatgtaagaagagatgatcaaccatctcactactactcctacaaagaatgcaccaatcagggctaagggctttgaaaggtcttctcaactgtagcatgccattggtatttatcttcttatgtgccactaaccaggcaaaaaccatgaccttagagggtactcttgatttccacaaaaaatgagctaggtagaaaggagtagaatctaagaaattgaataagactaaaagaaaatattttactgagaaacctcttgaagagaacagaacccaagcttttgcatctaaaagagaaggagtcaaatgaacatgggaaagtaaagacattagtttttcaggatcctcaatctccacatctgttagattgcggcgaaagataagatcccaagacgtagaagtatcattactcaatatggctgaaatggaaaggtttttagctgtggtgactctaaaaagtcttggaaattgaaagcattatggttggtccccccaccacaaatcttcccaaaaaagaattttggtcctatcacccactgcaaagcgggtgtgtatagaaaaaatttggagaatatgtgcaatgaccttttaggggtaacaatgtgatcatctgactatattgttggcatccatccattggagtgtgtcccatagatattcaagataacttgatgccaaagggcaaaactttcctgaaggtacatcgtgtatactttggtgtgtcctttttagtgctttttaatactattaaaaaaaaaaattccaacctattgagttaaaaaatataattttttattcaacctattttccattgcatcaaactctgatttatagagttacaacacatgtaggatagaagccagagataacctcttggcttatttgaaatctatgaacaaaaaaataaattaaaaaataaacaacctgatcagataagatagttgcctaacaaacaaatctgatatgatattttattaagttacacaaatttaaactaactagagagacgtaacctttcaacaatcccccttaagttggtgaatagatatctatcattcccatcttgtctaccaaatcttcaaaactttgtctggacaatcctttggtgagtatatctcctatttgttgcgtggttggtacataagtcatgcagatcaatccattttcaatcttttccttgatgaaatgcttatccacctctacatgctttgtgcggtcatggtgaactgggttgtaggcaatgctaatcccaactttgttattacaaaaaagctttataggtttctcacttggtatcttaagttcttccaatagtctttgaaggcggatcaactcacatgttccttgtgttagtgctctatattcagcttttgtactactccgggccataacattctgcttcttgctcctccatgtgatagttccccatacaaaagtgcagtatcctattgttgactttctatcatcaatagaacctgcccagtctacatcaacataagcctccacatctcttttctcatttttgccaatgaatattccttttctaggtgtagtctttaggtatctcaatattttatacacaacatttagatgttcttgaaacaagtcatgcatatactgactaactaaacttactgcaaaagctatgtcaagtcttgtgtgagcaagatatattagttttccaaccaatctctggtatctttccctatctattggattacttgtcttcattcttagcttgtcattccattctataggtgtcttagatggtttgcaaccaagcatgcatgtttccttcaataagtcaactatgcatttcttctgggatatagaaatccctttttttgttctagccacttccatgcctaaaaagtaccgtagttgacctagatccttgatcgcaaaatcttgtgctaaaaatccttttagtcgcactagttcctccaagtcatctcttgaaagtataatatcatctacatacactattagaatagccactttcctattttgagagtgcttgaagaataatgtatgatctgtctggccctgattgtacccatattttttttatagactttgtgaagcgatcaaagcaagcacttggtgactgcttcagttcataaagagatttcttcaacctacacacttttctacctttataacccccatcaaatcccgagggcaagtccatatacacttcctcatcaagttcccaattaaggaaagcatttttcacgtccatctaacgaagtggccaatcaaggtttgcagctagtgataacagtactctaatggtattgagcttagcaactagagcaaaggtctcattgtaatccacaccaaaggtttgggtaaaacctttggcctatctttctatgttgccatctgatttatacttgatggtgaacgctcatttgcaacccactggatatttcccttttggtagctccacaatatcccaagtatcattcttttttaaggcttgcatctcttccataactacaactttccacttgggaatttttagagcttcatgaatgcttgtaggaacttctgcagctgtaattttttcacttagagcctgatatgatgaagatatgttgttgtaggacagatatttggatattggttacttcgtacatgatctaatacccttcctgattgcaattagcatgtccaagtccaagtcattttgtcgttgcaacatatcttcttgttgactgcccgggaaacctgagactccttcacacttgggatttgtttccggttcagtttgttggcagtgctcttggagtgtgacaacaggtacttcctgaggagcctgatgctttgcctttcgtgaataaacatggagctcaggttggtgattaagcatgggcagatcttctcctgttcctagctttgtttctgtattttccataattgttagtggcataattgactcagctggaggtttggatagatttggtgacccgattgagattggaagaggaatagttgagaaatcccaaagacaatcttcactcaatttctccccctgaagagaaggattttgatagtatggctggtcctcaaagaaagtagcatccatggtgacaaacagttttgtagttttaggatagtaacacttgtatcctttttggcatggtgaatatccaaggaaaaggcattttgtggcccggggatcaagcttggtattagtggaggcatgagcaaagacaatgcaaccaaaggtttttatgagaagattttagattaatcatgtgtgaggataggtttggagtaagatttgtaagggagtttgaaattggagaaccctagatggaagatggtttataagataagaggcagtgaggatggcttctccctaaaataacttagggacattatttgtgaacattatggcacatgcaacttctaataaatgtctattttttcgtttagttatgtcattctgttgtggggttccaacacaagtgctttgaacaattccattattcttaaggtaggtcctcacgaccattatctgtgtgtagaatttgtatgtgggttttgatcatttggtgaaaaaattggaaggtgtactcaacatcagatttttccttaagtaggaaaacccaacatagacttgtatgatcatcaataaaaatgataaaccatccagcccctatgatgttatttacttttgaaggtccccaaatgtcattatgaatcattgaaaacggttttgacattctataaggtcggatgggatatgcaactcgtgtatgctcggctaattgacatatctcacactgaaataaatttagatctttattttgaaataatgggggaaatagtctttttagataagagaagctaggatgccctagtcttttattaccatgtgttttgcatttatcaagtattttgttaagcactttagttccaggatgaaaattttcattcacagatgaataaggcttattattcttaatctcttaagagagagcattattcttctcaaagagaaaatgatgctcagattcaagaaatctaattttctcaagcaaattagtcttttcaacattaagcatatcaatcttgtttttatgagcttcaagaatatcatgatctttcatataactcttaattagtctttcatgctcaacaacaagattattcaagaattcagcccttcgttcatcagtaaactcattatcatcactatcactatcacaattactatcatgcacggattccacagatgcaataaatgctaacaaatcattgggatcataccttgcatcttgagaggttgtggtagcactttcttcagaatttgtgtcactccatgttgcctggatagactttttaatatctttagaactaggacaatcataagcataatgtcccaaacctccatagttaaagcatctaactttcttacctttggaggaatcttttcctttcttattggatgattgttcattaggtctttttccttttccagattcttggttcttgtagaacctttaattgaatttcatgacccttttaatctttttagccatatgggtcaattcatccctagttatatcatttaatatttcaatatctttctcttcattctcagaaaccttaaaggcaaagtctttaggcttttggaaaataaatagggtcatctcatatgtttaaatggagcctacaagttcatcaactctcatggaatcgatgtccttattctcctctatggcaggtactttaggtctaaatccctttggaagagatctcaatattttcctaactacttttaaatctagaataggttttccaacattaaacgaggaattaacaacatcgcttaattcaaaataaaaggaagaaaaagtttgattttcatgcatcttaatattctcaaacttagtagtaagcattaacaatttagaaatctttacaatagacgtaccttcatgagtgacttgaagcatatctcatggttcctttgcacgtttgcaatttgcaatcctgcaaagctcatttggacaaactctgttaaaaatgctaaataaagccttagtattggcttcactaccttcattgtcaactttgtctcattcgtttttagatttaagttcacctgttgatcttccttgagcatcaaggataaatggtggtctccaaccatattcaattgagttccatacccttttgccttgcattttgaggaaaaccatcattcgtgttttccaatggaaataattattcccctcaaagtaggctggactatttaaaggagcaaaacttttttattgttccatatcggacttacaagatcaataaaaatttaatttttatcctatatgattaataaaattttgatttttaattaataggataaagaatcgatcttttatcccgttttgataccaattcaaaaactgtcgaaagtctaatatggaacacccagagggtattccaaataactaaatgggttatacctaaaatctttagatatataaaaaaaaactaatttttagcttttagaaatattctatgattggttagggataaaataatataattattagtattcaaaagatatactgagagaagttagggataacaataattgattattggtataactaccataactcttaagataaccaacctaacaacctcaataacaaactaaccaatcaatcaaaaggttatcaatatcatcaaacagtatataagtaataaaaaacatgtaatgagagacaagatttttatgtgaaaaacaccccacaaactgtggagataaaaacccacaaggtctaagacctaccaatttaaatccacaattcgaaatcaatttatatagatttaccttgccgttttatcctaaagacttactctccagcacctacaacttgattcatgtccgtgacacaacaacttcctattgctccctattagatcctttagctactccgaagggattaaggtcttcaacccacgattcaaaaatcaaatccttgaatgagagatcaagaatgatgtggcaccttaggctctctctctaggagatctaaaacaatctccttaatgaaaccctctcaaaataatatgtgatctctaactcttaaggggttataagagaggtattttataggcaaaaacccaaagagtttcagtatcttaagttttcaaattagagtttgagtgaaattcatccaaaatccatttctaaactcgacaggactatcatgaccgcttgagcggtatgcttgaatgggccttacctcttgaggaggcttaactacttgagcgacccctacttcttttaaaaaatctttttaaaacattttaagtataaaaatgataccgaacctttttatacctcaaaggggcctaatatgctacatgttaaacctctttagatgtacctatgacttcccggttgaatgaacaacaacctttgattttcgatggagagcaagtcgctacctaaaaagacttctacaaccaaaattaccaacaaataaacaaaactcaatgtttttacacaattcattgtcaattaacaagataatcaagtctttgaattgttttgtcacattctatcctaaaaattgtgttttttaggacctaactatagtgaggacgattagtaatgttgaagagagaaaaaggggttatacttctttgatccaaaagtaagaaaatttgctcaagcctttcttggtaaaatttgtggaaaacaagaaaaagaaatttggatacaacatcatagacatgggtattcaagtttcttatcatcgacaaatttttatcttgagttatgttctactccatacctgcctaaattcaagtgtgaaagttgtgagcttgcaaaaagttatcatgtaccctttcctatgccaaaagttgtgcgcaccctcttgggttacttctttaggaggattcaattggtccgtcacatttattgatgattgtgcgtgggtcacttagatttatcttcttaaagataagtctaaggttgtgtctattttcataagtttccatcaaatgatcaaaacctagtttcgtgtttatcttcaaattctttcacataatggtggagaatacatcaataaagtgtttgggtcctattttcttgaatatgggatcattcatcacacattttatgccaaaactcctcaacaaaatgaagtggatgagaggaagaataggtacttattggaagttgtccatgcctcgaagttctcaaggaatgttccaaaacacttttgaggagatcctattctagttattgagtacttaataaatcaaatgccatcaaaggtcttagcaccaagtacacctattgacactctaatgagtttcttttccaaacttcaatctcttaggatctattcctcttggtgtctttggttttgttgtgtttgtacatgttcattcaagagataggtctaaactagatcttagagctcttaagtgtcttttcttaaggtattctcccacttaaaagggatacaaatgttatcatccccttacaaaaaaggaagtttatgtctttggatgtgattttttggggagatcaaacctatttctccaatactgatctccaaggggagaaaatttactgagaagatcaaacctggatgtttccaattcatgtcattctacatgagactaagactcaagctgaaaagatttttgttcctctcattttacatgagactaggattccaactaaaaaaattgagagttagaatgcaaagtcaaatggggaaattgacaacactacttgtaccccttttctttcaaaacctagacaacaagaaaggagccttgaactacaagtgtattcaagaagataatgggataaaactaaagcacttctctctttctctcatggtcaatcatctaatccaaaattaggtgagtcttaatctcttccttccaacccaaaacttgatactaatcttgatgtcctcattactcttagaaaaagtgtaagagattgcatcaagcatcctgtttctaatttcatctccctacatcgattaaattatgcttataaacctttcaccactagcttgccttcaaaaactattcccaagaatgtacaaaaggctatggcaaatcctaaatgcaagaagtgaaattgtacaaaaataacacttgagaagtcgtggaattgcgataagagaagaaaacaattgacactaagtgggtgtttactattaaatataaatcaaagaactccattgaaaggcataaggtaaggcttttggccaagcgttacacacatatggtatagatttccaagaaacttttgcaatagttgcaaagatgaacacaataagggtgcttctatctttggtagcaaaccttaaatggttattacaatagttagatgtcaaaatgtatatccacatggtaatttggaagaagaagtgtacatagactttcctcttggttttgaagatagtgtgcaaggaggaaaggtttgcaaattaaaaaaaatttagtacgatttaaaacagttgccatgagcttggtttaagaggttcacaaagtctctacaaaagtttggatattgtcaatgctaaggaggtcatactcaatttatcaagatctcatctcaaaagaagatcacaatgctcatagtttatatgcataacattatagtcattggcgatgttctagcttaaatgaagacattaaagagtctcttagctggagagtttgaaattaaggacttaggttgtttaaggtatttccttggcatcgaagttgcaagatcaagtaagggaatatttgtttcacatagaaaatatgtttaagacttgcttaaggagacaaaaatgatgggatgcaaaccaattgatactccacttgagcagaaccagaaccatagagctataactcaaggaattcctataaaagaaaggacgatatcaatggtttgttgagaagctgacctaattgtcacatacacaaccaaagatagcttattgtcatgaactaaggtgtttcctaagtttatatgcaacacttagaatactcaagtctcttgaagttgctaagttagccttacatcaacttagttcacgacgctaagcaaagttgcttgacttagaagttaggatgcacaaagaatgcaacacttgaagaatagaaacttgtattccactagaacactttacaatgcttgaaagctctcaagtgcttggtgtcttaggcaaagaaggtcatcctctatttataggcacccaaagaattctttggaaccctcaaaggttcctcactagtctagaattgtgatatctcacattgtataagggaaaaaattcctaatgctatacatgcatgggtttctcttaattgtataaacacattttaaagttgtgaggaccttttgggctccaaatcgataatatttgcatagtcggaagttggttgttacacatggtaacaaagtcagtccccaaccttggtgtgggagtttttttaggccccgtgaagggtatctgtctatttggtctcacaaacctatggaacacaacaaaaacgttgtatctacatggggggcgattgtgatatcccacatcgaataggggaaaaagtttctaacgtcatctatataggcttctcttaactatgtagacacgttttaaaatcttgaggtccttttggactcaaatagaataatatctacacggttaggagcgtgttgttacaagaataatttagaattccttaaacaaattctatgtataaggtatgtacaagagatctttggaattctctagaaatctctacaccactctatcttctcccattcatttgtagagatgtgtggatgtcttcaagagttttagaagctttcttctcccttatataagcttaagtgaaggatcataatgggtagattgtgacactttttcccacaaatgttgtaaatgtcctcatcatcatccttttcaactcaaaacctttcaatctgcttctagaattgccatagagcttttgtaggctcccagctaaccttgctttctattagtctcttccatttaaccaagtattttgtcataagagggacacctcttcttttgatgactcaatctgcaatgatgtgctttgcttccttgttatacaaggttatgacagctattagcgccctttttgatactccgcggcttaagccatccttgtcttcatgataaggcctctaagttacttgcatagaagacttgatgaatcttcaaccttggaggtaacaccacctgataagacaccttgccgactttcccaataataagaaaatggccttcatattgcctcacaaagactttatgtattggccttaaggacttgaactattgaggaagtaacttgacaagcatcaagtatccaacttgatactcagtgtgttgccttttcttgtcagctcacttcttcatctttttagcaaccttatccaagtacaagcaagctcttgccacccccttagcaaacttgaatggcattgaactccttctcgtataacccatcagcaaggtgtgaggagttaatggttgctatcctgtagcttgcttgagcaagctcttgttagttgcctttctccttggtagattgtaggagaattaggccacatccaacaacttaacccaatccctcttattggcactcacaaagtgcctcaagtctagctctaacaaagtgttcaacctttcatttgtccatttatccatgggtgaaagctaatagagaagtgaaggtcagatttcatcatcttggagaacttcatccaaaacttttcaatgaagtgcgagtcaccatcattgataatgtgtttaggcaacccttaatactcgactacatgcttcaagaatagccctatcgtctcttccgtagtgcaatctacaagggctgctataaaggttgcatacttaaagaacctattcactaccacaatgatggaaccatgtccctccaagatgctctcccataagcactctaatgtgggtagtggttccaataggcctctaggcaattgttgctacaccttatcttgtaaacacacaagacaagtcttaaaataggcctgaacttgtcccgcatctaaggccagtagtatgccaactctagtagtgccctatgcgtggtgctatttagggtgcccaacccacttagttttatagtactccttgattaagttcttcctcaagttgtcccacttaggcacttagagttgcttccctttggtgtagtgtaggtcatcctatactcaaaactgcttagttttcttctcattagctaagatgataagactcttagccaatgagtcatgttgtaacccctctttctaaaggtccaccaactctccttggggttggctaggtatagctgttagctttgccttatagctaatgacatcaaccacatgattaacattttctagtttataccccagagtggcgtcaaccaaatgattaacactttctggtttgtactccaaagtgtagttgaactctaccaggaagtcttgccaccttacttttttaggacttcgcttcttttgtgtctgaaagtagctagtggaaacggtgtcgatcttcactatgaagttagactccagcaagtggtgtcttcaagtgcacaagcaataaactatggcagtcatcaccttctcttacaccgtgtagctcctctcaatgtcattgagcttgtgactttcaaaggttatgggatgcctatcttatatcagaaccccttgaatggtgaaatcaaaggcatccatgtgtacctcaaacaccttactatggttaaggagtgccaacaccagttcctccatcattgctttctttagatcctcaaaggctttttagcacctctcatcccattcctatgtcctattcttctttagaagatcaatgagaggagttgccctggttaagtagcccttaatgaactatcagtagtaattgactaggctaatgaatgaccttaattaaggtacctttgtaggcagatcccactcttgaatggctccatcattagcttgccatccttgatgtgatgcccatgaaagctcactttttccttagaaaaagagcatttctcctttgtgtagagctcattctaccttaggacctttaagatcgtgctcagatgctccatatgttcgtccagagtgttgttgtagacaacaatatcatccaagtacaccaccacttagtatggatggaagatcttgttcatcaagatgcaaaatgtacctagtgcattgggaagagaccgaagggcatcactaggaactcataagaaatgtaccaggtcgtgcatgttgtcttcgactcatccctttttgcaatcctcacttagtagcagtctgaccgtaagttcagatttgttaagtaccttgctctgccaagttgattgaataaatcgacaatgagtaggatgggatacttatttttcaccgtcaccttattgagtgcccattactctatgcacatacgtagggatccatcatgcttcttctaaaatagcattgatgtaccataaagagccttagatggttggattaaccccgtaaccaacaactctttaagttatctcctttgctcctccaactcgagtggtgccatcttgtatgaccccatggcagggggcttagctcttggctctaactcgatcttatgatccctttgctctccttagacgaagctttttaggtaattcttatggcatcatgtcttcgaactcatcaagaactccctggattgccttaagcatgggttcttccatggcatcttctttttcctcccttagtgtagctaagtagtcacctacctcccatatatcgaagaggtgatttactggaaaaaatcgacaaatttcggcgaacagtgacagccgattaatcggtgatttattgggaaaaattagttgaggtggtaatatttcggcaatattttgctgatttttttggggggaaaaaaaaaagaacgcccctattccagtcaaggttccctcctcccgtcaaagcatcagtagtgatgcctctaattttttgtaactcaaaaaatgcctttaattttttgcatctaaggggactcgaaccccaaacaaaaggattagctagaaacatagcctaccattagagcaagttcgccctttgttaattatattataccaaacatatatattataaaagtcaacatataaacaaaatattaaaagaatattttagagaacaaattaattataattattttataattaaatgaaaaaaaattcatttaatttattaccaataatataaaaattatcatcataattttcttcatagtgtctttaatatcattaatagattgattaattaaatattaaaaaattgtatatatatcatcatttattttatatcatttaatataattgaattaaatgaatcataattttaatattaaatatattttaaaattaaagatattttaaaattagaaatattataatcaaatatcacaatattattgtgaaataatatttaatgtaatttaataataaatatacacttataaaatgcatattttttatcgatgcatatgatattattttcaaatataataagtcatatcatacatatatcaaattcttcaacaaaataattttaaaatgtctattatacttctaattatatttctatgaggtttttcttacatttccttaaattttaattaaatttaagtctaccgatgttttttttcaaaatatcagtcgatacatctcctatatatttataaaatcaaagtaccaatatatctatgattactgatattttcatccttggttttaaggcatcctaggcattgggttaatcttaagggcgtttaggagttgcatcaacttgacatgagcatcgccctctttttccttctcatcaatcatggtattaagggcattcctcttaagcaattgcatgcctaatgtgaactatcacatagcaagtagttagtcttgggcatgaagtccttttgtttatccttgtttgtaccttccttactagttagtcttgggcatgaactcctttcaattatccttacccttaccttccttaccactagaggtcttgcttgatccttctttggcagcaatgtagctcttcaaccccttgtttcccccacttttggcatggttaccccttgatgatgactttggcttagagaagtctccccttatgtactctactaaggactctattactgccatggttgtggcaaggtcttagacctcacagcgtctcagctctttctcgacctagctctgtaagttgtctaagttgaacaactcctcctctatcatgttaagaatctcaaacataagtgtagagaacttcttaacatactcatggatcgagcttgtgtacttgagacgcttcatgttctttcttgatagataagccacatcttctaggtagaactgtcttttgatcatcctcttaaagtcctctcatgtatctatggtgcatgtgcctttctcatcactaacaaacttttagcgcaccatggtgcaatagtgttagtgaggtggaaggttacggtttgtaccttaatggtttcattgattagtgttattgcctcaaaataccactccatgtgtcacaaaaagttgtctagcctcctttgcatccctctttccattaaacacatatggctttggcacctccaccctatgtgccttatgagtggccatgacttgtttagaaactacagacttataatggcatggtgcagcagaaggtttgtttcgaaatgaaacaaaaaaatactccaaaacaaatacaaagatcacaataggatctgaaaattaaggaataattctgaaaaaatatattgaactcctctctaacaattacaatgagcctttaaataatgtttgtaattcaaaaataaatgaaataactgaaatatgaaactaaaaataggaaaccaaggtaattggaaattaggaaaactaggaaagagataggaaactaatgatgaacctaaaatagaaactaataatgtagaaaatagaaactaatctaaaatagaagttaatgacgtagaaaactaaaaataaaaactaatggaaatagaaactaatgatgattgtgtgttgcatcaatcccctccacttgaagaaaacccgtcctcgagttttgtggttgcaaagaaaactcatccaggggaaagtattcaaagatatcaacaatgttaaaagtattagaaatgttcatatcaattggaagatcaatcttctaagcattatctccaatcttctgaaaaacggagaaatcaccaattttcttgtctttaagtttattgtacatgccagtaggaaaacgatttttgcaaagatggactattactagatcagcttccaagcgccgatgtcggtctacagtatttttgtaatgaagattagcatcttttaaattcttcttcacttgatgaatctgttgaatacctgcaaactcctcagtgttagaattgacatcatgagaaaggggaagacgaatcaaatccaccgtatgccttggaacactagtgtagacaacttcaaaaggagtcttcttagtagaacgattaggcatactattaaaagcaaactcaatctatggaagggcagcatcccattacttcgatttatctccaccaacagattgtatcatattgccaagagtgtgattagccacttcaatttgcccatcagtctgggaatggctcatgctactatacttcaaagaagtgttaaacaatttccacagagttctccaaaaatgactaaggaatttcacatccctatctgaagttattgaacaaggaatgccatgcaagcgaacaatttcacggaaaaataaattggccacataagaagcatccaaagtctttttacaaggaagaaagtggaccatcttagaaaatcggttaactacaaccaaaacagaatcaactccatgttaagtttatgaggccaagaacaaaatccatagttaaatcttgccaaatcatttctggaacaggtaaaggagtataaagaccagtattttgaacttatcccttggatttctgacactgaggaacgctgaacgaaacacccaacatcccgtttgagttggggccaataaaatctctcctctaccaagttgattatcctagccaacatgtcctcttagtccaccacatgcaattctcgaatcaaatattcacgcaaagaagaacgaggaatacataattgtgtacctcgaaataaaaatctatcttgaataaggaagtcagtaacaaactccttattgttgcttcatgtccatatgccaccaaaatcctcatcaacagcataagtatccttcaaataatcaaaccccaccacctcagtactaattgtagctagtaaagaggctcgttgactcaatgcatcaactaatttattttgttggctagacttatgcttgataacaaaagtgaacaactataaaaaggcaatccatcgagcatgcatttgattcatcctcttgtgagaattgatgcactttaaagcttgatgatctgtatatagcacagactctcgatgaaacaaataatgctcccaatgctttaaggctctaacaactacataaaattcaagcttgtaagtggaccacttttgtcaaggttcactaaccttctcactaaaaaattccaccgggcgaccctcttgagataagacagctccaatgcctagaactgatgcatcacattcaacctcaaacactttctcaaaattggagagtgctaatattggtgcagtgcacaactttgcttttatcgattctaagttatctttttgcgctttgccccattggaattggcctttcttcaaacaatcggtaatgggaaccaggattgtactaaatcctcgaataaaacgcttgtaaaaagtagttaaaccgtggaaactttgtacttcacgcatgattttaagagctggccattcctgaattgccttcatcttcgtctcatcaacttgaataccatcctttcccactataaatccaaggaataaaaaatggctagtcatagctacacttcttaagattgatatacaatttattagcttgtaaggctaagagaacttccttgagatgtgataagtgctcttgctcgtctttactatagatgagaatatcatcaaaataaaccaccacaaattttccaataaatgaaccaagaacctggttcatcaaccgcatgaaagtgcttggcacatttgtagcccaaatggcatcattagccattcataaaggccatatttagttatgaaagtcgtcttccactcatctcctagtcgaatacaaatttggtgataaccactttgtaaatcaagtttggtaaacaccacaacgctttctaacctatcaagcatgtcattaaggcgtgggataggaaagcgatacttgaccattattttgttgatagtgcaactgtccacacacatgcgccaactaccatccttctttggggtgaataaagttgggactgcacaaggactgatgctctcacaaattaagcctttatcaagcaactcgttaagttatcgctgcaactcttcatgctcaattggtctcatacgataatgtggtaagttaggcaaactagctccaagtactaagttgatatggtgttgaatattttgcataggaggtaactcattaggtaattcattgggagataaatcaggaaaatcaacaagtacctcttgaaccttggtgggaatatcaataattgcttcagattagcccttaaccaccaatgctacaacaagatttggcttcttgacttgcttaaagaaatctagttctgttatgttggtgaatagcgacttatctttcttaggaaccgaattgttttttggcgattgagactatgacatcaaaacaatctttttgttaaaccacaaaaaaacaaaagtattatctcgacccttataagtggcatcaacatcatagtgccacaaccttcccaataaaatatgactagcatccatatccaccatgtcacatacgatctcatctttgtaatactttctgatcgacaaaggaattttgcaaacttctagcacttgaacttccgaacctttcttaatccatgcaatcttacacagagaagggtgtttctcagtattcaaatttagtgatttcaccaaagccttggaaacactattctcgctactaccactgccaatgatcacgttgcacactttattacgaatagtgtatcaagtccggaatattttatgtcgttgagaatcgtctgacttttttggggtaagcaaaagtcgttggacaatgcatgccactttttctcccacatctccttctacaaactcagcaccttcgtaaatatcttcttcaagctcttgttcctcttcatttccaccttcttctacaaagttaacagatcgtctattcgggcaattatttgaaagatggcctggctggttgcatcggaaacacttccctagatttggatgtgcataagggtcattattgattcgttgttgctgttggtgttggccttgagtattcgatcgaataggggttgaagttccccttcgattctgcgttgaattttgagttgaaggggcatctttattcttgttatcattgctgcctgaaatagttgacccctttggagtagaagaagcttcttgggttggttagtgaagttaccctgagtgcacaccgtggaccaattgattttactttccactttcatcatcaaattagttgcatctgtcatggtccaaaccccttgaagagccagtcgatcttgaatgaccaactttaggcccctaatataacgagcaattaatttatcctctatctcaaacaaattaactcaagcatttaatcgataaaattcctctatgtatttgttcacagtccagttggcttgccaacaattttgatattgttggtataaaaattgttcataatccagaaggagaaatcatccttgtaataaccgtttcatcttcggccaaatacgaacacgttgttttccttgtcgttgacaattatattgatgttgttcccaccatgcagaagctccacctttcaacttatatgccacgagctttacttgattttcttctgaaatattcaagcaattgaaaattttttcgacaatatggacccaatcgagaaaatattcaatgtgtagtcgactgttgaaactaggtaaatccatcttcatcttaaattcttggttattttgaccttgattgttagcccaataattgaagcgaaaatcatcttcttcttcagatgaataatctaacctccattgttgcctttgttgaatattcctccactgtggaagttgaaaatcattgtcatctcgaaaaaggtggacaaaactcattttgttcataaaaaaccccttgctagaggttgtcgtcatcatggtgcctaggagctccccgattccaacactcatacactcgtaatgaatagggctcgcaatttacggttggacccatgcgaatcgtgcctccaccatcgatttctgacccgatctgtggccaacgtcaattcatcgtagccatcctcttgccagtcgccacgttggtctagtcgtcgctccatgggttcacgtttcccttcgatagtcaacgcaaccaccatctatgtgaggttgcaaagagtctcattgatccggttgagtcattgctcgattctttcgaaccgtcattcgtcgtcgatggttcattttccactaaaaccgtcgtcagccatcagattgaagtaaaaatccttgctcttataccaaatttggtgcaatggaaggtttgttttgaaatgaaacagaaaaacactcaagaacaaatacaaagatcacaataggatctgaaaattagggaataattttgaaaaaatatattgaactcctctctaataattacaatgagtttttaaataatgtttgtaatgcaaaaataaaggaaataactaaaataggaaaccaatgtaattggaaactaggaaagaaataggaaaccaatgatgagcctaaaataaaaactaataatgtagaagatagaaactaatctaaaattgaagccaatgatgtaggaaactaaaaatagaaactaatggaaatagaaactaatctaaaatataaattaatgatgtaggaaaccaaaaatagaaactaatgataattgtgtgctacattatgacagctcttaaaatacctcttaatcccgagccttcatacatgtggctaaggtctctattcttgactctaggctagcaagcatgctcatgatcttgtcttggaaggacatgaactcttcatatgacaatggttgaacctatgaagctagtacctcctcttcaaggtcttagatccactcccttagatccgacaggcccctttatgtgctttgttcgatcaattccatacctcctgagcatccaccatagctatctccaccttgggtagccttgcttccatggtggcaatgacaccacgagatttctcattctttccctcactatgtgtggtaggaccggtctccctcccacggatttgctcactatcatctccttcacattggagcttgacatgcttcctttacttgtgaaaatgcacacttagcagccatgctttgataccactttccacgaacttaggtgtttcctaagctcacatgtggcaattagacaactcaaacctcttgaagttgctaagttagccttacccagatcttagctcatgatgctaagcaaagctacttaacttggaagttaggatgcacaaaggaagcaacactagaagaatggaagcttgtattgcactagaacactttaaaatgcttgaaagctctcaagtgcttggtgtcttggccaaatgaggtcatcttctttttacaagcacccaaggaactctttggaactctcaaaggttccctgaaagtcaagaattctctaaaattccctacacaaattctatgtacaagagacctatagaagtctctagaaatatccacactacttcatcttctctcattcatttgtagagatgtgtgaatgtcatcaagagtttccaaaagctttttactccattatataagtgaagaaatttgtgaaagagaaaaaaatactcatttttatttttctagcatcttttaaattgattcttgcattgatatttatacatgaatggctgagattatttgccttaggaaaagcaatttaatccttaattttaggagaaaatctcatgtgaaatcaagaaataaaactagaatagaaaacaactatatcacaattgtgcatatagttgtgacacaactctaacacagttgtaacatagttgtgacacaactatagctataacgataattatgcatacagttgtaccttccaaatttcctttggatttttgcactcctcaagctagcttgttaatgttgattattctcaacttggatctcaagtcttcaaagttggttcaagaaagcaccttggtaagaatgtttactgattaaagagttgttggaatgtaaactaatgaaatcaccccttcttttatcttctccataataaaataacgatctatttctacatgttttgtccaatcatgatgaaccaggttcttagcaatacttatggcagcttgattgtcataaaacatcttcatagaatcttctattggaattttcacccagtttaggagcctctttaaccacattccttcatagattccatgtgccataactctaaattttgcttctgcactactctgagctctaatagattgtttcttgcttcgccaagtaactagatcctcccatacataggttcaacatcctaaggttgatctttggttagttatagagctagattagtctatatttgaaaatttttcaatgtttctcttctatgttcttttgaaatagaatccatttcccggagacattttaaaatatcttagaataagatacacagctttcatatgttcctcagttggattgttcattaattggctaaccatgctaattgaaaacgtaatgtttagtcttgtgtgagagataaatgagtttcctcacaagtctttgatatctccctttatccactaaagcacttcctttcattgttcctaatttagtatgtagtctataggtatgtctgcaggtttacacccaagcatcctagtctcctttagcaagtttaggacatacttatgtggggagactacaatacccatttttgatctagcaatttccatcctaagaaaatatttaaaattccccaagtctttaatttcgaactcatgggcaagaaaacttttgaacttgcctatttcttcttcaatatctctagtcaggattatgtcatccacataaacaatgataatggtaattcttctctcaacagtgtgctttacaaatagagtatggaaaactgacactgggagtaaccaaacctctttacaaccttagtgatatgatcaaaccaagctcgaaaagattgcttgaggtcatatagggttttttttttttttttttgtctacggactttgttaatgtttgtctcagtctcaagacctgaagaaattgccatgtacacttcttcttccaagtcaccattgaggaaggcattcttgatgtccagttgatgaagaggccaatcttggttaacaactaacgacaacagaacacgaattgtgttcaatttggcaactagagcaaaggtttcttagtagtcaattccgtagaactgcataaatcccttagcaactagcctagctttgtacctatcaacactcccattttctttgtacttaactgtgaagatccacttactcccaaccatattcttttcttttggaagttttgcaagctctatgtcccattcttttcaagagcttggatctcttcctcaatgattgtcttctattcaggtatttgtaaggtttcctagatatttttgggaattcaaatatctataagactgataacaaaagcctgataacctggtgacaaactcttataggagataaagttataaattagatgatttgtgcaagatcttactcctttccttttggaaattggcaaattgagttcatcatcttctaactcattaggattagaatcagtgctacttgagtgtcacttttgggactaaattcagttcagtttcatgtgctaactcgagctatgtttgctactctatcttcttgagactacttctttttccttaagtagacaatgaagtcattactattgatagtttgagattgggttgggagaagagtgtgaaaagagagaaaagggagaatccctaatttttgttattaaaaactattaatgatacacattagacttgggtatatatatacatgttagtgggacccacaatacaataaggaaagaaaaagaaaaggaaaagtaaataacctaaataactgtacactatctaacactccccctcaagctagagcatatatgttatatgcaccaagcttgttacaaatgtatttaattctaggacctctgagagatttagtaaaaatatctgctagttgatcatttgaattgacaaaactagttgccatacatcctgatgcgatcttctctctaatgaagtgacagtcaacttcaatgtgtttggtcctttcatggaagactggattggatgcaatatgcaaagcggcttggttgtcacagatgagcttcatctgttcatcttttccaaatctcaactcccgaagaagatgtttcagccatatgagttcacatgttgccagagccatagctcgatactcggcttcagcactagatctggccactacatcttgtttcttactcttctaggatattaggttacctccaataaaacacacaatacccggaagtggaacgtctatctgtgggtgaatcaacccaatctgcatctgtgtaaccaacaacctaggtgtaacctctgttctcgtacaacacaccttggcctggtgtacttttgatatatcaaagaatgcggattacagcatcccaatggctatcacatggtgactataggaattgactaacaacacttacaggaaaagaaatgtctggacgagtaatggtgaggtagttcagtttgcctacaagtcgccgatatctcccaagatctcctaaaggctccccctgtcctggtataagtttgacatttggatccataggagtgtctaccggtttacagtctaacataccggtttcttccaagatgtctaaagcatacttcctttgggaaagaaccacaccggaactggattgagctatctcaatccctaagaaatagttgagtttccccaagtctttagtttgaaagtgggtgaaaaggtgttgctttagtttctgaataccattctgatcactgcctgtaatgacgatgtcgtccacataaactaccagataaatacactaccccgacgagttatgatgatagaaaacggaatggtttgctgtactgcgaaacatgccaaactcctgaacagcagaactaaaacgactaaaccatgctccaagagattgtttcaagccatatagagaacagcgtaacctgcacactaaactagactccccttgagcaacaaaaccaggtggttgctccatataaacttcctcagcaagatccccatgaaggaaagcatttttaatatctaactgataaagaggccaagaacgcataacagccatggagagcaatagacgaacagaagctatcttggcaacaggagagaaagtgtcaccataatcagaaccataaacctaagtatagcctttagcaactaagcgggccttaaggcgatcaacctgaccatcagggccagccttaactgtgtagacccaacgacaaccaattgtagatttaccagagggtaaaacaacaagatcccaagtgtcattaaagtgtaaagcagtcatttcatctaccattgcctgtcgccagtctggatggaaaatagcctcaagggtgctcttaggaagagaaacagaagatatagcagaaataaatgaagaatagggtgaagataatcgatggtaactcaaaaaattgtaaataggatgaggattacgagtagatcgattacctttccaaagagcaatgggtaagtcggcagaaggaggcaaagccgaggcaggagaagccgaagggataggaagtgagtcagcaggtacctcggccaaaggaggaacagcgacacgatgacggcgatgataacctgaagtgggcgagaaggcactgcatcaggtggggagataatgggaaggggtaagacttcagaaataggaagagactcagaggcggagaagaatggtgagtcctcaaagaaagtgacatcagcagagagaaagtagcgatgagtctcagaggaataacaacgataacccttttgaagtctagagtatcccaagaagatgcattttgtggctttggcagaaagtttgtcctatccaggagtgagaatatgaacaaagcaagtacaaccaaaaacaccaggagaaaggaaataaagtggttggtcagggaaaagaagggaatgaggaatttaatcgtgtaatacagatgagggcatacgattaatcaaataacatgctgtaagaacagcgtccccccaaaaacgaaaatgaacattactatggagaaggagagtacgagttgtctcaataagatgtcgattctttcgttcagctacctcattttgttgagtatgagtacaagaagaatgatgaaggatcccatgttgggacataaattaagtaaatggtgcagaaaaatattccctgacattgtcactacgtaacatacgaatagaaatattgaactgggtttggatttcaacataaaatttctggaaaatagagaataactcagctcgatttttcattaaaaataaccaagtacatcgagaatagtcataaatgaaagtgacaaaatactgaaatcctaaaatagacgcggtccgacaaggaccccaaacatcagtgtggacaagttcaaaatgagactttgcccgattattcaaacgctttgggaatgaaacatgagtatgtttcccaagctgacaggactcacacgcaagtgacgacaaagatgaaaaacgagggaccattttctagaacttggataaactagggtggcctaggcgattgtggatgagaaggggagcatcagtggaaatgaaaactgcaggagttgaaggcgaggtgaggtgatagaggccttgagactcacgtcctatgccaatcgtcttccccgtactccggtcctacaaggttataaatttatcagaaaaagtaataaagcagttaagagtacgagtgattttgctgatggagataagattaaaggaacactcgggaatttaaaggacagaagtgagaggtagagaagggagaggatgtgccaaaccaatgcctttagccacaatttgagaaccattagctaaggtaacagtaggtaaggcagaagtagtagtaatagaagagaaaagatccttattacccagaatctagaatccaaggtccaagagaagatgtgtgggtaagacaagcagaaacattaccagtctgggcaatggaagcaacagaagctgacttggtggcctgatagcgaagatagtcatcatactcactatcagtgagggaaataccctaagatgtggaggagcttggaggctgaggcggctgaggatcagatgactgggccacatgggcagtgcggggaggtcgcccatgtaactgataacaccgatcacgagtgtggccaagcttattgcaataggtgcaatgaggacgttggcctctacctcggttaccactgcgtcctcctcaagagttagtttgaaaaactaacacagaagaatctgaagtgttatcagatggcaaagtttgagtggaggagatacggaggaggcgagcaaacacatcatccaaggatggaacggaggaactgtcaagaatctaatcgcgaacagtcttaagatctggacggaggccaataagcgtaagaaccatgaagaacttgtcaatctatgttcgttgatccccaacatcagtagtaagaggcatcacggtcaagaattcctccttaagagaggcaatctagccaatataagtagataaatccatgtcttgttgtctaacattgacaatagaagaagccaccttataaagacattagatatcattcgtgtatagccctctcgcctgattccaaaatttaaagcatgttttgtaagcccaaagatgaagcggaatcttaggatcaactgattgccataacacactacataactgtgcatctatctttctccattgtactctgtcaacctcagagatatccgcctcctacgtaacgaggtgatcctcataaccttgacccataaaccaaagctccacagaggcaagccaggacaaataattttcactgccaaccaatttctccgaagtaatcataggagatctagatataacagaggaaaaaaatggaacttttagtagccatatctacttatctagaaaacgaaatatgtttggatcgaagagagccctaatacggcttcagatcgcggctgtgagagaccaaatagtaaagaaaaacaaatgtggcactactagaagggtagaagaacacttcctaagacacgtgcaaggctcggggtggagaggaagtcaccggaaatcgccggaaaggctatttagagggccggcgaagacaaaaaaaccccaaaaaatgcacttgcagggctcagatggcacaaatacagatggagagtggctagacggcatcaggcaaggctcgaggtggaagcgcgttgccggaaagtgcttcacacgccctcacgtgtcaacgcgtgaggttcaggccgccagagaagaaacgcgcatggtcggagcgtgactgagattctccctccggtgctttgacaaaacttgaagatctcctccttgcgcacctgatggtatggtcggtgtcggaaaaggacttcgccggcggtgagggttttctgatggcgatacggttgaccggaaagctttaggagatgggaaaggttaccggaatgaaacacggtcactgaaaggtttcccaaaattgattcacggataaaccgaaaataattaggttttttttctccctaggctctgataccatgtgaaaagagagaaaagggagaatccctaatttttgttattaaaaactgttaatgatacacattggacttgggtatatatatacatgttagtgggacccacaatacaataaggaaagaaaaggaaaagtaaataactgaaataactatacactatctaacaaagaggaatacttgactcagtgtctacagattcagtagtttggagcaagaaacttagagcaagaaagatagggttagagttgtgaacaataacagactcaagtgtttgaagttcgatcatgttttttgtttcccaaaattggtattcttgaattctattctcctcctaaatattggttttagagtaatagaactaattttcaaagaatgtcacatccatggaggtgtagaacttttttatgatgagaaagtaacacttctagaagagtatcctaggaaaatacacttagtggccctgggccaaacttacttcgatgttgttggggaatgtgaacaaaggttgagcaactaaaaacctttggtggaatggaggaaacaagccgagtcctgggctatgatttgagaaagactttgcacggtgttttgaaacttaagacacgggaagacattctattgattagataggttgcaataagtatagtttctccctaaaaattctttgagacaaaagaggagagcataaggacccttgcaacttctaataagtgtcttttctttctctcggctatcccattgtgttgaggagtatgaatgcaaaaactttgataaactataccttcttttcattagaatttccctaagttgaaataatcttttgcattgtcaatctttagcacttatattttagcatggaactaggtttggatcatgttataaatttttttgaaaatttgactcaattctgatttttctttcatcaagaatattcaagaaattctagtatggtcatctacaaaggacacaaaccatctagtccctcttatgttctttatcttaaatggcccccaaatataactatgcatcatggaaaaaggatgagatggtttgtatggttgaattggatagggcttgcacacatgcttgaataattgacaaatttcacactgaaaaccatctgaacttttaatgaataatgatggaaagagtattttgagatacaagaaactagaatgtcttagacaatagtgtcataatataacatcactatctttattagaactaaagacaaaaaaaaaagactgtttttcaccaactatcggttgaagttgtctttcaatataatcatcactttgaagatatagagtcctgaacacacctcaacattgccaatcgtcttccttgaattcaaatcctaaaaaacacaatcatttgagagaaatttagtaacacggttcttttcttaagtgggttttctaatggacaacaaattgcaatccaagtttggaaccaaaagaatagagtcaagagttaggtccttagagatgacaacagaacctgtaccagccacctttgggagagaaccatcagctatacaaactttataatccctagaacaaagtgtataattttgaaaatttgtggcatctccaatcatgtgattagaagctcctgagtcaacaattcaagtacttaaatttttccttttttactttcaaggcagcaagaaaattacctttttaagctaaagatccggacttgatgatagaattagaggaatttgccccctcttgggactagttgaacattttttgcaatagttcaaattactctttgctgaaaggactagaatttggtggtgttaggttgtcctcaatagtgacatagtgtccttatctttctctatcattttgtggacatgacgacttccaatccgttggtttcccatggattttccaacatgtgtccttggtatgacctggtttttgtcagcgatcgcaccaaggtgtccctattcttggtcaattgtcgttagaaggattgggaagaccccaagccactagggctgaaccctcagtgataggttggttggtttgtgacccaacatgactttctttctactttttctcggtgcacttctgaggcagcttcttggatgttgggtaaaggttcagctcccaatattctacctcaaacttcatccagattttgttcagtcctaataaaaatttgtagatccgtttttttctcaacaatcttcttgtatttgattgcattcattgggcagtcccatttggtggtttcaaacatgtccaattattgctaatagtgagttaaaagactgaaatattgagtgacaaacaactcaccttggcataaatcatggaggatcccttctatttcaaatgccctactatgtcttttgtatcaaaataagttttccttgctgcttcccagatttcttacaccatttcatagagcataaaattttcccctatgtcattgttcatcgagttaattaaccaagacataaccacatcattctcaatcttctatcctttgaatttcggatcttctttcataggtcgaggcactacaccagtgaggtagtcatccttccctctaccacatatgaacatcatgactgtgtgggaccattgaagatagttttgcccattcaatttgtgtccagtaatgagagtagcagcaccatctcatcctccattgttgcttggaataggagcttcttgagtgtaggtgacttctgaggttgaggagttcttcttgggggcctatttggcgtggaaggattaaatggttcagaattagctctgataccatgaagaaatttgagaaagagaaaaaaaataatactttttatttttctcccatctttcaaactaattcttacatcgatatttatacataaatggatgagatcatctgccttagaaaaagaaatctaatccttaattttaggagagaaattatcataaaatcaagaaataaaattagaataaaaatcaactatatcacagctatgcataaagttgtgacacagctctatcacagttgtggcacaactgtagctgtaacacaactgtgcatacagctgtaccttacaaatttcctcttgatttccacaataagctcaagtgatgaatcattttgagtaggttgtgacattatgcaatgagtgtagttggtaagttcatgcacacaccattggaatgtcacatagaagttgcacaaagaatcccaaggcatctaaaggggaccccagtaatggtttgatgggagtattactgattgtcaatcaacatatagtcattgcacatttgttagaggtaatttggtgatgtggagaaacaaaaaataatcagtggtggctaggtctaatgcagaaggtgagtttaaatctatggctcaaagcatatgtgaacttatgtggctaaggattcttcttaaagaactacaagggaatgttaaagagccctacattgtgacaataaggttgctaccagtattgctcataatcctatacaccatgattggacaaaaaatgtgcaaattgattggcattttatcaagcagaaaatagacgttggacagatatgtacaccatttttttcatctaaggagcaattgatagatatttttactaaaggtgtcacaagctctatgtttggaagtatcactagcaagttcgttttagcaaacatctttgaaccagcatgagagggagtgttagaatattgcaacttgatttaggggattatacagcttgatttaggggattattacatcttgatttaagggattattttttaatgcatcctattatagaacagccaactttccttgtattataaaacagttaactttccttgttttttattcttttctgttaagagtggtgttgtatatttagtaagaagacagagaaagaagatgatttttctctcaaaaactgatactatgtcactgctttaagcaaattagcaaaccagttaaagaagaaaatggactgggacaacaatgttccatcacatgtaaactctaacaagagagtaaaagcttctaaaatatatatttgtttgaatatgcaactccaacttaacataattatagaaatcaagagaataaggtacaagtttagatatgcaggaaaccacgtaagagcaatttttacctgaattagcagaaaactaaacctattcggttttttttttttttttttcatttgccatctaaaaaatttattggaacccccttatttttaaaaactttgatctgtatgcttccttataaatcctagaattcctctcactccaggttacccaaacaacagccttcagtatgcaatgccaaggaactcttctagagtacttcttgaatccttggaaaccaacaaccaacacaccagcaatgtaaagaatagatttttatcagtattattactaataagttgttttattattcatttcatcgttatttttttgttttatctccttagtttttagggtttagcttaatgttcttgtacaaatctttccccaagatttaaccctttccaagtgctaagcacagaatttgttgcatggaatgtctctttcagaccctcttttggttgtaagctataattcattgttttacaaaataaaaaccatttcctcatgttttaatatgtttgttaggccccaggcccagagaacaatattgacattgtttatatggctatgtgtcatccatctcttgcagccagctggttggaatttaaaaaaggagtatctacc

SEQ ID NO: 13108 - DNA, 3660 bp, Vitis vinifera
  Intron number 2 from transcript GSVIVT01014725001 (locus G SVIVG01014725001) derived from phytozome v7.0 (chr-ID chr1 9; pos 9003031 to 9006690)
ccctagagcaccgagggttgtggctgaaggttgtccatcttttgaggaataggaatggaagtgtgtgcatgtagatgctctgccaaatttgtgctctttctaggaaccattttaatggtatttatggtgtgaatttccagtaggaataagaccctgaatattttatattcttatttctctgctttaagaacttgaattcaactggctggatttgaaaggaaaaacgccgagtgctaaagaaataagaaaatagattttgactatgtttggtaagattcgatattaggtggaataggataaaaagtgcaataatatattctattctatgtttagctaacaatgagacaggatatgttatctcacatattatcttatgttataagaattataaattcgtttcttctatctactctcctccgttgtcttaattctttttctttttcatgttagttattatgcaaaataaaatattttaacaatatttatattataaaactttattatatatgaaaggacttcttgcataagctaaaataaagcttttacaagaagcaacattttcctagcttccatattaaactctcttttagccactttgaacaaaattaatcaaagaggcataaaagttcttattgaacttaaaaaagagttcttaacttttgacttcttagaagtcaatccaaatgggaccaaaattatctattagaaaataaattataaagagatcctcaaataacgctaaataataccaagcattgagaaacaataaaatatttttcattcaattttcactcacaaactaaatactttcatgatataatatattcaattggatataatatcttaagataattttttttccctttttttttttataatgaaggaaccttcgatgtccaaactcttaagactctctactaagacccaaacctcgaggtgttgaccatcccgcgacaattagtactgggtaaattcaggatattaccagtgacaagattcgaacctaggaccatgtgtcacttattgggaccacacttcccagtattcaccctaagatattattatccattggatataatattcaatgaaaccaaatctcattggaaatagaatacaagaatatagcatattctattccgacaaccaaacatagcctataagtttaacacgagctagtaagattgatcttagtagctccaaataataaacaacagtatacacactagttttacattgcaacaattaaatagtaataacaacttaaaactatatcgaaatgaacagtgttcctatcatattctagttgcattgaatacaaatcttataaaaagtggatcaacagaaattattttgaaattaatctgtatttaatgtaacttacagtaatgattgagatatcaactggatcaacaaccagtaatccccgcaagaacaagaacaagaatcattgttgaagcagtagaagcggttccggtcacagacaactaacttcaatgtcgaagtgttgcttcaagatccatcccaggagatatactcatttctgtgttaataaataaatccatggaatgctgcgattcctgtacttgcaaagaggaacagagaatttgagaaggaaaaaaaataatggaaacaacatcgtaatcaaatcatctttctcatcgcatttctcaagaacaaaaaataaaacgaatcaatcatcaaaaaaagaaaagcattgatgctcaacaaccaaatcaaaccatatctcaagggcaaaacaacaagaaacaagggcagaatagcaaaataatgaagaaagggtgaaagagaggccgtttagatgtgcgtcacaataacaacaaacttatacctgatataattcgagcacattccgtggatttgaagaaatcatttcatccatggcaacacgagtacccgaagagggtgggtttacggaggcactggaaggtagtcggagtgacggtggcggccgttcgaagggtcgcccaccatggcggagaggagtttccgtgtggtctgtgacgaggtgtaagttgtgccctgtgagcccctgaaatttccccccagcctttccttgcccttcttcagtaaaatatttttctccatatttttcctttttggcaaaaactaaggaagatatttaaaaaaaaaaaaaaacatttttctttctatttttgcactttcgtgtcatccaaacaattatttttcaattattcgattgaaataatcaaataatcccaaatttgtaatctaattctataactttttctaacctgaaaaaccgggtttttttagcttaaaacaatgttcttctatttttctaccatttcttttcctttgacatttctcaagatccaaacatgtcttagccctaatgctgtggtgtcataggacagacagagtaaaagtccagcctggttttatgtgacacaacacacaatttcataaattttgaggttacgaggcaaaatgaccaagtcccaaaaggttgcattggtgtccaagtttattctaggccaggaaaatgaattcccagcccatgaattaggaaatgtataatgttggcgaccaagtcaggaaagtaggggcgatttccccacctgcatttcttctatatctgggttttcttgcactggaaaagcattttcctgataagaaaatcttgctcttaatgatgggggaatccaagaaaacaagcaacaggattaattccagagtcattttaagcaaacaagaattttccttaatcattcttaagtcagaggctcagacaccccagattgtgaattttaaccatgagagattccattcagaagagaggatgaaagacaactgtatagaaaggaaaattttaaattttcctttaatgaatataattctatttgtaaatgagaaaatagaatgtacagaaaagaagaaattccagcactgtctcatgcattaaaatccatcacattaagaaccattgcctagaatcttactgtaaatcatatatatagatatattaatgagtttgtagaacacatcacaggggagagaaatggcagaacctcaaggtgacaatcagctgaagcccccggagatgcaacacttggacattgaagttactggtatgcattcctcaagaaaatagtctttcttgtttctttttccagcgaagatgaacctgaaagtatcaataaacaagttgaattgtttttgtacatccaagagtagaatgatcaaagaagtgaaggaagcagggatactaaccatgttgtgattggttgaagcaggggatgaagaggcacagatgatacaacagagcctgttctgacattcaggacatgggtgcttggtatattagcctgtgtgactctatcctttgtgaaccaattctttgcttatcgccggaatcaactaagcattacatcattcccagcacagatagttaccctgccactggaagtttatggctgcaacgctcccaactaaacagatcagagtctcattcacaaagtggtcgttttcattgaacccggccttttaacatgaaggagcatgtgttgatcaccatgtttgccaactccggatcaggtggtgttaatgcagttaatatcattacaaatgtcatggctttctacagaaggagtctcaacccaggagcagcatttttgctat

SEQ ID NO: 13109 - DNA, 3800 bp, Vitis vinifera
  Intron number 7 from transcript GSVIVT01008051001 (locus G SVIVG01008051001) derived from phytozome v7.0 (chr-ID chr1 7; pos 6245161 to 6248960 reverse strand)
gaagaggtactacttgtcattttctcttgaatgttagaaatttagttgtttggtctatctactatgatgtttctttgtatttccagctttatctttttgtagttttcacttgatcagaaggagaaatctgttgcaacgtaaaatgttttattattacttactatatcccaacaaatcttgacaatgatctggaaggttgtcctattgtgtcttttttggacgtaagtcacacaatggaagaagaggaactgaagatcatttgaaagcataaaaatgtctgatcaagaactaaaactctcatttctttgtaaccttttgttatgggtttggttgtacatagatgagagttccctaaccatgttaattttatggattggttagtgtcttcatgaaggggctcttgtttttgttgcccttacctttgcatttttgctttttggcgtcctctgtatttgacttatgtaccttggtgcgcttttttctaggtgttgcttttatttgcctatccaaaaaaatttgggtcttgacaatggctggacattgctgtagcctatgcttctgagcttgatttggccgagctcagcattacttggaaaaaaagatagaaaatatgacaatgactaaaacataaactgatctttgatgaagacgattttcctagtagttttgagaaaagcattgttcactttggagaatattttccagagaataagattagcttgtactagataaattataattggattatttacagtggcgaccatgaagccatgatcttctgatgaaaatattttgttgggtcaactgggaactcctcaattcttttgttttgtatttttccttgatggtttgctgctaaataatttaattgagtttgctaattgccttgaaccatctcatgggtttgatttttcatcttaaacctgtttacccatagttgttaactcgtaaaatgtatcatctatcgtttttctatttttctatattgtatattgtatcgtatagtgtatcataagtgtttttatatagtgaaaaataaatagaaaaaatatagatgtgtgtatatttatagaaagtatgaaatacacaataatatatgatcaatattatagaagatattaggatctaaagagttaaaatatatcatatcatatgaaaagattgaatgttaaagttttgaaaagttcaaattaacaaaataagactttgatgtatagattcatcacataatccataaaaataaacttcttcaatttttagctatgattttttgttccaaattgtagttaggcatattgttagagttttgataagttcaaattaacaaaatatgactttaatatataaattcatcacataatccacaaaaatgaacttcttcaatttttagcaatgattttttgttccaaattcttcaaagttctagcttcttagatttgtcatcattccttttccaccaaaaaaggaaaaaaaaaaaaagaagcatatcaagtaaaaaaatttattcaccaattaccatcattttcattgtcaatacttaaaccattcaaataaaaattctctaatattcattgtaaaaactaacttacttgacttctaatatagcatttgacaacaagaaagtagatttttaaaggatggggatttctcggtgaaatctttgtataggactatgcagccggggtctcctgcttttttcccttcaaaaattatatggaactcttgtgtgcagcccaaattgagcttttttgcgtgggaggcttcttgggggagagttctaaccttggattgcttgcaaaagagaggttgggttatggcaaatagatgttttctttgccataagagtgaggagacaattgatcaccttcttatccattgtgaaaaaacgagggaagtatggatggtgttcctttccttttttggtgtttcgtgggttttcccccgttcggtcaaggaaacccttttagggtggagggggtcttttgtgggaaagaaaaggaaggtgacgtggcaattgggactgttatgcttgttttgggttatttggaaggctagaaattcaattgcatttgaggattgtgagccgtccattcaaaggctgaaagcatcttttgtggttggaatccaaattgtggataaaagatggtccttcgaccttaatagattttatagactgaggttcttagtagttggaaaggctcttttgtggggagaaaaagaaagaaagtgtggaagtccatcccgcttttcattttttggacaatttggaaggagaggaataggctcgcctttaaagggggtgtgttagcctttcagaaattaaagacttcgtttgtgtataatttttggggttgggctaaagtgtacattgatatggagtcgaattcccttataggtttcttggagtggatagcttccaagtaggggtggggttcttttgttttttggttaagggtttgtagccttgtatactccctgtatgctctttggcttttgccttcgttaatatattcgcttacttatcaaaaaaaaaaaaaaaaaatagattttatagactgggtgtgtatgcgttaagggagaggtttttttgttttgccttgtcctttgatgtttgggcccttttgtaagggggtaagtccctttatactgtaatttggtgggtcgcttctttagcgcctctttgcaatacaatcttatacttattgataaaaaaaaaaaagaatgtagattttcatataagattattttacctatttctcatttttatgataaatttttaatcttttagtatattttaaacaattaatataataaattcttttaataaaaaataattaatttgatttcttttaaaaaaattatagaaaataattaaagatgtatgtattgttgtatcataatattacattatattgtgtatcatatatctgttgtgagatacactttaaaataagtatggattgtgatacatatcgatttctataaaaaattgtattgtatcgtgtatcataagtttttaacaactatgtgtttacctaatttcacattgtttttttcaagcaagttatatcatgtttcagttgttattatgcccatggatgatgggttttctgacccatattttcgttgtcaattatggatttgttttgcttgagcctacttggcaaagatgctaccattttttcctttgtttctggagacagacatgaacaacacctacccatatattatgcagttagagttttttgacctaggagcattttgagtaccatctatatatcctactttaataactacaaccactgggaataattcttttgataggtacaactattgtgaatggttttagtttatatgaaatttatgattggctcccaatttgtgaaacatgaactaaaaaaatacaatatagattttgtttatgtaagtgattctgcaatactgaacaatgaatgatttgtgtgttgcattatatctgatttcatgtcttaagtgtaccattttccttatgcctctaatacatgccaaatgagattagtaaacaggtctttttgcagcatgactgtaagtattcatttatgttcagttgttggtgctttaatttgtgtttgtaattgtccttcggtcctcaaagcacttcctataacacactgtgaaattcctttggtgttaaattttttgaaatgtttgtttgcatgacttagcatgaatatctattaaatatttgcctattgtaagatgttatttttattgtttcaagccttgatgttatgtctctacaacaggcatatcgagcaagc

SEQ ID NO: 13110 - DNA, 6946 bp, Vitis vinifera
  Intron number 1 from transcript GSVIVT01030026001 (locus G SVIVG01030026001) derived from phytozome v7.0 (chr-ID chr1 2; pos 8991147 to 8998092 reverse strand)
atagttttttttcggttttaagggtatggaaacaaaggattatcccaaaagacaaacaaagaataaaatgaataacaagaaaaacttatcagctgaggtatgacaaacactgtctttaaaatagatccaccctactcaaagacgaactcggtgcactggggtaccagtggtttacctccaagatttaataatcagatctcaccttgagtgtactttgtaagcgagacgtgtacaactcgggttctgaaaaattcctccagatagatgtatgaaagactctctgaaaaactctctgaaaaattcgtattcatatttagagagcgaggggtgatctacttttataggctactaacacagtcccaatgagactctacttgtaatcagaatatgactcaaagtgaacgagattttacttataagtggaacgagactccactagtacaatcccaataagactcttcctaaaaaataaaatactaatagaataagataaaataaaataaaataaaaataaaaataaaaataaaattattttttaagtttttgtaaaaattagccaaattcgctaatacacttttttagatttatagcccttctacaatccctcatagagtgtagatgtgaaagaaaaaaaaatggaggaaaaaaaaaatccaatgcatcagtactagtgcctaaaggctatgaatcagtcttaggacaaataagtattgaatcacaaaatacggtgaaaataaatttatatgaactagtgtttcttgatggaactcaagaaacttttatccacattggttttctcaacttcactaccagttgtacaaaacgggttggcacaaataggccatgcgccctacttggatattcatgagagctctagagaatctacctaagttctcataggtaggaagcgaccccacctccactctcacataggtgaatccatcaagtatgttatgcatttaaacatacaatccataaggaacatggtatttgtgaaaccaaggtttggttaatcttgattttgatgataataaaacaaggtttagaactaatgatcatatttcaagtgtgattaggcaagacgacttccaaagtgacaatccaaagacaaatcaagccaaggagaaatcatgaagaaaaaagaccacctcaaagagaagagtttttcaagaccaaagcttcttaagatctctttgtaaggttgttggtgcactaggactttcatgcatttcattatttatttatgcaccaaaatcatccaagagtaatattgttttaaatatcttaaggattggatgatttcatattttgaactaaaaccttgtgttaaatgattttcaaacttgtgttaaaaggttttaagttgaaaaaggttgagtgttgagccaaaagaatggctcaaccggttcaactggtcgaccggttatgctcgtccggtcgaggaccggttgagggagccaaaaagtttctctctctcccagtggcttactcttcccagtcaaggttgaacctcaaccgattgaggtccggttgaggtccaacggtcacttttcctaacggctagtcaaccggtcgacccctagctcgatcggtcgaacccccaacggctagtatgacttttttcttctataaaaaggctccaaacttcattgtttcataagcaaaaccttcccaagtcattcttgattatatttgagccttagaagagtatttttgagtgcaccattattccaaatcttgcatatctttagtgcaccatccaatcctagtttctcttgtatcatttgagcttaaagttcttgtgctaggatttttgagagatcattttatttgtaaacctttgaaaggaagtttctcaagtgtgaggtatcacttgaggggttgttcaagagtgggatatctcttgaagaagtgtaaagggtacttggagccaaaagtccaagagggtgaattggaaccataatccaattgtaaagagattgaaagcttggttgaagcttcaagatagtggaaccctcactcggttaggaggttgaggagagtggacgtaggcaaggaagtgccgaaccactataaactctcgtgtttgcactctctcttccctaactcttttaaattatatgcaattgtgtttagtttgtttattatatatttgcatataattgtctcttatttttgcatagtttaaatttgtgaaaaagagaccatcaccctattcaccccccctctaaggtgattaccataggttggattagcctcaaattcctaacagtattcattaaaagtaaacactcaaccttaatcaatgcagaatacaatctatctacaccataaggatagaatgtcatacaattaaagttgatagagcacctcaagtcaacaagtgatttgttattacccatatgaacctacttcatggagtttccattctaataggttgggttgccaccactcttgacttttgtaataggcataagccccatccccctcgatgtttcttccactagtttcttatttagtggtttggtaaaaggattggcccaattcaactccaacctcacaaattctagggatataacccctgtttcaagcaattgctgcataatattgtatcttaggtgtatatgcctttttttcccattaaatattttactcttagccttagcaattgcgacttggctatcacaacgcatagacacagacggggctggtctcgtccataaagggacatctgctaagaggtttctaagccacttagccttagaacttgtcttttctaaggcaataaaagcagcttccatagcataccgagtaatgcaagtttgcttgacaagcttccaagaaactgcacttccaccaaggatgaaaacatatccacttgtgggttttatctcatctaaatctgagatccaatttgcatcactaaatcctttaaggacacttgaaaatccactaaagcacaaaccatagttaatggtgcctctcaaatacttaaggactctacgaacaacagtccaatgggtcccaattaggactttgggtgtactgactcaatctacctattgcataagcaatgtcaggcctggtacagttcattagtacattaggctccctatgatttgagcatactctatttgggcaatactatgttctctattcttctttagttgtgagctgagatcataaggagttgacattggtttacaatcaaagtgttcaaacttccttaggatcttttcaacatagtgctcttaagaaagtttaagcacattaggtgttgtagttattttaattcctagaatcacctctgcctttcctaggtctttcatatcaaacttaaaacttaggaatttcttggtctcacacacaacctttaggctagttccaaagattagcatgtcatcaacataaaggcagatgactacacatgtgttatcttcatacttgatgtaaatatacttatcagcatcattcatggaatatccattagttactaacacatgatcaaacttgttgtgccactgtttgggagtttgttttaacccatatagtgatttaataaacttacacacctttttctcctttcttggtactacacaaccctcaggttattccatataaatttccttttccaaatccccattcaagaatgcagtcttaacatccatttggtgtatcaccaaattatgaatggaagctagagccatcaatactctaattgatgctattctagtcacaagggcaaaagtgtcaaagtaatctacatcactcctttgtttaaagcctttggcaactaaacgagctttatagttctctatggacccattttgttttaactttcttttaaagattcacttacaaccaatagtctttgcaccaagaggtaaatctactaactcccatgtatggttatacatgattgattcgatttcactgttaatggcctcctactagaatggtgcattaggagaagttaaagcttatttgtgggatctagggtcctcatctaatagaaaggtgtagaaaccatctccaaggtttgtttctttcctatcttttttactcattctaggttcaaatttagaaggttcaatagacttgtctttacttgttttctaaacttgttgttcactatttagtttcataggaaagatgttttcaaagaaacctgcattctttgtttctaatatagtattgatagctacaagaatgtttataagaaacctatatgctgcactattctcagcatagccgatgaacattgcatcaacggttttaagacctagttttcgttttttaggtttagggaaaagaactttagctaaacaccctcacactttcaggtatgctatattaggtgcataacctttccacaattcataaggagttttaccagttttattgtaaggtattctattttgaatatgacatgtggataggataacttatctccataagttcaagggtgctttgaaattaccaacattgaattcataatttcttttaaggtcttatttttcctttttgctactccattagactcaggggaataaggaggaatagtttcgtgaatgatcccatgatcttcacaaaaaaaattaaagaggttggactcatagtctcctcccttatcagttctaagccttttaattttcttacttaattgattttccacttcatttttgtacttgacgaaagcatctcttgcttcatatttgtttctcaaaagatatacccttgtataccttgagtagtcatctatgaaagttatgtaaaatcgtttaccacctctagtcattatattttttaggtctcctaagtcattgtgtattaaacttagtaaatctgattctctttcaactgattttcaagattttttcgtggttttagattctacacaaaattcacattttccatggttttctaaagacagtttagagattaaactcaattcaaccattttcttcatatatgaaaagttcacatgtcttaatctaccatgccaagtatcataagaagcaactatgtaagtagaagaagaagatgcattattattgataatataaaaaacattcaacataaataaaccctgattacaatagcccttcctcacaaatgcatcattctttgttaaaactattttatcagagtcaaacaagatcctcatttctgctttcccaagcagagatactgacaccaagttccaacggatatttgggacatgaagaacatcactgagggcaagcacttttccagaggttagcttgatgagaacttttcctttgccaatcactagagtagatctagaatcacccaagaccacatgttcctctcattttttttatagtggtataggaagtaaatgcacttctattcccacaaatgtgcttggtagccccagagtctaccacctagtctttcatattggtgaccatgctcaccttagaggagattactgctatgatcacctctccctctgctagatttgcctttgaattggacttcttagttctcttcctatggtgacattgagctgtatggtgtccaggtttgccatagacaaagcatttaccccgttttttaatagttaagttttggaccttatttgatgcattgggcttggtcctagagttttgctttctggttctattgtttttgggtttaggtttttcttatactacattaatcttagaagacaattccttagctttctcaacattgtccctatttcggtttcgttcctcaatcctaatatggattatgacatcttctagggacatttgtttccttttatgtttcatgttatttttgtagtctttccaagactctggaagagtctctactaaataaccagccataaaagattcgggtaatttaatgtcttcaatagctaagtcattaatcaacaagtggtagtcatggatttgagatgatatatctctatccttgatcatttgaaaatttctaaaattccttatggcatatttatgagttcttgcatattccaaaatatgttttttattcattgcatcccaaatttcttttgcaactttaaattgacaataaatataaaaaagttcattagaaagagtactcagaataacatgcctaacttgtttatttccagtttcctaggttggtaatagatgagaaccatcttttggttttaggtcagtcaaaatgtgtcccaagttcactacatcaattgcaaagaaaaccttttcctgccatctcttaaagaatgtcctgttgaagggatcaattttagaggtgtcaggacaggtgtgaactaggaagcttccattaggaaatatttcaagattgttggttttaagggtatggaaacaaatgactagtccaaaagacacaaacaaagaacaaaatgaataagaagaaaaacttatcggctgaggtgtgacaaacactgtccttgaaatagatccaccctccttgaaagcgaactcggtgcactagggtaccagtggtctacctctaggattcaacaatcggatctcgccttgggtgtactttataagtgagacgtgtatagctcaggttctaaaaaattcctccagatagatatatgaaaggctctctaaaaaactctttgaaaaattcgtattcatattcatattcatatttagagagtgatgggtaacctgcttttataagccactaacatagtcccaatgggactatacttgtaatcagaacaagactcaaagtgaacaggattctacttataagtggaataggactccactatcacaatcccaataggactcttcctaaaaaataaaagactaatagaatagaataaaataaaataaaaataaaaattattttgaatttttgtaaaaattaccccaattcactaaaacactttttcagatttacactattcctacaagttgaagattttatcagtagaaccaagtctgctaca

SEQ ID NO: 13111 - DNA, 5749 bp, Vitis vinifera
  Intron number 2 from transcript GSVIVT01031440001 (locus G SVIVG01031440001) derived from phytozome v7.0 (chr-ID chr6 ; pos 18554202 to 18559950)
ttttttttgttttttttgttttagttttagtagaggtgtgtttaaatccactatatgatatcaaaccatatgaatttacctaattgctttaccctaacgacttactctccaaaacctataacttcattaatgttcgcgatgtagtaatctccaattgctcgcatcggtctcattgaagggaaacatagcttcaaataactcaagattcaacactttgaatccttcttgactgattgagaatagtaggacaagttaggttgagtgtttcttaatgagttcccctaataaaacacatttaggtaaggtatatgtaggaaaaaaactagtgaaattgatatcaattcggaaatcatgttttactaaaaaaaaaatttagaacttaagagttttaaaaagatttgaaaagatttcatattttaaattaaaaaaaaattgaaaaaatttttctatttaaaaattaaaattttagatccttaatttaaaattccatttcaaattatttttattatttggaaatgtttttctttttaaattctcaatttaaaattctttccaaataattaacaaaaaatttcacattttaaataaaaaaatttgaaaaaaaattctatttaaaattattatattttaaatcctcaatttaaaattcttttccaaattatttttattatttggaaagatttttcttcttaacttctccaattataaacaattaaaatattttaactcaattaaaacttcgaattcaacccaaccttattagaaaaactaatttgtctttactgaaccctttttagacttacctgtgactttcgggttgagcgaacaactttgaatcttcaattaagagtaagtcaccatctaaaaagttttctaagctagaaaataattggaacaaaatcgctatcatacaatatagactcattgtcctaacaatctctccctttagcaattttgtgacaaaacttcattacataaaccccttcaaactctcataatgaagtttacataacactcaattatgctcatctaaaaaggattcgatggaagacaatgcatcaacttgtagtatgtatctcccaatcttgtatcccatgtatatagaaacaatcataccaaaggtaaaacattgtatgagataaaatataatcaaggaagaaaaataagctagtgaggagttgcagttaatgcattgaacattgttgaggaagcaaaacaatattgtaaggaaattttttttctccttaagatgtaaattctcatcatttttaaagttattaattatctcctcattttttgtcacaaaaatgacaaagtatgcacaattgaaaatataaagtagaaagcagaatatatatatatatatatatatatatatgaactaacaagcacaatccatataccaaacaaaataaataaaaaagaaaatatatactaagcattatatgcaacgggtgtaggaggagaagtagatacaacttagagtgcttggagcgctagtgacaacacttgagtgcttgaagcagaattgaaacttccaggttgaaacaaagaccttaaaataggaattttgaaacaaaataaaatagggtataaataagaaagagttaaggaacaaatgagcaaatagcccaaggcacgatcataatgtagaaactcataaaattagactgaaaaataataaaccaagtagaattcccagatagtataagtcaatcaaacaagaatgaagtttcaactctaaagaacaaagttaatcccaattttagtttagaaactcaatgctaattaactaacaatttataaagggaccaatatagaaacataagcattgatgttcaagggaatatggtttactatttggttctatattttgaaattgaactcttagaagaatcaagtcatgtctttggtcaaattaagaacacatctagtcaatttgttttaagatcattggatttctatctaacacaatcttgttgatctatatacaacacaatttaactctcccttaatttgatatcgtatttttctttttcttttgaaagtggaggcattgtacaccatgatctcatttgatttttctttatttttattcgtggttgcctttgtatccactttgggagtgttttcaaatgttgcaagtgagcaacaaatatttaatcttggaaagtatatgagtgttgattcttagccaaggattcaaaagtttgcactaactcacttcgggaaacaatggtaatgatcttagtcaaacaaagtatttggatgataagatgtaggcatgacaattgatccttccaaagaaatcaaaatctactttattaattaaacttaagaagtctccattttgatcaaacacaaggtgtaactaatgttgattctccactgtacaaagatttttaattattaagaatcatgtgcctcaatagtggttaacaaatatttgaggaaaattaacatcaaaacttataaatttgttatatttctctaagtaaaaaactcgagatattacaaatcatgataataagacaagtaatcaaataaaaatcatatgcctaaataagatataaataagacaaaaggaaaacaataaagacaataaagaacaaaactttctaggcctaaataaaaaaagatttaattgattaggcatatgcttagggatttcctaaggaattcaaatctcagagagtccaagagtttggtaaagatatctaccaattgttatttagttgggacaaattctagagaaatgaccttatcttcaactaaatccctaatgaaatgatgacgaatttcaatgtgtttagtatgagaatgaagaacatgatttttggaaatattgatagcactagagttgtcacaatgttattgggattgagcccctaaaaacaagacatgatgtaacaaagttagatttaactatccctttgctatttgtttggtgtattgacattgatttgaacatttagtccatgtctcttacattgtacatgacttgggtgcattaggagttgtacagaagatacaagttatgagttccttataagtagatacgtcatccacaatcagttcatagatttgggcaatctagtagagacgatagtgtgtcacctcattattggagggatgccttatcttggccatcgagatggattttccatggtaagtgcattagtgtatgtgatgcacattagataggaaatgcgatgaatcataatgcaaaactattaattgttatgattcaccaagatattatactacatgtactcttaaccttgagaggatattgagcttgtaccaaaatcaataggagactttaccttatgggtgagaccctaaagtagtcatctattcctatggattgggtcattgttaaaggaggttggtggtaacaattattctcaatagatgcaccatgctatctcacaggtttgacacagttgttcttcctaggtgatccaaaagacatgtaattatgaaatttatagccacaataattcatttaatggaatttgatatatgttccttataactagaatatgtcagttgatcacacaataaatgagatctgtaactcaaggatttgagaggtaattttgataggttataatactaccttgttagattatagacaccagttcatgcgaagtctacatgtagtggatagtaagtcacaagcttgaacttcgtctcgttgttatttacatagggtattggagtacaattgattctctttagtggattattgaatcaactttaaaaattggatttttgtgcaccatactgaggtgctaatttcttataagttttacaaccacacattagatcatttctgttacaagccagaaaactacacaaccttccaatagaggttcattatgaattcggcatactgaggtggggccaattctaatgcttcaatcttggtttatacaggtaatgatcaggcgagtataattgcagtgacaacttctgctggattcatggttgagttttcttgtttcaaaggtcttctgttatacgtagaggcaagtatatttatcttcaatctaggcctaaataaaatggaaaatgatagacattactgttggcataacatttatgcatgatacttttgattacttttagaaactctttggtagattttgagccattggcaaccttagcaagacaatctttaagatcataattctcgttcaagatcgattggcatatataggatgactagttgagttcatgctttgagggctgatatagtccttgagattagtggcatgattgattttagagtttgtttgatagtaattttaagaagcgcttttaactcttttaacacttcaaagttttatcatgtaaatattaaaagtactaaaaatgtttcctaaaagtattactaaacacattctgagagagagatgcaaatgttgcatgaagtgaaaggcaatcttagtgtttcccacataatcatatttatcgtgggcaaaaataaaaataaataaaaattatccacataatcatccttgtatataaaagagatcagattgcgaactatttcaaagtggatttgcatgtgtgtttttcccttttttttttttttttaaataataattattttggtccgaaagtcattgaagtggtttcttgtccaatgtcatcaatcttttcaaattgtgagggtagtccaatccaatggacacgacatcttaatttaacgaatttcttgagccaattaattgagaggactaagcctcatctctccatttaaacaaagaaagggattttcgtacatcttgccagttttaaatatattgatttaaaaaaaaaaaaaaataatactataatttttataatcttatttaatagtaaacaataatttaataccaataaacctttgcatttaataataaaaaaattattaaattaattcaccactcatcatacaataaaaatgtaaaaatggtgatacttatatcatttataattaagaattagatagagttataaaagaagatatataaaaatattttatactctaaattaaattcctatttaaacacacaaattttatttagaaaaaagaaattcaaattccaaatatttttatattggtaatcatcaaaattgagactgcatgctaacgcctgctgacacttgacttgttattttcagtgtttaatcacgccgaaactgacgatgggaggattagattccaaatagattatgtacgcactcctcaccattctcagttgacttgccacgtggaaattgtcttcaaatgttagccttttgtgatcttagataaacaaattttattatttcgttttcatttctaaaatttagagagcgtttaagagtgattttataaaacgtttttaatatttttaacattttaatgataaaaattttcaaatattataaatattaaaagtgttttttattatcattgccaaatgggttcttaatgtatgtatgaatcatgaactttgacgtttccaacttgtccaaattctaaaacttatatttcaatttgcctacccccacccatatatttgcttttctcccaaacgtttgactgataatcaaactttgatttatgacttggcccatgtcattggctcaatagctggaccgtcagccatggcccaaaaaaagaaaagaaaaaaggaacatagtctcataaaactctttataattgaattcatattattaattttatggtatatgcatatgcagatggtatagc

SEQ ID NO: 13112 - DNA, 3385 bp, Vitis vinifera
  Intron number 6 from transcript GSVIVT01028382001 (locus G SVIVG01028382001) derived from phytozome v7.0 (chr-ID chr7 ; pos 6865971 to 6869355)
ctgagaagaaagttaccaaggtgttggatttccttgtgaacaaaatgggttggcagcctgcagttgttgctagggcaccagtagctatctgcctcaattttgagaagagggttgttccaaggtgttcagtggtgaaagttctgttattgaaagggttggtaaagaaggatttgaggttagatcattttctgagtctcactgaggggaatttcttggataagtatgtaatcaaatatgaggatgacattcctcagttgttagatctatatcaagggaaggtgagttttatggagctaggatttggatcttaggagatagtggtacatggcatgaaatgattgtagcatttcaactttacaagcccaagtaattatcattctttctcaagtgttgctatattttcagcacatcagtttttgcactgtcttgataattgtcttaaccaacttctgctgatggtaacctcaataacaatttctccttttcgttttgtttatgattgacaatacatgctgtaagagttcatggagatatgtattcaatgatgaaaataaaaaactagggatgaaaaccccgaagttttgtatgggcagtttctaaagtttggtttgcagactgccctggtatcttgtagtatttatcatcctccttagctccatgggaagtttcctgtagggaactaaaaggtgtattttgttttgccaatcaatatttgaatttagctgaatttactagttttcattatgtttgtagttagtgaaatggtggtttaaccaagtttctgtttggtgttatcaagtctatgtcttttcagttttgttgttcagctcaaagcagaagagcttcagagctttcttttaagcttcaacatggacgagattccaaccaccagctgcaacccttgtcccaaatgattcaacatggaccaattttctacccttgatatttgtattcatctttagttggaggatttcttttgcttatttatttattttttcggttgcggaagctaaggaatgaaggtgtgaacatgagatttggttgagaaagcatcctgtgagtatgaatagtattgataggggaatggatttccatgtgaacaagatgggttgtgacttgtgagacacccttccagtgctataacaaagtctctgtttctcagttttggaaataggatcatcttgactattgttaaagttctctctctctctatcctacaccatttctttactgacgagcattacttagagttaccaagcccttgggtccatttccccaactgcattttttctgtcaacttttttcatgactgaataacagaaattttataaatttttcttatttttttctctttattttatttggcttaggttatgtttggtttcacagagtcatgaatgaagaaagaaaaaaatggtgagaaaaatgatttctcctgtttggtttcattacaaaaaatatataaaaaaaaaatcaaatataattaaagttaattataaaattatacagttttaaattatttaatatttatatataagaattaaaaataagtgaaataaatttaaaataatatataaaataatttattatccgtatattttctttccttagcatatttggtcaaattatctagaaaccgtagtcttaaatttttgggaaatcaaacatagactgattcttgaattttaaatcatatttgttaggattttggcattttgtaaaagcaagttgcagtaattcaagagttatatctaagggtgtaataaatgaaaattttcaaactatatcgaattttgaaatgataagaatcttttaaattatagagtaatttatttcattaaagatttatttttatattattttaatttttaatattcctattttaggaaaaattatgtaaaatagattggtcataaagcttattaaaaaagagttgaaaattgtttccaaaaagaattttgataatttatttaactttgttcaccacctctattttttggctaaatactcccgatgctcataagttcaaaattttataaaatatcttttttattttgaaagagataaaaaaatgaaaaaaaaatgaaataaataaataaataaataaaaagaaccattggaggtgcttgaacttggaaaaaccaaacatcaataagggggttgagaggtatacttttaaactctcttaggagtgttaaaaagtataggatctagcgcttaaaaaaaattgaaaaaaattggaaaaattgtacaaatatatctctagcttcgttggagatgattatttgtttatattgttttaaaagctaattttcttcaaaaatttgttagggttttggagagatggaaaagaagaaacgagggaagaagattaatgggtagttttgggttaacaaattcgtaatttaggttgatataaggagttatttagttggaagcatttctagaaaagagagaaaatccaggctcttgaaaggaaaattttctcgaggagaaggtgctgaaggaacttccggtaaaaggagacattgcttgcagaccggagtccgttcaagattcagagctatacaattttgaaattggtgagaaccagaagcttcctttgcaaatgtgtatcaaatttatctgtaagagaatagggttaatcccaaaaatgtggcaggcagcttccacagcccaactgcattttcttcgaaatacaactccatatatcttcagaagtttctcagcatccaaccagcattctttcacagtgtcttacctcgtaaactcatgtgggttgtccccagaaactgctatttctgcatccgggaagatacgctttgaaaaccctaaaaacccagattctgttctcgctcttctcagaaactctggatgtaccaacacccatatcaccaaaattgtaaccaagcttccttcactgcttttggtcaatcctgagaagacccttttacccaaactcgaattttttcgttctatggacctttctggtgctgatcttgctagcattctctcttctaggccaagtatcttgaggaagagcttaaaaaatgttctaattcccaagtataatttcctcaagagtctaaatatcagtaatgaagatgccgtgaaggttcttaagaggtcatcctggagttctagtggaaatctggagaggaccatagctgccaatattgcagttctgagagaaattggagttcccatatcccacatctcatttttagtggcgcgttatcactcaatcggccaaaggagcgataaattcagtgaaaatgtcaagacggttgtggaaatgggattcaatcctttgaaatttaccttcctgaatgctctccaatcattctgtcaaatgactgaatcaactcggcaacaaaaaatggag

SEQ ID NO: 13113 - DNA, 2526 bp, Vitis vinifera
  Intron number 4 from transcript GSVIVT01030738001 (locus G SVIVG01030738001) derived from phytozome v7.0 (chr-ID chr1 4; pos 14857334 to 14859859 reverse strand)
agtctcgtctagctgctggagttatattggcggaggtgaatgagatagatctttacatatttgcaaattaaatttccatatttgtaatatacagttatataggcccatagctgtttgacagaaacccaaaaataaggtacgattcttaagaagcagcgcacacattagaaaagtagtagtgataagttttgaatttatttaagccagaacctaagctcttgttgtgaatggtgtaaaattaggagaatttagttgttcttggcatatttatttatttcctgcccggggaattgcattaaatatatcaaacaggtggccaggttcaaatacaaattcccaacaaaagtaagttttccagatttcaaatggtgttttccttctttccttttttttttttaaatcttttctggtcctggcctcttccctttttgcgacagaaacagttccctcgaaagatttgagtgctgacgccaggcacaccaaatcagtagcatacttgtgaacaaatagctcttccttcccaagtgagactcacacttcaattggttaacctataatttgggcattatagtcctcccacccccttttgatggtcttccacacacccaccccatatcttttcctcactccgtgagagctacatgccccctttttctccccatgttttcttgtaatgacctacttccaagagaacctttctcacaagcaaatctctaaccccatttgttgagaagagtcttattaagaattgatagacttctaatatccaagcccccactcctcttatccatgcaaactatcacaaattctcttgatttttgcctttaggagacttctttcattagtgcccacttattttactcctctactacctttctcctagcctcatttactcatttgaaagaacggtttccctttctttagcatctcaaaaaccaatctgatttagagctgcagctttattggtagtgacaatcccaaatactctccattctaagattttagatcttgtttcaaggctttcaacttggtagctaagatgtggctatatgatcccctaatggtatagcttacccaccaatttctaactaggtgtttgaacccttccactttctgctacataatttcaaaaagggctattacccctcgtcatccacccctcccctctctccatccagtaaattggagtgtgattggaaactagttttggcaaaaaacacagagtcaaaccactaaaatgattctcccattctatagaaggaaacgatccaatctagatgagaactgattagtcaatccttcactccaagtaaaaggactggtcacccatgggaggtcccaatgaagctcctatatgatcttataggtttccttataggcaaaattgtatgatggtgcggagtcccgttcccttataggtttcctggagtggatagcctccagttgagggctggtgggttttttgttgtttttttggtcctttgttgtgaggccttcgtcgcctcgtatactccctgtatgctttgcggcgtttgcctttgctaatatatgtgtgtttacttataaaaaaaaaatgatcttagaagaatgcctcattaatgttgaccttctcaagcagttcttcctttcctcagggaatctgactacgttgaagtttccactgatacatgatgggtcttcccaaagccctgtaatattacacagttctgcccacaagctctctctctcaccccatgtaggatcggcccacacacccttgaaaacattcaaacgaaacttttgtctctgtttttgaatcaatgagagattggaaatgccccccttccatatcaattaactccaacaccctattgtcccataagaccaatatcccctgtgcttgacccctatcttccacaacaacccattccaagaacctacccacacccaagcaattccttcttgttatacaatctatgaacagtattccagaggcacttcaatcttcacaaactttcttaaatgattccttgttggtacttgttgatctctttctttggaaattttgctttcataaagaagacgatgtttaacctactagagaaatgaagagaagcttgataactattgatttattgacaaaatttgacaaattttgaggaggtagtgttatcattagagagttaatgaaaatggaatggttgaacaaagttgagtattagagagattaaatttgacattcttaattatgatgttagtgggtagttaatgaattatgcatttgaaccagaatttctaacagacgggaacagagaatccatatataattttgaagacaatgattcagtcctcatgtgaaaaaaggtgttttgctcttattttgtagtagttttatatttatatcatacatgccattagctcgatgtatccatgcaattttgaaaaaaggtgttttgctcttattttgttgtagttttatatttatatcatacatgtcattaccttcttacagactcaacaaccagagttaataaccattagttcctc

SEQ ID NO: 13114 - DNA, 14733 bp, Vitis vinifera
  Intron number 3 from transcript GSVIVT01017443001 (locus G SVIVG01017443001) derived from phytozome v7.0 (chr-ID chr9 ; pos 8584513 to 8599245)
tacgataaggtcggaatcagggttcaaagtcgcggtatcggtcatttgactcgggagttcctgaggcacatcggtcccggtatctcggatcggtatcgggtgatacgcaaaaaaatttaatttaagagctcaaaataatttttaaaaattatgaaaattattaaaaaaataaaatacaaataagtagagtaaaaaaattaataaaataaacttctattatattaaaattattcaaattataataaaagcatatttttgggatgatttataataatattaaaaatctttaaaaatattttaatttaattacttgatgataaatatttcttattgaagatgaaaataataaaaagtaaatttttttaataaaaaattatttaaattaaatattttgaattttttttaaaatgttttcaattattaaaaaaataaaaccatgattcatctttaaaaaaataaatataatttttcttataaaatgtattcattaattttaatttttatataaatatttatttgatataagtctaatatttattatttattttttatcattataatttttatcaaattatttaaaatccatatcccatcaaatactcataatctaattaaaaaataaatacaaattatttaaaacctaaatcctccaaatacccataaccctccggcgtgaaatggttttggaaagcgatttgagagtgagttaggacagcatgccttcggtgaaaagcttggccttgcccctctggattgtggtgcctcaacaggtgattgtagaagtgggatgtcagcctacatgatcaccggaggcaaatccttgcagaagttccataacacagtctgtcccgactacaaacccatcaggaccgtcgatgataacagcggtgccgaagtccggcgactctgctcctcatgtcgctcagatccatctccggcgggaacttgggcgatccgaacaagcaggtgtgcttcttcaacctcgccggcgactccaagatgcaaggttctaactctgtatttttcattttcctgggttttgatcctctcatctgatcttctccacaatttctactccaactcgggtatcgatccggtaccggccatggtcgaggtggatacgactcggccgagtcgtaccgatctcgaccgagattttgaactgataatatattttctatggattgggtcactattaatggaagtcaatagtaataggtattcttaatagagacaccatggtatcttatggaattgagacaaagtgtctccttgggtgatcctaaggtattgtgttcatgtaaactatgaccatagtattttcttaagcggaacttgacataaactcttagagagctaagatatgtcagttgaacacataataagaggatttataactgaaggatagtagaaatactcttaaaaggcttagagctttcaccttgttagattacaaacactaattcataaggagatcgtatataatggataataggttatggaccctagcaattagtgtctcattattatttacatagggtattagagtgcaattgattctttttagcaggatgttgaatcaacttcataattggattatgagagagttaataccattttatgggtcttaatggtcctcactcaagctcatataccttgatggcaccatctataagagtttgattgactattggttcatttttatgcataagggcattttggtaattacataaagttgtaaaagagttagtggataaagtctttggattgtactaattgattcgttagaaggccttatgggattaattaatcaattaagaccaatattgggatagactgagtgacctaaacctttgatgggcttaagtcacttaagccacttaggaaccttataaatatgccctagggtagggttacaagttaattgttttccattatctagggagaagagagaaacctagtctctatcctccctaaccttcccaatggttgagtaccaagtgtaaggttgagtcattacgataaaagatcgtgggtctatgagactttttgtgattacaattagattctttttttaatgcaattgatttgggaacatctaaatcaaaggtaagcacactaatcttaacatctaaatcttgtttttatttttatttttatttttttatatgtgtttctactatccttaggatttagagaaagcctaggaagatttgcttgtagctaacctgatttgggtatagggaacaaagagatttgagattccctacgactggtattagagttataggttagcaattggatgttaaaacctttctagggtatgttaatggtggcttttttagggtattttatttatcttatgaccctagggataaattatgtgcatgttaatatgatgattatatattgtgattatcattatgattgttattaggattaatgtaatcattgggattctaatttacttttcctagatgggttgtaagcaccataaagggcataggattttttgttgttatgtaaaagtcccatttttcttagacacccccaaatgcgaatgtgtcgcaaaataggtttacgatttatccacatctccatagaagtcaaaaggtactgacttggaaagcactaggttaaataggtaagttgcagtcttagaggcatatccctaaaagatacaggaattgatgagaaacccatcttggatctcgccatatccatcaatgtttgaattcttctttttgctactccatttttttatggagttctaggtgcactcaactgggatataacttcatactccttgagaaaaaaatcaaagtgggtggacatatactcaccacctcgattggctcaaagtgccttgatatgtttacctaactagttttctaattcctccttaaattcaatgaatttttctaaggcatcaaatttcctatgcattaagtaaatatatctaaacttagagtaatcatttgtaaaggtgatgaagtactcataccctctcttggatggacattaaaagacccacacacgttagtatgcactaactccaagcacttcttggctttatatcctttaacaataaatggtctcttgatcattttactttttagactagattcacagactaaaagatcattcagaataaaaaagtgcaatattctagactcaaccaatttttggattatgtttagattaatatatatgacctaggcataactaccaaagttgtgtttgattagtgctaggttcatttcttttaagtgagatacaattattctcattacttgatagtagtgataattgagtcacacgataaaaattatcaaccaattatcttgagcatataaatggatgattccttttaataataacttatttattgaaaaggattgaataatttaatttacatagactagaaactgaaatcaaattctttctaaactcaggaacataaggacaatctttgagttctataattcaattatcctctaagataaggtaatgtctcatactgcctacacatcctcacatcaaaactatggtcaggtatatgtccttatcatttagtctttctttagttaaaactcttataaagaattatagatatggtcactaaccttggaatctatccaccatgagttggtagaatccaccattaaacatgattaaactaaaagtgaatgaaatgtaccttcatttttctttagctggttagggcttttcttctttgagtgacccttcttgctataaaggaaatacttgtcctttcttttactctcacatttcccagctttggactttccttgtttagtgtacttgaaatttttctttttcttcttattaaaagatcttgaaaaactcttggctatcatatgaacacctttaggatccttgagaatccccttacctatctaaagttccctcattagttctagcaagctcactaacaacttattcatagtattgttgagcttaaactacctgaaggaatttgaaaatgtctttaaagtcatatcaacctaggtttcttaattgatcttaactccaaggatctccatgtcattaaagaatgcaaagatacaaaccatattatctctaatgagagttctttttgtcatcttggtgttcacaattatcttaagggcgggttttttaattgacttgcccctttcaccaaacatttcttacaaattgaagagaatctcatgagtagtaacagtggacatgtgttattgttacaacacattatcaagagacctaagtataaaataacaagccttctctagctcatttgccctttgccgcttacaatgggcatttttctcttcctacatggaatagacaatgattaacatactttttcatagtgagaccactttaggtgattcaaccacttcacattaactaagatccttgacatctgtgtaactaggtgatgagttccatgtttaggattggtcattcccactataaacatgtattgtctttcccactaaggatagtccacatttctagattccttatgtcaccccattttcaagatgacaatgcgctcaaaatcaagatggacttgatcatggaatatatgggtttgcttatggcactctcgtactcaatattttggaataagagacttattttaatgttggtaattttctcaaaataaattttttatgatgagaatctccaaattatttatttatttctaaattggaatatttgtgctcgtctatttttgtaaagattaaaataagagaatatttccttaattaagaatattttaaatccttgaagatctcaaattttaggaaacttggaaaaaagatcttctaaggatattgtgaaaaagaaaacttgattctcttatatttcaaaacaccttttcatagaatttttttttttttaatttggtaaacttccaattttgaacaaaaattttatttgaaaattacttctcatgaaaatttactttccataagaatatccaaaactaccatttttaaattattttaattaattccaaatttcatgcaaaaacaatatcatgctaaataaagaaataaaataaaataataaaaaaaactttctatggccttagggatcctgttgcatatttggtaagctaaaatattagattttttttttaaaatctaaatataccaaaaaatacttgcaacaaaaactaggttgataaaattacaaaaaccttaaaatacccagaaaaccttataaactattgctagagacactcaagcactagatgaaacattgtaagggcacttaggcacttgacgattgctcaagcggttgaataagtgctcaagcattgtcgccactagtgctattctgagggtgaatcaaactctctttggtcacctttccatcataaaacttacctttttggttggggatcaccatagatgctctgtgattggttagattgcctcaatgctctcaatgggttacatagaatgatcaaattgcaaactttttacatttgaaaagcaaaaaacctatgttttttcaaaccaaagcttacaaccaatcaatgaaaataaaaataggacttttacattctaataaaaaaaaatcttataccccttatggggttcacaacccttatagagaaacaaaatcaatcaatcaatccatttaacatccaatatatgaataatcaataatcatttgttcatccttttgggccatgggatgaataaacaaaccttacaaaatagtggttagcacatcctagaaaggttacatcatgctttttccaaacctagggctctgatactaattgtatggaatcctagattattccattcctttacttagatctaattatatgcatccaactttcctaggtctaccacatcctagcaatagaaggaaaacaagcataaaattttttcaaggttctttgatctttttaatctctatgtaaaagaatctatgtatagagaagttaggaaatctaatttatacatagactttttaatttgaaaacaactttttaccttatcataatatttatttttaaattaattttacaattaagtttgagatgttgtagtgaagatcaagcaaaattacataaagatttacatgattttaatgtaattcaactatacatatatttacacacacacacacacacacaaagagagagagagctccttgtaagtatatcatgaactatgagctcttattctatcaagtgtcttttactcttttccacatctcttcctacttaataaatatttgataggattgtctctatttcataactttttctatcttattttctagaatttttctagagatatgtttaccaactttcctaattttacatggatatatatttttataagaaattttcaatacataaatgattttgtataatattcttttaccaaaaactaatatataccaaagaatttcagatatttagtagtacaacatattatttttgctacctaaaagttaacttttacttttatttctattccaattttttttttaaattctatatctaattttacgaccattaaaaagcacctatcaatcatatctaatttctaaatccgaaataaaaaatttatttagttaaaaaattttcatccataaccaaaaactaaataattcatcctacaactcatttctaattttttaattttcaaaaatattcttcttctctcatttctcacgcatttattgtaacggttattaaaggaacacctagtaatctttattctttgttcaatactaatcatatggattaattagtagcatatcatttttccaacactcaacatccaaaaattaatttatttctaatttctataaagagtgatgtgtaataggacatgattactaacacattgagagtagttttttaaggttgaaagtttgacttttaattatgtcctttcttatagttttcagtgttagggtttctttaatttatgtagaacaattatccataacccttattcccaactcttataacattatgattttgataaataaagtaaataattaagaaaccataccttgatccatgagattgatcttgaagaattttttttttttttgcagagaagaataaattaaagaaacatggtttctctctcctcacccttttagtttgatgtacatttcttgatggaaagaaaactgtatatatattgggtagagagatgaccaaaattaaaataaggtttccttatttttcgtattccatcaacgtgaacagttatttagaaaacatctcctcaactgaccaataaaattttagcccttaatattattaattacaattatcttttaagttcaataaaagataactaataataaaataagcctaccataattatcttttaaattaaataaaagataattaataataaaataagccacgtgagccacattaaaagaaaaatataacatactcccacttggcccatgtggcattatgacagtttaataataaaacatgatatgcataatataagctaaatcctttcttacattggtcacataataaatcatcataagcaaaactaataaggatcatagcagtcatatgtctttatattggcatagtccttttcatgtatcacatagaacaccagaaccaataaaatgattatgcttaaacaaattgaaacatcaatttctaagtttaaaagggtatccaactgtataaagtttagacaaagaaactaaatttatggaagcaaaaggaacataaagggtctggaaaagacataaatgaagtccaatatctcaaatcaaaagataagttccaatggcttcaattagagctttgactcaattccctatgaagacaattttttcatttggatttatggtttgggtcataagaaatccctacatcgtattggaaacatgagtggtacaactagaattaatccaccaagtattataagaacttctaccaactttgatttgaaacacatgaaaacactagacttaccattcttttccaaccatgtcttatgttttagatgatctttttaatagcatcaaggctttttgaataaataacacttatcattcttgtgttccttcttgtggatctgggcaaatgacacattaaccttatgtaatccttgcttgccctttccattattctttccgggtttctttacaactccttgttgacccatgagattaattgaatgaatttgtttctttagcctagactcctcttgaatgagcatattatgtaattcatgcacattccacttaaccttaatagtattgtaacccatttagaatggggcaaactaagaaggcaaggagtttataatgaacttcacaaggaagtttttattcacttccattccaatggatttcagttctactgctacatttttcatctcgttgacatgctcatatatggtacatgaaccatcaaactttatggtggttaatgtacctaatgacttatcaatagagtcggattgagattgttcttccacaaatttcatatattcatttttcaatcttaggaattgtggacttgatgttgtttgctactatcatttgaattaacattaggctaagtcttcttaatctttctcaagtcgtatggaaagacctctattttatgctgcttgaatcagtaatagtgctaaatcaatatctagaacgcctaggtgaaactggacttgttcacactacttagagaaattaagcccattatacttcaaaatagacgaagcttgcgaatgaagagaaaaattagcaaatactgcaaatacatagaatgcccatacagtaatgctttgagtcataaacttaaacatataatatagatttagatattaacattaacataaacgctaaatgtacattgaagttctcctttgggtgattcaacaatgtacaataataaacataattgatgcttaaatttatttatttatttatttataatttacaattatatatactctaacttgacatgttttctatctttggatatactaaacatatcaaataaaatatattaattaaccacgaccatgttcttgactataaaattaagtaattaaactttgggcgatccttaaacattttataattaataaacttcaatatgcttagacaaaaacaaaaatatatacatatcattatgtcatctcatatatagcatcacataattatgatcagttgaattttattcaatttgagacctatgaaaactttctaatttagccactttagtgattaacaaaattattcatactatagttatcaaattaaataacataaagctttaggtttctatcactttagtgattaacaaaccattcataatatctattcaagtcgtgtgtgtgtctatatatatatatatatatatatatatatatatatatatgtatgtatgtatgtatgtatgtatgtatgtatgtatgtatgtatgtatgcatgtatatatgtatatgtacacacacatcactcaaaactttatgtattcattatgtagctatcacagtaaaagtgaaaacaaaaacccattcacataatatattggtacattatatatcatccaattctcttaacgatttttttatcgacaaatatgcataagggaatcaaaatgaggatttgaaacaaacttaaaaatgataaacaataatatacaaaataaatcacatcaacaataattattgaatagtcaattaataaaaaagcaaggcatacaaccaatttgcaaaggtacgccaacacaattgaagcaaaaaatatcaataaattcaatccttttgttaaaagatttgatatcataagagagaaacataaaataatctttggaggaaaatcacaagtttgtaaaccatgcgctttgataccacatgttagggtttttttaatttgtgtagaacaattatgcataaccctaattcccaagtcttagaacattgtgattttgacagatgaggtaaataatcaagaaaacataccttgatccataagattcatcttgaagagaaagttctttgtaaagaagaacaaattagagaaacttggtttatctctcttgacccctttagtttgacgtatgctgcttgatagagagaaaattgtatatattgggtagagagagaaccaaatctaaaataaggtctctttatttctcattttctatcaacatggacaattatttagaaaacgtttcctgaaaaaaccaattggattttagtacttaatattattaaccataattatcttttaaattaaataaaagacaattaataataaactaagtccattgaaaaatcgcaattccaataggaaacacctagagaggggtgggagggtaggggttgggggtgaatgggtgatttcaaaatttttcaataaatattaatatattatacccaattcttttactttgcgaggtgttaggaataatcttttctattatatagaatatcgaatataaaagatataaacaatgagacataacatttttacgtggaaaacccccacactaactgtgaagataaaaaataatgaggtttaagacctactagctaatctaaatccattatacgaaattcagttacacaaatttacttgatcactttattataaagacttactctccaatacctataacttgattcacatcgacaatgcaacaacccgcaattgctccagtggatcatttcagcctcatcaaagggatgaaggtcttcaaaccaagattcaaatatcaaatcttttaatgagagatcgagattaatggtgtgacactttagactctctcaagaaaaacttttctagagaatgtgtgacctcttttcaaccacttgatgatctttgaccctttaggggttaatagggaggtatttataagcaaaaacctgaagagtctcttatttagaaggtttctcaattgaaattgtgtgaaaaactcgatagaatctacatgaccgctcaagccaatttatccacactaccttagatgcttgaacaatatggctcgcttgagtggtcctgagtgcttgagtgcttgagtgctctaggccacttgagcagtcctattctatttcaaaaatcaattttaaatcattttaaattcaaaacaaaacttattctcttaatacctcaacaaagcctaatttgccacaagctaaacctctttagacatccctgtaactttccaattggacaaacaacaacctttgatcttcaatggagagcaagtcactatttaaaaagacttctatgatcaaacataaaaaagaacaaaatttccaacataaaaataagactcaatgtcctaacacccaccataattattttttaaattaaataaaagataattaataataaaataagccatgtgggccacattaaaaaaaatctaatattttcattatttcttttattctattaatagtaaaatcataatttttattattttattaatagtaaaatccatcatgaaagtaaaaaaaattaacagaaaggttacttttaacacatgttggtacaattttttattttttatttttccagttttggagatcaaaatgctaacaaaaaaaaaaaaaaaattcaaatttagggtttcaaaattttgttaagtggaagctattttttcaaaagtttaaaatgggaaggtaaacaaaataacctaaaatgccttaaaaaatgcaagataatttaacaaaaatgaatagtaaaaatacgattgttgacccccattttggagacattttctctttgaattttctgcagattatttggccaggtgtcaccatcttaggtggccacgtgtcagctcagggatggatgctaaggaatcagctgagcatctgagaaccaatagaaatttgacatgtggaggaaggttctagaagaggaatatatggggagtgtattccgttatgcaggggggtgtcgtctggcagctgcaggttttttttgggctttttgggggaggccgttagggagattttgaagaggtacaggagagatcgggtataggtgagcagggatagagagagcttgaagggcaagtttttctggctaagtgaagacaccaaacagggaggagacagaggcagctggggagaaggccgttagagatattgggaggaggagactggttctggagaggttttccattagagaggcagagagagttctcgaggggtgagcaagaagaggagatattttgagtggagccgttaagctaactgcaagagggattgctggcggaggggatttttgagaagaagatcagaggagagaatgggggtttcttgaagccaagacaaagtaccaggatctccaagtaggtttatcatggtttttccagtctttttcttattatcataatttatccattgttcttcctgctattcctgggtattgtttgatggcttgagtgtaaataccccattgtttgatttctgtttattttatgggatgaatgtggatttattgttatagctttttgtctctctttcctcttaggttttgctagaagatgacctcactatgtttcaattccactgtgaaaatgcttgagaatggtgatttgttcatattgacatggattttcccacctagttagcaggctcactgtcgacccatgaaatgaagctttaactgaaaatattttagcctgttctctttgtgctctgtttctcttttccatcttcccctgtttcggatacctgttcacggagtgcatcattattcttatttccgtccatgggagcaaagagttacagaggatacatatttagtggtgaataggtcacatgttgctgtatgagaactgttgtcaggagagcatgttcagtgagagaggaagctgaggttacaaggagaaaaaaaatttgagaggcttaggaggaagaagctgccgaggagagtgactttattactggagagtgagattttctttttggggggtattctggagttttgaggagcaagccgcagaggtgagactgtgccggcttgtgtatttttctttggtaaggacggatctcactcgaggctaagtgtgagcatagtttggtagggtgagcaggctttcagagattttctgggctggttacaggaagtaaatagagaaagagaaaaggaagagtaatgtattgcatggcaggcatgaaactatttaaataattggttgattaaaagtcaaagatatgagttcttttatatgttttttttattcttaatcatggcatggttccagcgggcttcaagatggttttttattattcttttctcttttctcccacgtgtcatcttcttaattccactttacatgttaaaattttcattttctttgaaagtcctgttatcaaataattcttttaaaatcctaacgtttcaaattcattcatttatttgatctattttattcatttatttttttatttgtttatttatttatttatttaaaaatctcaatcattaaaattcaatttttcaaaaaatccgacttccaaatcaaatttttaatctcaaaaattccagtattcacgttcactcgtttaaatattattttgttattattatcattatttcatttatttatttgtttatttcctttaaaaattccaatcattaaagtttaacttttcaaaattccaatttctttcaaatttaatttctaaatatccaaattccaaacaaactctaaaactccaaatttctagtgattttcgatattccaatttttcaattaaatttcaaatatccagttttcactcgaacaattttaattccgctttagttttcaaataatctttttttttctcttaattttatataagcgtgaatgtcattttcataatttcagaataatggaatttgtgagattaattcatgctaaaataaatgggctttggtgggggccctacatatgagacttcatgattcattgattgattgattaattgatttaattgtcatgcgtgtttgatttattctattctttgacatgcgtacaagaatatgtacatattcattgttcactgatcctgcttcatgatagcgcatttgtcactggaggtccaggtacgcactcattctcattttgattattctctatgcatgctcttattttcatatgtgcaagtttgatttgagtatctgctgatttcctcattcattgccacaccagcttcattttattagtagagacctgactttagggacttagaggggtgctacggtttttaccgtaccttcccgataagtaacctgacccccgaacccgatccggtttttcacagaccgccttttccaaaataaggagtcacacttagggtttttctttcttattttgtttaccctttaaaaaataaaacaaaaataagtggcgactccaagtcattttcaaataatcaatgaaaatcatttttttttttttaaataaaaatcgagctcgccatcgagtgggaaacgcattgagtcgaaatgcggggtccacaacgatataaaataatatttgataatatgatcttacttataattaaaattaattattacctactactatcacttgtaaaattacatcatgaattataaagaggtagacatttttttttattattagaaactaacatatttcattgcactaattatcaattgattatggcacttataacatcattttaaaatagaaagtagagaaaaaaatacgaaaaaata

SEQ ID NO: 13115 - DNA, 11470 bp, Vitis vinifera
  Intron number 2 from transcript GSVIVT01029509001 (locus G SVIVG01029509001) derived from phytozome v7.0 (chr-ID chr9 ; pos 22134194 to 22145663 reverse strand)
gaaaaagaataacgtcgtgagttgaatattctctcttgggtccatgatcatgatcacgctcattagtatacattatattataggactctaggtatgtggacattttccaatccatattccacctccaacatggctgtctggggtcttagtcaaaaagaagagtcaaagaagtagagactcctccatcaaaataaataaaacaaggcatctaatgataagattgtatgtaactttgagactggttaaaaaggcacgaagcaaagaatttagagagccaaagaagaccaacttttctttgaaataaaagctactaagattattaacctaagtaaaagattgtgtaaattaaacttgggaagacaggggactagtttaatgagcagcttagggtaaagtttggaaggtgacgaaaaccgactaattaatcacccaatattttatgttttatgagtagctaatcctaattatgaggcctcaaatgtcttggtgggttatattgtaattaagttgatgaccagacattatgggaacatatatagaattgcatacatcataagcatgcacgtggcaactaatttcaacagatttgatgggcaggattgttaaggtgattgcatgattcaaagttgactgcattattccatccacacttgagttgaatttgatccaagaactactagatgaatatgataggtgttgaatttaggttaccttcatttgtttatttaatttttttttatctaaaccctaattcatgggttttgaactttcaattgtttggacaaaagatcaaacaagatatttagactcaacctattgggaaagaatgagataaagagtgtaaaaggaaattttttaggaaggaaaacgacaaattacaaataagagctactcaacttcttgtgccattaaatatagagaagaaacattataaacagggaatatttgtttgaccggctctccccactatacttctataaattgtgaatatgtaatattctgaaataatgtttttatagtttcatattaataatatcaattgatgtttaaggaaggtaaataaaagtttttttatgatatttaacttgacctataataaaaattggattatttaaatgatattgatgacaaagattattaaaaaaattaatatattcttatttaagtactaaatggtttcgagatgaaatgatcacacccttatttctagtcaaataaagaatgatagactatgagtgttattatattgtgacaattttaatgacatagtaatatgaattattaaatttaatcaatgggtatggggaattattattattttgacaatgttgatgatatgatcctaagagtttgctcaattggatagactcaaagtgtgatctattctttgcttaaaggttaagagagagacggacagagaagatagcgacaagacgcctttattttctttatttagactttaatataataaaattatttaattaaaaggattattaaaattaattaaaaatcaaacttttcattttttttttgtcttattttgacaaaaatgtcattatttctttttataaaattaattttttttcttttaaaatatactataaatacataaaataatcaaggatatttatgtcaaaatggatttaagaggggataaattcataaatatgaggataattttatccttttaaaccaattatttaaaaatgataaggcttaatttacaaaactaatagcaataaaacattcaaaatacattaacatttgggacaaaaggccaaatagggcttacaaacctaatgggaaagaatgaggtgaagattggaaaagaaggccaaaaaacaaaagattaagagttagtcaactttttgtgcaatggaattttctatggcaggccctgtagaaaacatggctccttatccattaaaaaaattccaagatgaagcttcactccagcctcaactttctagattgtcatcttaattgtgtcctggattttgacttccacagtcaaaatagagaagccccactatatgggttttgtctacttgatgaaataaactaatcaatttatgagtaattttataacttgttgggtttttttttttttttttttgttaaaaaagaaaaaagaaaaaaaaagaaaaaaagattaataaaatgaattaagagattatcatcatatgaatttttcaattttgattacattaattggaatggaagatcagtattctttgtgaccatctttgatgacatcactaagaaattttcaatttgattggttggtgggggcaattgtttttccatggtaagaaattaaggagaggtcatattaaattaacacaaagtggaacacaattattattaattaaaatagaattaatgatacaaatatacacagagattcaattaatttcttggtgctttctaggaaaatattgggaagctcaatttttcctccaccatgggaaaaggatgaaaaaagaaattattattatgaatttgaatatgaacattattttatttattgtggagaatattgtgttgggcatgagaaaataaaaaaggaggaaaaggatgtgaagtctttttaaaattggtgcctccactttccaccattgctttgaaatacttgtaaactttgatatcaaaagaaagttagggtgattgtacaccttttattctaaaaaaataatcatataagatgtgagtggtggtaggtttccttcaacttcaagagtctttatcaacacaactaaccaatctatggtggaattaaatttaaaatctttgatggttgaatcaagatagattaagagtttatttggtaataaatttagaacgtgtttttaatttttctaattttttaatttttttatattttaaatattaaaaaaattaaaaatacttcataaaatcactactaaacatactccaatacttatataataattggttatttgtatcataacatgctttgatttgttggatcataggtttgttggacttgtaccttgaaggtacaagaggggccatgccaaaaacaaaattattaaatataatatgaaagccaaactaccttattataatcaaatcaaatcaatatattatttaaaagtggattattactttatgcattattaaaaattcaagaaaattttccttgttggagcctataaaatagttgttaaattatggtaaagaattaaaggagttatttggtattgacatgttttgcactctattttgaattggtaaataaatatcaaaaataaaaataaataaataaattgagtgtttgtttggatatttttcatgtttaaaatatatatatatatatattgtataaaactagaacattctatatataaagtatctatttaccttatatttttaaaatgatttgtaatgtaaacttctaaatattcttatatgctattttgtaattttaaataaataaataaaaattatgcaacttttttttaatatttgagtgaatttcatattctaaggaattcaattttttttataaaaaaaatttgtttaagttgtgtattaagattctaacaaattaaatatattggatataaaaaattttccaaaattaaatttatgtattttttatgaatattatttttatagtccattttctaatacaagtggccaacttctttattgtgaatatgaatattattttatttattgtggagagtattgtgttgggcatgagaaaatcaaaaaggaggaaaaagtaatgtgaaatctttttcaaattggtgtctccactttccaatattgctttgaaatatttctaaactttgatatcaaaagaaagttagggtgattattttagggtgattattattccaaaaattaatcatttaatttgtgagtggtgaaaggtttccttcaacttcaatactctttatcaatacaactagtcaattctttattgattgaaccaaggtagattaaaagtttgtttgatagtgattttaaaaaatatttttaatctttttaatatttaaaaaaattatattttaagtgttaaaagagttaaaaaaaaaaaaaatacttcataaaattgccaccaaacataatctaattcttatataataatcggttatttgtatcataagattcataaccattttggtttgttggacttgtaccttgaaggtacaagaggggaaatgccaaaaacaaaattattaaatacaatatcaaagtcaaactatcttattataatcaaattaatcaaaccaaatcaatatattatttaaaggtggattattactttatgcattattaaaaattcaagaaaattttccttgttggagcctataaaatagttgttaaattatggtaaagaattaaaggagttatttggtattgacatgttttgcactctattttgaattggcaaataaatataaaaaataataaataaataaattgagtgtttgtttggatatttttcatgtttaaaatatatatatatatatattgtataaaactagaacattctatatataaagtatctatttaccttatatttttaaaatgatttgtaatgtaaacttctaaatattcttatatgctattttgtaattttaaataaataaataaaaattatgcaacttttttttaatatttgagtgaatttcatattctaaggaattcaattttttatttaattttttgtttaagttgtgtattaagatactaacaaattaaatatattggatataaaaatttttccaaaattaaatttatgtattttttatgaatattatttttatagtctattttccaatacaagtggccaacttctttatcatcacttggatccaaatgcctggaaattcaggacttgaagtcctgaatacgcatgataaggaaggatgtatggtacaatggtttcttttgtcattatcaaaagtggtcacctttttttagatgaaaaataattgattttccatttgaattgttagaataaaccctacccaacatatgaaaagaagcctaattaatcacaaacccaatataacaaaataaaattatgaaatgcttacaatgagcctccaaaatcatacaaaattcaaaataattaaataggtaagtccaaaatattatcacaattaaattaaatgaaaataattcaattaaaatacttcatcaaatcatatgaattatgtcaaaaatattatttagaatagatatttgacaaattttagataaaatataaacttttgagatttttttttggaaaataggttgttttgggaataaaattaaggtgctttttaattaatttttataaaatgttttgagtaacaattcaaatatgacaaatactttgaaagcattttatatgaagtgaataaatggttcctgtatttgagttttcaaatagaatattattttaaaaaataattgaaatttattttttagaattgttttcaaaaaaaaaaaataatagcgattttggaatacatgcatgcatacatacatacaggtgtttgtttttttacttaattttatatagaactttgatgtttaataatgttaaatattaggttgtttgtttttgtagtattttatttctattaagtattaaaaagtaaagaaaaactgatatgttattttttctatttaaaaaaagttacatattttggttttttctatttagtaaaaagtttataataagtcatgaaaaaatagaaaaacaaacaacctaaattcttaaaacaaattgttttcagcaaaaagctaaaaaaacaaacaccacctaagactcatgtcttataagaatgtgtcatagtatataataaatgataaaagttatcctttattggattgaaattttatcaaatacattttttattctttttatttgttatttttatttaccatctcttgcttgaaataaagaaagtatagattgaaatttcaaattaatgaaagtcaaatgtatttaaccaaaacattaagtaagataaatgaacttaaacctaaataatagtaccttctttattgtaaatgagtggagaatgaccacattgaaattcatttatgaacttccatttactcatcttaaatatgagtaatggaagatcatttggtaaaacttataaaagatttctcataacgaaattcttcatcaattctcttctctaattccttcctcctcattatatatatatatatatatatatatatatatatatatattcattttataatattcttaattatttaataaaataaatttaaaatctattaattaagatttattcataaaaaattattatatttttcttatgcctctattaaactatgagccctaccaaccttgtcaatcacctccctttcaatcactttcctcattttccacttctttggccattttccttctctccctttcctacaaagacttttaagctcccccacaataagtaaacggctcacactttccctttcacattgatggtgtttaataagaatttttcaccaaaaaaggggaactgcatcaagctgaaatccaaaataaataaaatttcaattagccaaattgaaatactttacaaagaagtagtcaatttttaatatttaatattgaatgtcttcttggggacagctggatctggtagaaaagtggatgcatttggattgtactgtgaaacaaattcaacaaattcaacgaattaaggggccattcattgggaggattcatggattcacctaaaaagaacgtgactcattaatttctccctccccgcggcggcggccgcccccccaaaaaaaaaaaaagaaaagaatccccccaaaaaaaaaagaaaagaaaaagaaaaaaagaaaaaagaaaagtttttaaataatttggaaaataaattttaagtttatgttatttaccagctcttgaaaacagttttttcttaaaaataaaaaaaatagtcaacaataactcaataggatgctctttagaacaatttttagggtacttgtttgataacattttaaataaatgttcaaatatttcttaaaataacttttattgatattgttttatttttaattattctttaaaaattatcttaaaaaaatgaaaaataattaaaatatataataaaaaaacatttaaagtatatttggtaactatttttgaaaacaattataaaaaaaatactttttgagaataatttttgaaatttattttttaatttttgtagaacaaaagtttgtttgaaaatttaaaatgtttttaatccgtttttaatatttttaaaactgatttttatatctagtattttatttttaatcattctatatgattgtataattatttcttaaaataacctttagaaaacaagcgaaaatagaaaacaattaaaaaatattttctaaaaatatcatattttctattcttaaataccgaaaataaaaaatggtttttgcttgtcaaacgtgttttctgtgttttttgttctaattttttttgtataatacattagtaagtatgtagtattgagaaaaccaattttaatatttgatttttcaaataaattttgttgaaaaaagtatttgaaaaccgattttaagaattgttatcaaaactgggtttttgagaattgatttaaaaaaagttaattagacatttacataatgtttataagataaaataaataaataaataaataaaaagcatgaaaacataagttatcaattgttttcaaaaacaagtttttaagaattgttttgaaaataagatattttttcaaaagatatttaattatattttgaaaactattttcgaaaatatccccaaaccgcgtattttttactttctttgaatgagaaagaatagtgggatgttgaaagtttgaaaatgttggtgaagattaagtacttatatttattgtgaaacatacaattattgacaacatgttttcaaaataaaaaccatgaaactgtcataattgcctaaacatagaaatatatgtaaagtcaactttctcaagggtccaccttggcttttaagcaatcaagggaagtgaaacatgggctccgtttgcttgactatttaaaaaaatagtttttgaaaattgttatcttatttttatattacaaaattttgttttaaaacataaaatgttttaaaattatttttaatatttttaaacttatcttaaaaataatttttatatctaatattttatttttaattattttatatatttatataattatttcttaaaacaatcatttaaaaataagtgaatcaacataaaataattaaaagatattatttaaaaatatactattttttgttcttaaaattagaaaatagaaaacaattttttattatcaaaacatgcttttctatatttgttgttttagagaataaaaaattattcttaaaaaccattcacaaattggcagtttggatattttggccctttgaaaaaaaaaagacaaaaaaaaaaaaaaaaaacccttatgataaatattagtcagtttgataccatcaacatgcaatcaattcttcactgttgaaatgttggactttgaatatttctaagtcaattataaaatctatcgtttatactcccattccaataccccaaagttgaaaattataattattatttaatgaatgagtaaacttatcctcaaaccttatttttcgagaggatttttaaatattcaagggataatctactaaagtcgttgtcatatctaattacatctaaaccccttttctaagatggttcttaaatatccacgtgacaatctagtaaagtctttgtatttaattataatcaagaggattcttaaatatcggtcccaatctattgaagtttcaaatctaattgtacaagtttgataaatgtcctactcttatgtggtgggacttttcctacccttaattatattttcatagtatgcaaaaagttgctatttaacattaactagaaaatgcaatatatatatatatatatatatatatatatatatatatatatatatatataattaaaattaattaaaaatatatatttttaaattatttgatttttataatacaaagttaaggttagtaaaataaatttaaaatatcatataaaaactatttattaactctaaatctatttttatttttcttccatttttatttttttattttctttaagaaaccaacatagagtcatccatttcaatgtacacattacaaattctctaggaaagaaaacgaaatcctagtgaaaatttactagttcatcgtcaagttgtgagtagaggactgagagacgtattaaagtgacattcttcctatccggaacagaaggctacaagtgaaaacaaggaacgtggggagagaatccaccacatgttcttggtcgttggtggatgaattttttatcctattttcgtagacttgatgatggagggacaatttgaggaatcaagatagataggtttcctgagctatcatcttcttcatatcttccacatgttcccattttgtaaatttaaatcttgacttttttaaccagtttcaaacaaaaatgtcctcatatttttagtataaaaataatattttcttttaaaattcacataaataattaatatttgaaaagacattggcttaatttttcagacaaaaagataggagatattaaatttacaaatatgagattgttaatttcatccattttaatcaattatttcaaaaaatgaaataaaatatagatccattttgttttcctatttattaattatggttaggccatattgcatagggtgaaatgtgagaaaatccggccattagcaagtcttaggctatatttgattctctcaaaatttgagagaaaatgataggaaaaaaataaaacaaaaaaaaaaacaaaagaaaaggaaaaatgaatttatttttgataaattatttttatatacttagatacttaaaattcattctacttatttaactctttaatgtaaacattaactaatttaaaaataaataaatttctaactaatcaaacataaaataattatttctttaaatgttttttttttcttttcttaatactttttgaaaactaaacatatattttaactaaggagggtgagggagaaaaaaaaaaaaggcaaaattaagatgattggaaaataataggattaattaattaaaaatgatgaaaacatcccaaatttgtaaaacagaccttcccgttttttgaagtaacctatttttgacataaatacccttcaatatttttattatttatatgtatatttaaaaaaaatgattatttttataaaaaaaaagatgaagatatttttgtcaaaaataagtatttttttaggttgaaaaaaggtgaaggattaatttttaggaaagataatcccttgaatttcaactatcctagctcttacctaccttcatagaatatttttgtgtttttttatatgcatgattttgttgggtttgaactttgaatggcgttggagtaccgttaccttcttgagagtgagagtgcaggttggctcatactgaagccatctggcgaagaataaacatgccatgttgatttactcattattatcattttttttaaaactcagcctgtgtagggcataattttcgtacgtaaacttttcctcgcatgggacttgtattatagagagcctttgcctttatgctattgtcttgtgccctcgatcgtcctttaagacatatatatactttttaaaatgtcaaaggccatgtttagaagaaaaaaaaaaatcattcttttaagatatatataaaatataatttacttttattaggatttgggttatcatcaatctgataatatcttatttgtttatatgcttatatcttaatcttgtttatttgtactttaattcaataaattagatttcatcatatatatttaatatttcggatttagattttgagtatcttaatattttccttagtgataggtatcattggtatcttaatatcttaatataggtattatggtgatggatgagagagagagagagagagagagagagagagagagagtccatgttgagataaaaacaaaagagagggagagagagagagtaactccatagatacctgtactagactccatgttgagatgaaaacaaaatgtagaatttacatgaagccattagagaaaacaacacacactttccccacaaagaaaagaaaaaacaatcttgattgattattggaaagaccaccgatttgtttgtttaacagttaaaagtccaaaaacgtgttttcagtttttagtttttactccacactgacttccacaatctgaaagttgagttaaaaaaaaaataaagtagtatgatggagtgggtgactttgtgttctgcttctatataaatgtttgatttcccacaaggaactcaccattcccacttcctgaatcaataccca

SEQ ID NO: 13116 - DNA, 1717 bp, Vitis vinifera
  Intron number 2 from transcript GSVIVT01031574001 (locus G SVIVG01031574001) derived from phytozome v7.0 (chr-ID chr5 ; pos 18367258 to 18368974 reverse strand)
aggtatggattaatgtagtttctccatggctttattaatggaactatacccaattcttatgttttagacacttgaactagtgttttttttatgttgacatatatgtatgattgttcagttttaagctgggtttgtgtctcttaacacttttgaattgaggtttctgttttctactttgcattttttcctcttgaagaagtctgaaatcaataaattcatacagctggatatataacaagtacaagttggctatcatggtcatcatgctgttattgaaggggtaactcatggcatttaaaatcatttcttatatctgggttggcttgtacctccttcgaaaaaacatcttccaactactttcttcctttacctgtgttccaaaaccatgagtggcagttgagccaatagtattttgcatatttgtgtctatcaaaaaaaaaaaaatacatttctatacaagatcatgaatggtttggcttgaggccagggggaacactagtacaatataccaattagatatgaatcaaacatatactatcttgaggatccgtttcaacccaaacccttttgaatcacatgttgcttgctagcattggtagatatgttaggcaaaaacctctgctgtgcattgattttcatttgctgctgcaaaacctgaaaatgaccccctgcttgaagctctcctccaatgacagcttgtttagggtcacattcagccacatcatcaaatttcaatcttatccatatttttagtggtgattcccattcaataaaagcatattcttcctgggttgagcttccaaacctgaaagataatatcctgtgctttctggaagcatcaagactttggatctatccaatttatgggtggaaggggattctgctatcttgatgttttatgtgtttaggtcagaaaaaggcccttggaagtacatcatgtggctacgccaaatcctagatctagctagaaggttgggatgttccttttcttggtgcccaattgagctgatgatgttgtagatagattagcaaaacatggagctaagtaaatggttttttctgtggggaattttttttattccattgaattgttcattgttcctctactttgttcatgtttttgcttaatccttgatctatatagctatcttactgatcttgttaggcatttccctcttcttttttcattatcctttatacttttagaaggattttgcatcattcatttgtgcttaaaaattcttattaatggattatttatttctaattaaaaaggggggaaaaaaagatctggacttgttttggttgcctgggaaaatgaaccccgtggtctttgtggtaacatggtaatgattgtccactacatttttatttctctttgggcacattagtttgtgtttgagctgttaacctgctcatgtcatgttggttagtactccattaatagccttttcctaggatatttccagttgattcctacatgcctaccttagttcagtttaccacttgatctgtagagattatatttccaggaaagttcagtaattgctcagctaaagtaatttaactgtatatttcataaactgtgcatcataattatttatttcttgataaattgtcacaaagccacatggttttcactaggttttttatttatctgatggatgattgttcatatgcaggacactataactgggtttttgctggctggagtggg

SEQ ID NO: 13117 - DNA, 7410 bp, Vitis vinifera
  Intron number 15 from transcript GSVIVT01027551001 (locus GSVIVG01027551001) derived from phytozome v7.0 (chr-ID chr 15; pos 15723477 to 15730886 reverse strand)
gctaattggaagcaaaagaaaattgtaagcataatgcggttagcatttttcaagataatatgaaattgacttttgcaagaaaggaaagataaatactctagacgattgatcttgccctggtagtagtttgtggctacaatagagtggccaatatgcattcagttctatgttaagagatatgcagacaacacagccaaaattcccttggatcattttaaaattagagttctctcacctctccattcacattatgatacaggatatatctgaatcagaaacacgtcttttaggttatatgatcaggacatataactggttccattcacttgttctctcattttttccattcacattatgaaacaagtgcatcttcacagattaattggtttgtatgatcaggacatatttgttgcagaaactaacacaacttggagcactgtaaagtgggcaatggctgagttaatacgcaacccggaaacaatggcaaagctcaaaaggaggtccaagaaattctaggcaagggtgggatagttcaagaatcagacatcaaaagcttccttacaatccatagttaaagagacctttcagttgcacccaccagccccactaacaattccctagaaagcccaagctgatgttgaagtgatatatatgatacatttgcttcacagcaccaaaaaatctacaaattctggtaaatggataagctattggccgagatccaagtttatggtcacacccaaatgtgtttgtgcctgaaaggattttagagcgtgacattgatgctagaggccaagattttgagctgattccatttagttcttgaagaagcataggttctggaatgtcattagctcatcgaatggtacacttggtgtaggcttctcttattcactcctttggttgggagcattcatgcttgaagatggtctacgcacatgcacaaattttgaaaagtcttccaaaataagcaaaactataaaaaaaaatatacggataaaaaatttgtattaaaataattttggagtacaatatgtgtgataatattctttacaaaaaatattttttctcttatttaatcacttcgatcacaatatgaaggataacaatgaaaatgttttcttcgaattgaagattaacttgttccgaatgaatttattgaatgacgaagaatacgtgtgatacttttacgatattttggacttgtaggaatgttttgtgaaacttttttctctttgtgaagccttttttcctatatgaaggtttttatttttatttttattttttatctttttattaaaaaaagttattgttatttataggtgaagttagggaattgaatttggaattcctaagatttgattggttacttcaaaaaatttggttccttaattttagcaactcatctcattcatttaggaaatttcccagcaagaaattaaatattaatttttaattctcttttaactttaattgaaagatttattacctttgtttaggaaagaacatatatttttcttaattcttttttgactttaattgtttgataatattttatttttcaagacttaattttatggtcttccaaattttaacgttataatagaaatttttaacaaacttaaatatccaaaaaaatgaatatatgaagtttgacctttatgtaaataagttgttgccttaacacataatgatgttgtatttttggtgcttaagtgctaaagtcttcgcccatgtgaattgtcttagcttaacttggcttggatgcataatggtatttaactttttaacacttaattaaattttgaactatatttaacatccatatagaaaagtcataactttgacgtagaatagtattatatttttaacacctaatgcaacttaagtattaaagtcttcactcatatgaatgaacttgactttgatgtataaaggtatccaacttgttaacatttacttaaaattggaactatatttaatatctatctatttcttctcctatttatcattttttttttggtggtggtgactaaactcaaggagtttcctaagttggccacataactttcatagagacgagattaattcaaatgtaattcaaagtaatttttttaaaaatttctctaacttttgctaagactaaagattttaatcttgtgagcatgtcctaacttttgcctaagtcacatttttaggtttttaacttagtggatttttttttatgccatatacagtttaagctcatgcaggttaggagcaatatacagtttaggcttaggctctaaggatcatcacttgttttgattttaatctaagggcaataaatgcatgttctcaaaataaagtttcactgaaattcaaagatgactttttctcaaccaaatttgtgaagatctttcttaaatattttgaagaaaaaaaaatcctttgatttgatcttgatttttggccttgaagatcaatgaatgacatttttttgtattgtgtttgatattatttcataatcttgttgaaaaaattgtcaagattagatttgatttcaatccaagggtggaatacatgtgttcatggagcaaagtttaatcgagattcaatgatgacttgatctcaagtaagcttataaataatttccttgagtgttttgaagaatccaactttttcttctttgtattgaaggtggatgaatgatacttttctattgtgtttgacactcttccatggacttgttgaaaaatgtttagaggttgatcctatcttttgaagcttgattttgaatttgccttttgagttgtatcttcttcctttctagaatgcttcatgctgaaggacactaagatttggagaagttgaagaatccaaatctccaaatttgacttttattttttatttattaaattttttaaaattttaaaatttttaattttttaattattttaatttttttttaattttaaggaatttgttcctttagtttaaaaagtttgccaacaaagattttttttctttaacataattttgacttttttttttgttactttagtttaagttttggtagactaagggcaatatgcagtttaggcttatcctttaaagaacatcattattgttcaatcttttgttatattggatagttaaagtatatccataggcttcaccttatttgtcatttgaatatttgtagaaacttcttgtttgaatgaaccgaactccaacttatgagtagattttgtctacttttgcttacttgaaggataaacttttttctatttttagagcataataaagtgttgaggtttgaaaataattgtagtgaaatttgatgtcacactctcttcatccttatcactgatggttttgcccccaatagtattatctttaatttcttcaatagacatgttttcacttgcatttgttttttataccaagttctatatcacgtgcttgtgtagccaactcttcaaaggtgtagagtttcatgccttaaaggatatataaaagccactagggtataccttgtatacaaatctctactcttgacaccttaaataatttatccttataagcttaaagaatgttagtggttgatgtagtcaacaagtgactcatcttttcattacttagtattcataagcttcatcacacttatagttcattaggtactatagaagcaattgaagaattcatgcttcatttggtctcaattgtcaatgtacacaggcgtaaggtttgtgtaccaataaaaaacattctcttggatggaccaaacaaattgtttaaccaagaagtcacttttttttcttgcatcgatttatgtttcaatgaagtgggtaatgtgttgctttggattttcatttccatcaaataaatgaaactttggagtttgataacccacaaacatatgtaagttatcaatcctctaggtgtgaggtttagagtacatagtgtactttgtgatgtccatcataccacgctttgagagtattagttgacatgttttaaagttattacatagatagtgacaccattaaggtagattttatggtttgcctcccaacttgtattgaattagatgcatgtggtgcatcaccttaagatgcatttagagggtgagtgagtcttttactcaaatcaactctattttgctcctaaatatactttaactttgttcataagggagactatttgtagatatttctcattcatggtcttgtgagtttggcagtgacatgatgttcggattgagccccaaaaagcaagacatgatgtaacaaagttagattgctattcccttggtatattgacattgatttgagtatttagcccatgtctcttacattgtacatgacttgggtgcattaggagttgcataaaaaaatacaagtcatgagttctctattagtagataagttgtccatagttggttcatggattggggcaatccagttgagactatagtgcaccacctcctaattaaagggatgacttgtcttggctgtaaggatgagcttcctatggtgagtatattagtttatgtcatgcatattggacaggacctatggtaaatcatgacataagactatcaattgttatgattcaccaagttattaaactgcatggactctcaaccttaagaggtaatcttgataggtgatagtactaccttgttagattatggacaccaggtcacggacctgagcacttggtgtctcgttgtaatttacatagggtactggagtgtaattgactttctatagtgggatgttgagtcaattctaaaatttgattatgaggagccaatactcctatgagtcctagtggtctccgttttgagctcatattccttgatgacacggtttatgagggttgaatgttttattagttcacttttgtgcataagagcattttagtaattatgtaaggttgcatagggataagtgagtgtcatctttggactaggctaattgattaattagggccttatatggttaattaatcaattagcaacctttttgggctaaattaagtgacctaagcccatagtgggcttaagtcacttaagcctagtaggaagcttataaatacccctttaaggttagagtttcaatgtcttgtcattctcagagagaaccctagcctttacccttgagatctccaccatttcagtgcttagacataaggaagagtcatcgggcaaaagatcatggtgtttacgagatctattatgactttagggttatttacatcaattggaattgatccgggaacattcaaatcaaaggtatgtggctttagtctctagatctatgttttctatggtattcttattgttttttaatatctgtttatctgttgcgatagatttagagagcctaggatagatttgcatgcactttacccaatccgaggcatgagaatggagtaatttggggttcctaacacttgagtcatctcaactaattattcttctatgaatttaatgttttttttgttttttttttcattaccggcataatcatcgagaagaaagaaatgaaggagttagaatattttgaggagttatcctcctttaacttctcaatcggtgattcagaatgtgagtcgatgttgaaattgacaccaacaacatagtagggaaacttatctccaaagtcccttagtgttgaagacatttttccctactacgaggactttggccctttgcctctaaataggcgaaggtgatgagtggttactaattgttgtgtgttcccattggtaattttaataaatgagtgtgttcatttgcttgctttattgaacatgcaatggttgtttctactttgctatgagttatgaggctcgtagaggtgttgtgtgtcaatccttgtggacatatgcaacttgaatctttttggttgccatcatcttagtactgatcaaatatttgttttagcaaaagagatgagagacatagatgtctcaccaggcttgacaaatattttaatgcacaaaatttaggaagttttacaaaataagaaaaactataggaaaaatacatgaacaaaaaaattgtattataataattgcatggtataatatttgtggtaatatttttttataaaataacagtttttctttaatttagtcactttgattacaattcaaaggactacagtgaaagttttttcttgaagttgaaaatcaatcgagggcatggagtgacttgttcctaaataaatttgttaaatgacgaagaatgcgcatgtagtacttccatgatttctcaaacttgtagggatgtcttgtgaagcttttttttttcctatgtgaacctttttgtccaatccttctcattgaaagaagtcaccattatttataggtgaagttaggaaattgaatttggaatccccacaagatttgattgcttaattcaaagaatttgtttccttaatttagaaattggcctatctcatttagaaaatttatcaacaaaagaatatttatttctaattctcttttgacatcaattagaagatttgttttctgtgtgtacgaaaaatttcaataagaaaacatttatttttaattctcttttgactctaattatttgatttgatttcattttgcaagacttaattttgtaaccttccaaatttcaccacatatcaccttttgaattgcataccgcctgtttgatgtgtaagactcatcttttgtcaagcctaaattttattaaactaataagccactattgtaaaaaccaatttagtagtaattaaatccaaccactaaaatctttgatcttatttagatggtatgaaaccagaagatatggacatgagtgagaagtttggacttacattatagaaagccctacataggaatgtcaatttcacgggtcaatcaggtcatccgccccgccccgcccctattgggacgggtatggaataaattaattgggtatgggacaggtatgggatagttttgtgaaacccaaatcgggtacggggagggtatgggtttgtagttacccaccccaccccgccccgaaattataattaccaacatacatagagactctgggtttgaatctgattctaacttgatctaatctagtgggtaagaagagaaatgaggtttggggaagatgaagagtcagttgctcaacctacgtcctctgcgtcggctctttcatttactacaaccactatcagcaccagggcttcgccattgtcgctagcgtcatcctcggaatcggagcaggactgctctgggtggggcagggagctatcatgacgtcgtaccccccaccggggaggaagggttcatacatatcgcttttctagagcatcttcaatatggggggcctcatcggcgggctcatccccttcattctgaactacaatcggagcgaggttgcgtccgtga

SEQ ID NO: 13118 - DNA, 4735 bp, Vitis vinifera
  Intron number 40 from transcript GSVIVT01018178001 (locus GSVIVG01018178001) derived from phytozome v7.0 (chr-ID chr 15; pos 13580956 to 13585690)
ctgtggaacaagatcctactggttttcgtgagcaggtttttttccttaacctatctctgctcaatattttctttatgatgtttagatattaaaaaaacgttttttatttttttattttttattttttatttttataggtaaatggagattgtattaattttaaaaagtatacatgacatatacaaaacaaacaaaaaaatatgcaaaaacaagtaattgcaccctatgaagagcctaaccagtctgcaaaatctaatagtgacatagaattatctccaatgtacaatctaacccaatcctaaaagagatacaaaaaaaaaaaaaaaaaaaaaacgtttaattgtttggtccaaactttcacaattcttaaagactttcctatttctctccctccaaatggaccaaaaaatgcataaaggagtaactttccaagcctttttcctttttttgccaacaaaggagccaccccaactaaagaacacccttctcacagaagagtgaaacacccactgtacaccaaaaatagcaaaaattagctgccacaaaatgcgagcttttggatagtgaaagagaatatgatcacccttttcttcttctgctttgcacatataacacctattaggcatcctccaacccttctttttgagctgatcctgagtcaatatcttagctcaagttgcttcccaagcaaaaaagttagctcttacaggagcccaagagttcaagactatactataagggaaatgctttgctctcctacttgccaagcagtagaaggacttaattgaaaattcaccgttctttgtctccaaccaaaccataacatcatcagtacctaaagagatggagtgattatgcaacctcctaaaaaagacatctatttcctctaacttccaatcattcaattgtctaataaacctaggatcccaactatccccatcccaatcatcaaccactgaagcatcttttgaagaggctgtagaataaaggtctgggaaagaatctctcaaagaaaaattcccaccccatttattcttccagaacttcactttgtttttgattgccttccaaatccccacttcatacctctctctcacctcttttgtgcaccaacccccatcctcttgccttacttaccaacaattacttgtttccgaagaggattcctttcacatataaatctccaagaccattttcccaaaagagccttgttgaggatcgaaaggcttctaaaaacccaagcctccttttttgtttttccaaacaaattgaattgtggttattaaaaatctaaaactggggaggaccttaaaagcttagttttaaaagttgtaccaaaggcgcaaaagcctcctacaacttaggagtaaggtgcagcacaaggggtgcgcttgagtcaagtgaaatgcaacctaggatgcatatcaattttataaaatacgatttaaaatataattcaatcaataacaaaattaagatttaaaagaagcatgcaataaaaaagtgaggaaatttatacattatataaatttcaatatataattaaaaatttcaagaataaaaagtgtttaaaaaggaagagcaaagtcaacaaggcatgcctcttcaataaggcacctatcttgactagcgaggcgctataactagggagcggttgtgcttttagcctaggtgcacttaaagcacaccttttaaaactatgctcaaaagtgtttgttctattggaaatcctttctgatgtgcgagttcccaaaacatatatgctcatccatagatcttgagttcactataggtaagatagaaatagatgacatgccatgaacgattttgatcaatgcatatgaggctccttgtctttttctaatcaccatctagtagcttgtccttgtggccatgataagttagggttttccatgtagtttaatatctggctcttgcatggatagaggagtattttttatctttaggagtgagaacatggtcagcccctgtgtacatagggtgcactcctgtttgttaggtaccctctatgaatgtttgtctatagagagagctggagagagaatgaacatggttaatccgtgtctaatctaaagaagggagtaagttaggttgagtgaaatgagggaaacaattgttgtcagatgacaaaatatttcttagtggttggtctttgtgcctaagattatggcttatggaggatttgttattcatatgctcataagctatggaggagtaactaggagaggaattagagaattttcacttccaatgtataatcttctgcattgaatatggctgaaattactcggtatatcaaaaagaatgtcccattagtcacatgatgtgagctgtttactattgacatggatttggttagctgaactacattgaggcttaattcttagtttttctaaagactttggttaagaaggattaaaataaaatgtatgaaatttaatttcagtaaaactaggagcaaagataagactaaaatctgccattcagtctttggtcaaggaaagtgagactgaggacattgtccttcaagtaaagcaggatgggtgaaagaggagaattggtccggagtttggtgagattatgcaatacatctcagttgaggtgcaaatgtaaaaaggaactaaaaagacaacaaacttttcatattatagaaaattgagcagctaaagaacattttgaaaatgagttcatccaacttatgatgttaaatgattatcacgaacagtaatacaaagtattggtttagttctagttgaagatgctaagaggataagagaaatatgggactatacattaagaagagattatgattttttgtagctaatccaatgagttgggatatgtcttttcacctgtgtgtgtgtgctttgtcttccttcttggtttggaaataaacctcattccatgtgtgcttgctttcgtttcctttttgttagggggtgaatctgcttccccatccatgtgtgtgtgtcatcttctaaccacttttcttggctaatatgtaatttatttataggtttgtacttttccattttttgtttgagggaaaacctcttcttttgtgttttctcccccttttattctataaaattatatcttattatttaaaaatcccatttatgtccattttatgtggaattataattaagaagagagaagggaataatttggtttacaggtttattggttttggttgatgttgtgaaaggataaaaggaagattaaatggagttggccaaggctataagaaaccatatgattgctatggatccaataaaggataagaccatagatagagttgaatgactaagggcttgtttgctggtgtttttgaaaacaagtctcaaatatgaaagattaactttctcagtttattctctaggaagacattgtgcacttatatagaatatgaaagtttctaacctattatccctgcttccatttatttctcataatgctttgtaaataaacacctaaaaatacctcaaattgattctaaaaatccattctattttgagaacaaattctcaaaaaattgttttctattcaaaatttgaaaaatgtgtttttgaagttggaaaactgttttacgttccaaaaagcagaaaactttttttaataatagtttccaaacaggcactaaaagctcaataagagcttgtgtacttgtttgtctattttgtttttttttttttttgctttttcaaagtagcatatgactttagtaagaacttaatatgaaagcttggaaaatgttagtacttgtgtgacaatggtttcaaaaactgttttttaagaacagtttttgaggcacaatcttcagaaataattctcaattgtttttaagaacaaaattctatttgggaactcaaacacaagaagcagattttatggtttattctctgtgaaggtatttgtccatttgtgcaatgcaaaagtttccaaacaggcccttagcttttcataaagctttattttggtttgtgcaaaaagttatttcatgtttaatgaaactctcacaaaccaattttgccttagaaaattatgactttgacttagattttagcttccagctaaagtgaaaaacaagaacaatccctcagagggcctaaataagattcatgtagccaggtccaatgaattgagattaatgctgagttgagttttacaagtaccacaagttgattattttttttccttttccttctatatgggagacgggaaaggagagttgataaattgtacttcagaatttagattaaagttaactgtaaataattactaaagatatttgccacacatttatatttgttttttactacttatattgctatccttttaaaatttgctaccttgtcttgctttgtgcatttggatggggcataactgaatgtgaaaaggtggaaccttcatcatcaaagttgaaagtatattatcttgaaatccatgtttgcatgatcattaaggtctttggcggataggagaacctcatttcttgattttgttaataacatgcactattccagggtttaatgtttgctttttcttttttcttttttcttttttaactgtttttttaataatttttggtgtgtttattctttggtgtcacttgtttactatctgtgcacttcgctcatgcctccttcagttttccgtgcttatgaaaaatttggtacctgtaaactctgtaggtttccaagctgtttgtgga

SEQ ID NO: 13119 - DNA, 1658 bp, Vitis vinifera
  Intron number 2 from transcript GSVIVT01001693001 (locus G SVIVG01001693001) derived from phytozome v7.0 (chr-ID chr1 8; pos 14380158 to 14381815)
ccaaagctacgtttcggtggatctccaagttcaaggtactgttccaatctctatccccagttcaatcaatcgacttataggctatatactatcgttttgatgctgagaaaataatgggaaaacgaaagaaaattttgaatcgtgaatttttcaccatctaggtctcgagaatacagaaaatacactttacctacaaatgatggataaatttcataaggtcggccttagaattttgtatcaggtggtgatttttgttgattgggggattatttggcacggacgagtttgaattaacgggtttttgggaatattttggaaagtacctggtgtagtttaagatatgtagaatcgattttggggttgctgaactacataggatgaattggggttttgttcatttgagggaaggttgggattaatttaaaagatcttaggataatttgaacattttgtcagtgcagacgatatgaaataattaatttgatcacttggggaaagttgggatcaactagaaaaattgtccattcacttataagtgccagataattgatatgggtagaagtagtgctcggcaaaatctacagaacaagtcggtctgtatctgtaccaaccaaatggaatcctgtaacagtgcatctgacagtatttttattcaaattgcttggaagtgtttttaagagagtcacctgtgtgtttttccataaaacattacaagtaatttttcaacactccaagtgatttttcaggtttttaaaagtgtttctaaattttatcaaacacctaattttttctttttcaaaagtgctttttagactaatgtgctagatttcttaagtagagagctaaaagactgctgactgcttaactttttgttgcttgagtagtagagctgtgtttcccagtggtatcttgactacctttgtgattgcttagcattgtaattgtaaatgtgctctgtttcacatgcaatccatctgaaacagttaatgtgatatcttgattaccattgtgatgtatgtatcctttgtaggcgcaatttttagtttattcttgtattttatttttctaggatttgtggcttgtatttttttctccatcctttacacactacgatgatgatggctacccatgatcttgtaacagaatcagctattgattatggccattcttggggtgaataattgtttcttgtttccttttttgcaagtattaattgaattgtttatttatttattttaaccaaaggattccaatatatttatctcattacactttctattttttattttttatttttaaaaatagaaagtcttatataaaatgtaaggatttttatatgaaaagtaggtaaataccttctatacttaaaaacacttttaacaattttctaaatgtgaggaagtaaaaaaatttcacttcttcaatttttttgaaattttgagaagagttttaagaatgcaagataaatttttgcttttataaaagttcttgtagtttatgtagagtttttaattttaaaaataaaaaatacgaagtgtatcgaaatgccacctatgttagttatttattgattttaattgcattgaacttaactataaagctgtagaactaggtaaattaattttttgagttatcttattgccagatattctggtgca

SEQ ID NO: 13120 - DNA, 2746 bp, Vitis vinifera
  Intron number 1 from transcript GSVIVT01038715001 (locus G SVIVG01038715001) derived from phytozome v7.0 (chr-ID chr1 6; pos 20662150 to 20664895)
attcccacaaagacaccctaaatcctcagcctcaggtctctctctttccctccctcctctctcttctctctgtatatcatacacatcaatctgtatcaattcttttgatatgtctcttgctttttctttttctttttctttttttgtaatttatgtttcctcttaacatattctggttgggtttgtgtcagtggcttttttctttgatcttttcagtgggcagtgtttatagaaccaaagaaaatctgggtcgattttgtttcggatcaagtgcatgatgtcttgaaattgtcagggttttgggtttcgtttttgtcttatcaaaattaggatatgggttttccttttcagtatgcaatgcttgaggaaccaaaagaattgggtttaggaatgggttaatcatgatttggatcaaaggcctgatatattgataatttttaggtttccgttttcttggtttgtcaagttaaccaatgggttttccttttcagtgtgcaatttttaaagaaaagaaaagaaatgggtcttaggtggtgggtcagttttggcttcgatcaaatgcctgatttattgccccccccccccccttaaaggctaatctattccttccaaaccatccaaaaaataaataatggaacggtactcatcaagactcttagtttgaatttgagacaattttgtgttgtatgtgtaggttcaaggatagaaaagatggtaggttacaaatgctaaatttcatattgcaaaattgtgtggattggaatgatatgataggaatttgttgtattgatgtagtatttatgatttttaaatggtactcatcaagaagagaaggaaaaatgtgaaatgaggatattgagatgagtcatgctattcaatccaaagagactccctgatttgattctctccacatttgaaaaatgcttttgattttgtattaatggcatgtcattgtgtatgttggagaagcaaagtggagcgtctatttggagaaaaacaagtgactttcctgttaaggtggatgagtagcaagatgagaaatgaatgtgtatatgagaaggtaggtcagaaattcagggacaagatgagagaaaaggttagacaagattgtatgtcattgggtaatcaagactgatgattatactagcaaggaatggaggttaaagtagaaggcaataggagcaagaaggatgagatgtggtggaatatgatttaaaagataatttgacagtatctccctggcattactaagaaatgatataattaaaaatggccaaaggcttaatggtgtgtggttcaatggaaattatggcctttgattttgcaaaatagcaaaagaggagttctatggccatacccagttgaaagaattaggccttttttagatagcccatcttgtacggttttattaaatttgtatgggcctgaaggagttggcaattgctgtatggtagcccagctttaaggatttgcttagtgtagatctatcaccattctggataactaaagctcaaaatcagcttgggtgtggcaatgatttgaccattgccttgaatcctagctcaggtggcaagggggacaaacatgggagaggttctaggtttgattccatgttaaataaataaataagaagaagagtatatgtaacacttctttttgtagcttctcatggcttgaaatcttgagggacatcttggttctagtagtagagtatatgtaacacttgttactatgctctttcctttcatgaagttctaatctttgtgcctgtggagcattctgagaacacgcacctacggtatggagatgaagtgccctgggacaaaatgcaggtgtgaaggatgcaagtccttttgatgggttcttgatattccatgattagattgtgtggctgatactgtttagcagttacttttgtctcttctccttagcctttgtattttatatccttgtaatactattgtggtcaacaaggaaataaagttatatgatgaaggcatggttttctttggaattatcatggctaccctttgactgtagaatgtgacacgtgccgaagctgtcacattatatgtttaaccgttcctcatcttataaaccaatcaactacgatgagaaatgggaagtgcagcattttggcattgagcacttgaagtgcccaacctatgctgataagagtgtatatccatgtaaacccacaacgtcctggtcaaagagacaccaattagattggttcttgactggatcggcttgtaacccatgcaatctgtctgccttcatttctctctctatgagttattgcttttattgtcaagtacttttgcaatttcattgccttttatttcaaactgatggaccagaaaccccgaaatgcatccctgaagcatctttttgctcatcagtttggaatcctaatgaataaacactttcaatggatggattgtagcgatggaccttgttgtttatgggtttcaccatctcaatctgtctaattatccagttggtttcaattgctaacaccatcttgatttgtacaacacaattctcaagagtgttactcgcattcatttttttatttacacatgtggttgtaatatttgaagtagttttgaattgaattaaatctgcattcacatgccaaactggcaatttattgattaatgcattgctttgcatttaattttctatacatcgattaagtatgacgatttttattaatgtacgttctgcatcacaaactaaagct

SEQ ID NO: 13121 - DNA, 9843 bp, Vitis vinifera
  Intron number 1 from transcript GSVIVT01010336001 (locus G SVIVG01010336001) derived from phytozome v7.0 (chr-ID chr1 ; pos 19587260 to 19597102)
tgcagaaaattacggtgagcattgcccatttcagatagtttgttgctttgattgattttgggtgataatttttgtttaattcttggggttgtcttctgctgataaatgttgcaaatagagagtgatataagatgcttacatcatgtggatatttggatataccaatggacaaacgatggtggggaattgaatatttgtgtcctcaaaggaatatcgactttctagttattgtgttggaaggtaatttgcgtcatgaaccgactttaagaaactctcaattggtggattactccaattgacatttgaaacctttttgcccattgcttatgctgttgagctcaggagtgtaaatttagtattcactccggaaatggcgaattatcaaatcaaggtttatttctagtctattggataatagaaatgtacactttaacctggcaaaatctttacaaacatataaaatgtgatagtattgcatttgtgcttcctaaattgaactattatatttgcttatatctaatgttattaaagtcatagtctatcatcctcttagaactttttggttacgattttatagaaatgggtttttgggggggtgggtggttctggacctctctgcttacattctggtgtttgttaacaagctctcttaggattcttatagagtttgagaggcttatgtaagggggatctgctttccccatacttgtttgtattggtgatggaggttcttgtgcttcattttgaagctgtatagggtggttttctaagtagttttaaggttggggatgagtgaaggcctccacagggagattttgtactagttaccaatagcattatatggtttcatgaagtgaatagcaattgattgctgaattagaggtgtattctccttttctttttcttttttcttttttctttttctttttttttttttttttgtgaggtagtcaccaggctgaaaattaacagagagaaaagaaagcttattttagtgaggaatgcaacaatgtggcggactttggggaattgctggggtatacagaagggagtttgccatctaaatatttgggtatgtggttggaagcttcttttatggctaagttagtgagggtttcggttcagaaatggttagagacaggtatgtgtctttttgtgctatttatcaatcttctttatgccctcctttattatcatggtgtcaggtcaaaatagattagagaagtttcagagaggtttatggagaagggattttagacagaaaaatgcatttcataaattggtcatgtagaaaaatgtatttgaaaaagaaaaggtggtctaagaattagaagtccagttatccttaataagacactgttaggcaagtgattgtggaggtttgctcttgagatggacagattgtgggggaagatcattatgctcaaatttggggagcaggtagatggattggtactctaaagaggaaagagggtttgttagctcagggctcaataaagctataaactaggatgaaataactcctattcttttgtcagtgtctctatgggcaatggatcatataagaagttatgatttgatgtttgccataggaagtatcctctgaatgtccacagaaggattggcttctggattcattcacattgcaattaatagaacaatgatggtagctaataattggcatttgatgaaggcctgttggtagaatctaaggttaacaaggcactttcatgattcaaaatagtggcttcattcctattctgcatttaggaaattgtggttagtgaggagagtgaggcttcctattctgcactttcctgttcaacttggaaggtttaaaagcacagttatttctatgtttatgcttctctctctccaaggttccttctctttgtcccaatgatgaaggtttgaaattcgtttatgcctgcaatggttgggttcttttcttagaagcaatttgggagaagatttttattttgaaccatttttatggaaagggtaggatagaaattagaagaatccataaagatatttattcttctcaatttcacaaacaagatacaagaataagatgtgtaagcaaaatgaggagttgttgtcatacattgtgacgtgtcttgcaatttgtagcttcgctgtttgcattgtttgatttttcctggttccttgctcatttagtggagagacctttctgagctagcatggtaatttgagtggtaagaggacacacataatgtggaggtcaaccctgttatgtgtaagcttggaatttttgaaaggagcacaaccaaaggacttgcagagggcagagttgttagttttattttcttttgagatctttatttgagtggtcaaaggcctttctgtcaggtgcatctttggaggagagtttctatggaagagttttgttgatgggttgattatggactgagctattgttgagtgtgcagtaagcatgttctatttcccccctcttctagggttaggtgttacttcatactggggttgtacttccctttaggggtctatccaatatatcattatatcatagcatatgaaaagaaaatctctccccccacccccaatctccccccccaaaaaaaaggcagcatgtagtgttttcaagagcatgaatgaggtgtatccaaggcctgcgtcagcgcaaggtgcaactaaaagagcaagactccccaaaggcacacacttctaggttggggcatacgtgaggcatgcttttgcagtgccttccatgctctgataggtgaggctcatgctttggagatgcaactggccagaaataaaataaaaataaaatataaaaggttgagatttgagggggaaaaccttaactctagtattgcctctcggatgtgttcctcacggcatttgcaagctctcattgccagcatgttttttttttttattggaaacgacacatagatttattgatagatgaaaataagtacaaaagaaggatgaggaatcctcccgccaaagaaagctaaactatagaaaaatacactgaaaaacaagcaaatactctaaaaagaccactccttatggaatacacacccctatccaatcaagttgtatcacattaaggggagtcctcttaaaaaccttggaacaataagcccaaagagaagcaaggaaaacaatagagtcccaaagatactctgaattccttactttatcctaaaaaatcctcacgtttctttcccaccacacaatccgaataagagcgatgcttgcagcttgccacaaggctatccccctcttagaagaaccaaatccattaaatttgatggacatcatgtcaaggatgctcctcggggggacccaatccatcttagctaattgaaataacctatgccacaacccaatcgtcaaggagcaatgaagaaaaatatgatatgctgattccccatgcttcatgcacagaatataaatatcaggactaagagctttgtagggtcttctcacttgtagcatgtcattagtattcactttcttgtgtgccactaaacagacgaaggacttcactttgaaaggaacttgagaattccaaacgaacttagaaggaaaaacctgaggagatccagaaaattgagataaagttagaaagaaggatttaactgaaaaaagccctgaagaagataagggtcaaaatctggcatctggaaccgaaggagataaatgcaatccatcgagagaccgcatgaggccttctaagtcctctatctcagaatctgacaggttacgacggaaatttaaattccaagagaaaggatgagtaggaccgaaaactgaagaaataagtatgtttttatccaagactactctaaatagtcttggatattgggttcccaaaggttggtccccccaccacaaatcttcccagaaccgaattctttccccatttcctaccacaaaccgagtaaatgaggaaaactcctgaaagacttgagtaatagccttccaatgacagcgatgtgaccatctgactaaagtgttagcatcccaatcattggagtgtgaaccataaatgcttagtatgacctgatgccatagagctgaaccctctctagggtacctccacagccatttccctaaaagagcaagattcctcaaagaaatattcccaaaacccaaaccccctatttccttcagtttgcacacaacatcccacctgactaaatgatctcttttgccttccccaatccctgaccataaaaaatccctttgcaacctctcaatttttgcagcgactgaagcgggtaacttaaataaagaaagaaagtaacagggcatatgggtaaggtaagattggatgagagttatcctccctccgaatgataggtatgccttttgccatccatttaatcttcttgaaattctctcaatcactagatcccaaaatccacctgccctggggttcccacccaaaggaagacccagatagattataggtcatccagaagccttgcattcaagcgtctcagccaatctttaaagatgagcttgatccaaattgataccataaatattactcttgtcaagattgaccttaagcccagaaatatgcccaaatgctaacaaaagactcttgagagtctgcaagtcttcctctctagtattagaaaagaagatggtgtcatcggcaaattgcaaatgagataccctagttctatttctacccaccctgaaaccctctaacatatttctctcatctgctctcaaaaacatcctactcaatacatctgctactaaagtaaacaaaaagggggataaagggtcaccttgtcttaatcctctcgatgccttaacccaacctttagcgctaccattcaccaatactgcataagataccgagaacaaacatccactcatccatttcctccatttagaactgaaccccttcttctcgaacacttgatctaaaaaatcccaccttacgtgatcgtaagccttttcaaagtcaattttgaagacgacaccttcctcccatgatcgtcttctctcatccactatctcatttgctatgagaaccgcatccattatttgtctctcttgaacaaaagcgtcttgagtagagtggatggtttcatgcagaacccctcttagacgccctgagagcactttggctattatcttgtagagactagtgatcaaactaatgggtctaaaatctgagattttctttgtcgtactctttttgggcaaaagaacaatgaaagaggcattagtgctttgattgataactccgctcctatgaaattctgcgaacactctcactagatcctccttaatcacatcccaacagtcttggaatactgcaatagtaaagccatcaggcctcggagctttgtccctatccatctgaaaaatggccttagaaatctcttcttcagtgaaaggggcatccaaccttatcgcgctctcttccgaaataggggaccaatctaatccttcaatactccaagactctcctataggactcgcgtagagtttttcaaagtaaagtaagatctcctctgtgattctctcagcattattcaacactaagcccctatcattttccaacgccttgatatatttcctatttcgcctgccattagccactttatgaaaaaacttagagttgcaattcccttccttaacccatttcaccctaactttttgtctccaatggatttcctccctcaaaattaatttctctagctccccttttcttaaggctctttgatctaacaattcagaggtgagacccccatcctgctcaatggcgtcaaagttatttcacagcctaaactctcatcaattacatgtccatgtatgtcactccctctccccttctcttttgtttctcttttaacctcttcttcccttcttagtctccatctcttaactcatttctcttccattgaccttcaagcccacttctcttttctccctttctcattcttcccacttctcagccgtcaccacgtcaataatcaccatcttgatctctttgctttttggttttttttgttcttcattcatctatttgagacttaacactccactcctcgctctgccttccatgctgaagttattcttcttattttttcttttttcttttttaaattttcaattttctatttaaaacttaacactcctctctaccttccatgaaataagttttttttccacattcacttttttttttaatgttagatttttatttatttattttgtttgttttttatattgttatctatttgcttatttaattatgtagtccaccaatttctttttttgtttttttttacatgtagcaaaaatttgatgcaatgcaattatttaggatctttcaagttgcaaaacatttatagaattcaattgtcattgttttttcaatatgagtcagtttgatttaaagggtttgagaaaagattttgagtaggaatatgttattaaaaattttgatgagaagtatactagtcattattttgtaatcaaaggtgtagcaagggtgtaaattgactcgaacatcatttggccataacccatcatggcaaaagcatatataaagttagtgaagatatagagttggaatgtaaagacgcattagccaattttggagaatgaaaatcaaaacgaaatcagctgattaaaatattggcatgagtccagatccaatttatgagagtgtctcttccagagcaattgggagtgagtgggcaacccataccttggagaccaatagataaatccaccacttcaaaacctaacaaagtactttgaattccaaatggaagcatgaagaaagaaaagacgtaggtaggaaaattgaaggttttatgtatttgaaatgcctattatctgatgcagttaatgatccttattaggtttatattgttgatgttgttgcaaactttgggcctaagttgaagccttcatttatgaattaactgaggacatggattctcaaggaagaagttaatgactaaatatcatgatgagagtatataaaaaaacttgaaaggaacatggatgctcaattatatcaaatagttggacatatgagaagagtaggtgtctaatcaatttgctaataagtagtcatgattttttaaatcaattattgtgtatgatacaatgaaaaaaatggagagtttgacttttaaatatcttgatgaagtagttgaagaaattgaagaagacaatgttgtgcaattactaataatgccacaaattatatgaatgttgagatgagaagtattgaaaagatgacataattgtactagactacttatgctactcattgtattaatttgatgttgggggccattggaaagctaaaggttcatgccaatacactatcacaagttaggcatgtggtaaagttcatatgtggacacatttgggttcttagtttgatgagaacatttataaaaactcatgaacttatttgttcagcaattacatgggttgtactatatttcttactctccaaagtctttataaggaaaaccaatctcttatagcaatgttctcctctgataaatggtgctcaagaaggtgaacgataaagatcgatggtgtcaaagcgcaaagtattgtgtcgtttgatcccatttttttacttcatgtttcttttgttataaagaccacaatctcataggttagtatcttgacaaaagttgatttggtggacttggccaaagaaaaaattgtatttagttgtgtggacaataataacaaatatgggccaatttggaaaaaataaataaatgcaacctccacaactttgtcaatcttttcatgccacagctattatcttaatcatcaactatattatgaagataagatctctaatgtggatgaggtgaggcgggggttatctaaatgtgtggacaaaatgttggattatgaatgtctaacaataggcattaagttaaacttgtatggccaagcaagagatgaatttggaatctatgttgcaattaattcttgaaaatttaggagtccatttttgtatcttttctttctcttgtatcttttcttcttaatatgtttttcttcgtttctaatcaaaaaaaaaaaaaattaggagtccatttatagtgcttcagcgtatgagaggaattggagcacttttgaattgatattacttataatttttagtacatgtctttcaattctaatattggctaatttgaatttaacattcaaatctttaaatatttcaaccttaacatatatatatgtatggttagttgttctcaaggtgtctttcaaaagatatggcacaatttgttgtgttagaaaagaccttgtttcattcaattagtgtttataatagggcatgcaaatgcaagatttgaattgatatgataagtgtggaataagtgatcaaagcacgcttttgctcataaataaaagaagttcatgcattggcaaacaaacttcaaaagagtagtgaaggaaagtaaatgaagaagaatacagaagttagagactactcaatcaatagatcttagaggattgggcatagtgcaatctattagtacaagactagctattgtaaggtttttttattcatttttggatttaacaagaaggagaaatagactttgaaaataaaaggttaaatgctctagcatatgtatatggaaaaacaatgttgatctaatttggtagaggaaattgattctaatgatgaatagacaatggagaagcgactcccctcctattgcttgatattccgttacttgaagatgatgaactatccaatgttgatgtcgttaggaatttgtcatcaaaggtcaaagagattccaacaccattggtcaaaataggttatttgccttcctacaagagaaaacatgataagttcggaagttaatatgagaaaattaaagttataaactcaattaaatttaatcatgaagttgtaatagtttacacccaatttgcactttatgttaggtaaatctggagacaaaggtaaaaagaagaaaatcaatttggcaccaattaatgaaggtgaggaactagatgaaatagggggatttaatggtgcaatctttcccacaatcgatatattggacgaggatgaagatgacattggagaggaggatttgaattgaatggaagtgtgacttttcaagacttaaatggaagtatgaaacaactagcatgattttttgtgacttaaaatagacttgttatgaaatttattgtttattttatttaatttttatttccgtatgcattttaaattattttaaatatttggaaattagggtcccaaaaggcttacacctcatctcacgtgcacaaaaacactttgccttacactttcacccttaaaaactttggcaacttgtttggaaattttagagtccgaagtactaccattcttaaacaaaaaaataaaaacaaagaaagtcatcaagcctgtaacaaaaaacttgaacagtttgctacttagctaagttgtgagcccagtgatcatatttggagctgaggattgtgtaatgtgacacgcttctcaatgcttctttttctttctctgatttctgtcccatagcaatctagttctcacttgtcaaactaaagacatatctatgtagcaatttttcacccagtcatgtagaatttaatgctcacttcttatcatgtttcagatctctaaaatttcatgctcacctcttataatgtttcagatctctaaatttatgatcagatacccattcatatgttttctctatgatgttccaactttgctcgtactaagagaattgctttggatattttgttttgacagggttcattacggttgcttgtgtc

SEQ ID NO: 13122 - DNA, 8545 bp, Vitis vinifera
  Intron number 2 from transcript GSVIVT01022414001 (locus G SVIVG01022414001) derived from phytozome v7.0 (chr-ID chr7 ; pos 19881991 to 19890535 reverse strand)
gaaactagtggtaagctgtatcccttatgtacatcaaaatatatctttctcaattgtattttgtatctcatttatttgaattacaggcttatgaatttcctggttatttgtatctaactcatttgctatgtgaaaataacattattttcaaaaacttgtttttctcaaacttttatgccctcttggtattattttattgtgttcattcaaaggatctacagtagcggatgaggcataatacaggagaacctttgtttcttgaatgttggtgttgttggctagttgtgggtcagcctgagaaggtaaatgctgatagccttgctgcttacctgctcatttatggtgacaaatgttttggagctgttacggagttcttgttggatttatgcctgttgatgtagttgccacatctaagagctatggaaaatacaagtgatgtctctatgggtttggatttgattggtttagagtccttatttggtggagttagtgccaatggtggtgtttgaggctggtttaatgggtaagattggtaaacaaagagaaactagggtttggggcttaggttcaatggtagagacgcttggagtgccacacatggcctttaacagcgaaaagatgtattggaagaaataatactgtaaagtaacatgtatagataaataaagaaaaaattctggattcaaggctctaacaaaatgacggtttctttaagataaatttgccacccttccagtaactttatgagtgcaaataggacaattggaaaaaaagggtatacgagaaggcatttttttctaaagttttctggtttataggatttgcattgcttgtaaatagcctcaacttcaaataaataaaactaaaatgccagggatatgagaagaaggcatttttcttttctattttttgtataatataagacatattttgaaatattctaacaaggtgatggttccttgagggagtctttcttaagtgttaagaggacacccagtaaggggactagatgagcgtaggagaaagaagtgctacttgaatcagtgggcttattgattgagcacttcaaaatcttataaactgttacttttgtaatcaggtagaccagtgggaggaccagattctagggctaggtggtttttctgagatcccttgtcctccatgtggggaggggattagtctggttccttgtggccaactggacgtatcacttcagtatatttgttgagtgtttatctgtttaggcatcagattcttttggtgcctagatcttaggacatgggaacaccactaaataatcattttttttcctcattctataacctgggccaaattgaagtatatctctaatttgaaaagtttgatgtgggtatttgacttgtattcatgcaacaaacaaacggataacaggtgtctaaggtaactgaaggaactttgtttcttcttcttcctttttttgatctgttgggtaaatggtctgaccaataggcatgttaggcacacattcttagtcctcacccaaacccttttcatatcatgtctaacatggggtacattcacacactatggagtttgcacgtgacatttgcaaattgcaatcaatattgcatcaaggattttcttgtttttggccaagatattttatgcttcacacaataacttattgatcacctcttttcaatctctgggctaggacataatagtttataaattccatccacaaagcctatctgtataaagtccttaagattctcaattccccctctccttggaacaagagtaatgaaagttgcattcaagcttttcttggactctctgatatcatgaaatgagttttgctctctcagtacctgcttttaaccacattcaattatgttgctagattgccattttgaactggtctaggcttggagccttatcttcattttccttttggagccttcatagcctcctccccaaattcttcttcaagccaccattctcaatcaagctagtagactggaattccatactgtccaacctattttccaatggtatttgaaaaaggttgatgaagtagtgaactaatctatttcacatatcttccctcatgttcattctcattgtcctcaatctcctagtaaggttgtctataatgagcattccacacttgctaaagaactttgtatttagaacccccatcctttcaaaattcatccctggtatctgatgccaaaaccttcattttggccaatccaaagacttccttcacatgacacctccacttttgacaaacccctttctttttccttgtcctgttcctttatcttttccatgttgcatttttttcccatcttttctagttggaataactcttgctttttttttttttttttttttttttgctgctataccctgagtcactttcatcgttctttttaaggccttccttgagtggttgtcttcttaaccataattaaactatcaattctttatcacttgataaccccttttcttttaaccttatgacttcaactctgaacatacattttcccctccataaatcaccactatcaaacaaaatcagggtgtggcacatgtggagaaacacgtttcttaaggaattttgactttgtattttatgtaaataggtttaaatttggtagataatgtaatctttgattttttgggatttaatccctgattttttgggatttaatccctgatttatagggatttagtttactgatttatggggatttggtttagggtagttttagttttctataatactcctatggcttgtcctttttgatataaccagatgagtattctatttagaatgtatgagattttcttctcaatttttccacatggtatcagagccttaggctctcagaattcacattcttttgtcctttgtcaacctggttttcttcttaagacctagtattcttctatagtcaagttctggttctctgccccttattcaatcagagtttctagttctttgctctttcttcaatttagaagaaaaagaaaacatccaccatgtctaagacatccgaagccaccaacattttttttttgatcagaaacaaacatatgtattaattgagaataaaaagaacatgagaaggatgagaaatcctcctcaagaaatacaaacctgataaaagaactgagaaaacctccactttacaatggggctatacaaaaagtacaaaaaacctatacaagtgtaacagctcctgaccctgtagacccagccctaaggtgtacaaatcgaaagccaactaagttgaattacactcaaagggtagggtttaaaaacgtttgtacaataaacccaaaagaaacaaggaaatcaagcaaattccacatcatgtcttccaagtatcctaaaaagtcctagttttcctctctcttcacacaatccataacaaagaaagacatgtgatcctccgaagccaccaatgttcctgcagtacaaccaactgaagggctgccaagtcagttcaatggggagcttcaaaacattcacgccacataccggttgaatgggaagaattatttgtaggtcacaagttgtgaagacattcttgaaggggaaaggaaagtcacttgttgtgtatgggaccagagcaaagtgatcccaaattccagatttgggatgaggaagattccatgattatgtcatggctttggaattcaatactacctgagattagtagcactttcatgtttttgtccacagctaaagaaatttgggaggcagtgagacagacttactgaaagttacggggtgcagcacaaatatttgagataaagatgaagatttcagccaccaaagaaggtgagcgtttggtgattgaatatgccaatctcctgaaatatttgtgtcaagagatgaattattatcaattcattcaaatgaaggatagtcaggatgctgccatattgaaaagatttgttgagaaagaaagaattttcgaattccttgttggtctaaatctagagtttgatcaagtctgagttcaggtcttaggaaaagaggacctaccatctataaatgaaactatttccataattcgagcagagaaaggaagaagaggtgtaatgatgaatgaaacacctacggtaaaagctcagctgtgctgtcaaacgctggaaatatgaagaatgttgtagaaaatcagtccaatgttgcaaacaaacaaccagattcgtccaggtggtgtaataactgcaagaaacctgggcacactaagagtgcgtttggtagtggttctaaaaaacgtttctaacattttaaatacttaaataatgaaaattttcaagtattaaaaatgttagaaacactttctaaaatcattaccaaacgggctctaaggatatgtgctggaagttgcacgaaaggccaccaaacttcaacaacaataataggggatggagacctaatggtgaacaacaacaaaaagttcaagggcagacaaatctcaccaacatcaatctgctaaatgatgagaatgagacccaaacacatggagagttcaaggaggatattgagaggctgaaaagattgttaagatcatttgaaaaaccctttggtgcttgctccttatcactttcaggtaaatactctgtttctcatgcatttaatgtcttagacttgcctctttcagattcttgggtcattgattcaggagccatggaccatatgactgactccgctttgaaattctgttcctactcaccttgtctaagtaacaagaaaatttccatagtagatggctctttgatagctggtcaaggaaaaattcatataaatttgtctcttaccttagataatgtccttcatgttccaaaactttcaactaatcttgtgtccatacattggatcatcaaagatatgaattgttgtgtagtcttttacccttctcattgtgtttttcaagaccaaagttcggggaagacgattggacttgttaaagaaaaaaacgagctttactatcttgatgtattgggtgatcaaaataggactgagaacaaatttcccttgtcatacttaaccaaaagctccatctcaaagaaggacaagatttggcttcatcatctttatttaggacacccttcctttaatatactcaaagttttatttccttaattgttccaagaattggatgtagaaagctttcattgtgaagtttgtgaacttgcaaaacattgtatttttagtttcctacatcattagtttctatttccatttgtttctgtttttaatttcctacattattagtttctattttagattagtttctattttctacattattagtttttatttcgggttcatcattagttttctatttctttcctagtttccaattacctgaattttctatttctagtttcctattttagttatttccattatttttgcattacaaacattatcgtgtttcaagcataattagcaagctagcagtgcatgatataactcactagcttgagggggagtgtggagaaacacgtttcttaaggggttttaactttgtattttatgtaaataggtttaaatctgggagataatgtaatccctgttttttggggatttagtccctgatttatatggatttagtttattgatttatagggatttggtttagggtcgttttagttttctatagcactcctatggcttgtcctttttgtgtataactagatgagtattctatttagaatgtatgagattttcttctcaatttttccacagatccaaaactgatctaggtagaatgcaatggaagatgttcgaaaattattattattatttttataagcaaacaaagcaaatattataatgaaagcattagaaaaaggcactgcaaggtataaatgatgcatacaaagatcgccaaaataggtaaacaaaaaggaaaatggaaaacaaaaaacaactttcctttccttacttcaagcttagctagtctacaaagcctaccattgaagaagcatcatcatctatatatagtctaatctagctcaattcatgaagttatgcataaaggaagttttaagctcttgtttcgactgctttacgcctttaaaagatctcatgctttctttctcttctttcccataaagaaccatccaaactcagaaggttgcctttatcggaatagtgcattacccaggccactctaaacaaagagaaagctaactaccacaagatttgtgctatggggtagtgaggcaagtgatcaactgactctccatcccctttacacatgtagcatttgttcgaaaagttcaaaccctccaactaagctagtcaagagttaagatccttccctaaacagtttcctaagagaagaaacccaccttcattggcacctaaggattccaaatgatcttgcagggaagggctcattacttccctgggttaaggatgcatagaaagatttaacaaagaacttacccgtctttgtttccttctaacttaaattgttttccacatcccttctaattgagaaaggatgcagttttcaaaaaaaagattttcactctcgattcacaatcacagggttatctatggaaatgggggctccatagcctcccttctcgagctctcacaaatctactatccaagattctttgttagtgggtttggaaaaaagcaataagaaaacctcttccaaagagatatcacctcactagatatctttctagaattctattcatctaccattacccacaattaaatgagtctacttttaaatatttcccagccattttttatggccctctatagcccaccctatagctattccctcttttgacccatgccttctagttataagctgtttccatagggactctctctcaaatgtgaatctccaactccatttacttagaagagcattgttaagagtatggagctttttgatgccaagccccccatcccttttgtctaagcaaatggtggcccaattaggaatggtgaaaagagacatgaagtatatcaacatacttgatagtgtacttttgatcacaatgagtccccttccttttgaaagctattatctctcctacaaggctaactttctctgaaactcttctccattgagtcccatacccttgttgatttgtgaggtgcacccaaaggcaattctaagtgtgtagaaggtaggctacccttattgatttgtgaggtgcacccaaaggcaggcctaagtgtgtagaagttaggcttctgactttgcctcccaacatggaggtaaggtcctccacatatgttgtttcctctactgggataggcttacctttctccaaatttacccttgggttgaaatcacctcgaacaacataagagctcatcgtagatacttcaatgctccttgttagcattgcaaaatattagggtattattagcaaacaacaaatgggataatttcatccccgccccacctcaacctccctctttgaaacccaagaagaagcccccttgtcagttttcagaatctgactgagagcctccatggcctctaaaggaagggataaggggaaagagggtctctccacctcaaacccttggagctctagaaagaatcagatagaaccccattgactaggatagagaatttttccgtagaaatgcaccatttgatccatctcacccatttatgaccgaagtccattttctctagaattgttggcaagaagtccaagtttacatgatcatatgccttttcgatgtctatcttgcaaatgacccaactgatgttaactctttagcctttgaatctaaggcctacttgcaatgagggctacatgtaaaatttgcctaatttgcctacgctccacgaaagcttgttggaacattgaaaccaccttacccaccacctccttgagttggttagccaacaccttatctaggattttatacaaccccccaactaagcttataggtctggaagacatttggaaaatgctcatccaaatccatcgtaactatgatataatgctttatttttgctttatatatttttcttgtacatcataatgcgtgggaaaatgtaaaatctgtgaccacaaaagttgatcaacttttttgttgtccttagcaggttaaaatcctctagcactttaacttttcttgtttatgtttatttattctgaattcattgcaaactactttcaatcaggttacattcttctaagaatactggcatttaagagaatttgatttatcttgattttattttgcaacaatctatgcagtttttcttcaatttgtcatgcagttatgatatggtgaacttcttgacttaaatcttgtctgcattatagtgatttttaatgttttcattccacctgcttgatggacaaaggatcactaaaaatgcttttcatgtttgcactattgtcatttggtgttatcagataacaatactggagatatcaattgttgtgtttgtacacactagagaaaataattctgttaagtgtgttaaagtttcattcaattgtctaggatctggcaataaagtaaattgggaacaaa

SEQ ID NO: 13123 - DNA, 9398 bp, Vitis vinifera
  Intron number 2 from transcript GSVIVT01037995001 (locus G SVIVG01037995001) derived from phytozome v7.0 (chr-ID chr1 0; pos 12221448 to 12230845 reverse strand)
cctgtatttgagttaaagacacggcacctgaagctgccattgttggaaaatttttatatgggctaacattaattgaataatttgtatttgcaaaaacgggttaatggatagtttattctataatgagcccaattaattagtgatcacattttacattgggttttgcatcttttgagtagaagctcagttgagtggcaagtgtgggctatgggtctcattgaagctcattatgggagggcccaatgagaattcaatttgagttatgctaagtcccctctctaatctagataaaaagggtttttctgttttcccatagagccaccatagctattatcaagatcataaagaggaagacttggttacaacaatcaatcacgttttttttatcatggctcaaacaggtatgttctttatagtgatttcctattgttagtatcttttagtcatgtatgattaatctatgtgattatgtaaatatttttacatgtggtatcagagcctgatttacatgatttaggatctacatttggaaatcgaaaataaaatttttagtttcttattttattttattttcgaagccaaatctgtgatccatgaatgtgcatgtttttttttttttgtttcttttgattgtgaaactttagggtttttgttcctcttgtcacaagcttcaaattgatatatcatatgtgcaatttcgttgtttaaattgggagtaattaaatttttaaattttcggaattttcttgtttaaagattcaagaaaaatgttatttgatcaaattattgtgttttactcaaattaaactcttagattttgttgtttacatatattatagttgatatgtagcatcaatttcagttttttggctcaatttggtgaaaattgaaaatttgaaaatatgggtatgaaccctagaaaattcgttttattttttaaaaaaaaaataaaaaaattgagcaagattgagaagttttttttttgtttaattaattgttgtaaagagacttcttatattgttaatgtaaaaatacatgtaaaatgaggctgaaataggtgttaaaatagagtttttcaatcttggctatggagacatgaaaaaccaaattttgttaatcaattatggagatctttaagttgttttttttatgattaaatgtcctagaattgttagaaacaacctaaagtttaaaagccctcaagatcccgatcaaaaaaaaaaaacattttttttcaattgtttgtaattcaggttgcaaccgggtcatttgacccgtattgtagaattttggacccaatgctggaggttgaagatgacctccagcacataccacatgttccacacgttccccactcgtgggtcaagtgtgtgaggcgcgtataacctcatccggtgtccgttttgagccccgttttttcctatgcgctcgtttttttgtaatctatttttctagatatattattttattttttgggggtcaaaaatatttattaaataattattacttatttatgtgatttaattagcttaaaattattttttggtataattttatgttgagaatttaccagaaattatgctaatatatatggaataggagtgtagtactcactctctctagattgaaactttttcatgcatactctcctacttggtctaaatcacataaactagttaaataattaatttaaagtgtaataaataaataaaaattgttgttcaaattcttgcaactataattgatcatatgcatatatatctctaatatgcactattgttgttgggcaatttttttttttaatttacccaattttggaacgttgcatgtgaattgttgaggttattttaccaaagtgatttaaccatcaaaatttgcaagtttatgagttcctattttgttgatggggaaaattttagattaatttgtacaatcgcctgcccaaagggggttattgtgcaaattaatttaacaacatgaggatattgaatgggataaataatttgataaatttatttgcccaaaggaaataaattttaataaattatttgttgatcttcatgcttagagaatagttgtttattgtggactctgcccaaagggagtttatgatagtacaattgattcttgtattgtattacttatgattatttaagttttttcttttttttacctattgcccataattgatctagttgcaaaattttgtcaatcaatttcctttgctgtgaacaacaataatgctataattgaaattctaagtgggtcaaattataagaaatggagatcaaacatagagtttgttttaggaatgatggacttggacatggctctacgtgaagatgaacctcctaaacctactaatgaaagcactgaagctataagagctcattatgcgaaatgggaaaaatcgaaccgtttgagtcttatttcaatcaagaggtccattgctgagcatctccttggaggaatacctgagagcaacaatgctaaggaatttctcgttgttgtggcaaatagataccaaacatatgacaatgctgaagctgggcattttatggatgaattgatgaatatgaggtatgatgatatgaaaggggttcgtgagtatatcctaaaaatggtgcatcttcagactagattgaaagcactagacattcccattcccaataagtttattgttcatcaagccctcaatactctgccatcttcttttagccaaatcaagactgcatacaacaccctgaatcagtcttggggtgtgaatgacctgatcactaagtgtgtggctgaggaagaaaagctgaaaagagaaaagaatgaatctgctcatctcgttgctcttggaaaaccgaataatcaaaaaagagttgaaaagactagaaagcccaacttccatagtcataagaaaaataagaatttcaagaagagtgggagtgaaaagcagaagaatggaaatgccaagaacacagaccttaagtgctatcactgcaacaaaaagggtcataagagggttgattgctttaagtttaagaattggctagaaaagaaaaataaggaacagggtatgttatctgtctatgtctgttttgaatctaatttagttaatgttcctttagattcatggtggcttgacagtggtgctactgttcatgttgcaacttctttacaggggataagaaatctgaggaagccaagtgaaaaagagtcaaagcttaaagttggcagtgacatcgggattgatgttgagcatattggggttgctgttttagaattagattctgattttcagcttgttttggacaatgttttatgtgtaccttcgtttagaaggaatttaatttccctttcaatacttgataaagctggatatagtttcacttttgaaaataaaagagttgatgtgatttatgactctaaagtgattggcaattgtgttttatctgatgggctttatagattgtcgttgttatctacttgttcttacaatgttgaaaacaatgttgctaaaagacctttgactaaggaaagatcttcattgttatggcataagcgtttagggcacatttccaaagaacgagtagaacgcttaattagttctgggattcttccccgccttgattatgatgacttagaaatttgtgttgattgtgtgaaaggaaaattgacaaagaataagaaaaagggtgcaactcgtagtcaaaatttgttggagattgttcatacagacattagtggaccttattccactactttgtgtggcaacaagtacttcattacattcattgatgatttttcccgttatggctatgtattttttatcaaaaaaaaggcagatgctcttgaaatgttcaaagtcttccgaactgaagttgagaaacaattggggaaagtcatcaaaattgtgagatctgatcgaggtggtgagtattatgggaagcatggtgatgttggacaacaaaaaggaccttttgcaaggtactttcaagataatggtattgttgctcagtatactatgcctggtagtcctgaacagaatggcgtagcagaaaggcgcaaccgcactcttatggaaatgaagaggagcatgatgggtagatcaaatttgccagaatacttatggggtgaagccattaaaacagcaacctacattttgaaccgtgttcctagtaagtctgtgcctaaaacaccatttgaactatggacagacagaaaacccagtttgaatcattttaaagtatggggatgtccagctgaggtgaaaatctatgatccttctttaaagaagacggattcgagaactactaggtgctactttattgggtatcctagtcactcaaaaggatacaagttttattgttcgactcgtggcactagaattgttgagtctcaagtggcaaagtttttagagtttgatgttgctgatagtataccctctcaatccaatgaaagagtggaacccatggatgttatttctttacgtttgccagtctcagacgttaaccttgatgttggagcttttgattctgggattcaacaaggagatgctgctgtcaatttccctactgtcgaaataagccctattgtggatgagattcctcctgtggaaatgaggagatcacgaagaactaggagacctgccttatctaacgattattatgtttaccttggagagggagagtatgacattggagaagaagtggaccctactacttattttgaagctctcaatagtgataaggcaaatgaatggttgattgccatgagagatgagatgcaatctatgtcagacaatgatgtttgggaacttgttattcttcccaaaggatataaacccattggatgcaaatgggtattcaagaccaaaagagacaacataggaaatgttgaaagatacaaggctcggttggttgctaaagggtatacacagcgagagggcattgatttcacagagactttctcaccagtctctaccaaagattcctttaggctagttatggcgttggtagctcattttgacttagagcttcatcagatggatgtcaagatagcttttctcaatggtgatttgagtgaagaggtctacatgttacaacctgaaggatttaaggaaaagggaaaagagaacatggtatgcagattgaaaaggtcaatttatggtctcaagcaagcttctcgccagtggtacttgaaatttgacaaaattgtgacgtcttttggttttatagagaacaagtttgatcaatgcgtttacatgaaggttaatgggagcaaatacattttcatggttctctatatcgatgacattctacttgctagtagtgatgtgaatctcttgaatgataccaagcgtattttgtctgctaattttaacatgaaggatcttggagaagcatcttttgtgttgggtattgagatttatcgtgatagatctcgaaacctccttgggctatctcagaaagcctatatcaatcgtgtgcttaaaagattcaatatgtagacgtgcaaagctagtgatgtacctgttgtgaagggagataaactcagtaatgaacagtgtccaaagaatgatttggaaaaggatgccatgaagactattccttatgctagtgccattggtagcctgatgtatgcacaagtatgtacaagacctgatatcaccttcattgttaacgttcttggtagatatttattgaaccctggacatgatcattgggttgctgcaaagaaagtcatgagatatctacaaagaacaaagaattttatgcttgtgtataggagagtggataatcttgaggtagttggatactcagattctgattttggtggttgttcttgtgatcgcaaatctacttcaggatacatttttatgttagctggtggagccatttcatggaaaagagtcaaatagagcctaattgcatcctcgaccatgtatgctgagtttgtagcttgttatggtgcatcatctcaagttgtttggctaagaaatttgatttcagagttgcaagttgttgattccatcttttgacccattgtaatttattgtgacaataatgtagttgtgttctactctaagaacaataagattagtacgggttctaagcatatggaaatcaagtaccttacagtcaaggacttagtgaagaaaggagatattgtgattgagcacataagaactgagtccatgctagctgatcctctaaccaaaggtttaaagcccataacgttcaaggaacatgttgtgaatatgggtgtcattaagttttttgattctttggtttagtgggagcttttgtaatttcccttatttcaattattgttttatgcaaacattgatcattattgttctgcaacttgcaaaattaaaatctttttattatgatcatcataattaagtattatattatagcatgtcgtaattgaattacatacaacatggtatcttgagatattgaaccttaagaattacagttgtatactattggatgtcacaaataccactattttgagattttgtgatgcattgttggtgacatataacttattaaagtcaagcaatttcatattgtttagaaattgcagcaatttcattttgttgagaaattgcaattacaatttcattttgctggtaaattgtaatgaggactaataagaaacaatgcatatagatgatgatcacatgttggcattgatttcttactacactattgggtttacgatccatgtcgatatggttataaatattcgtgactataaggggcattatgtttgttgagattaacatatagaccattatagtccaatattaagaccatgttggatgattcatgcccaattggtgtctcagctgattcgtgtccagctggtgctccttgattgagggagtaatcaacaaaatttataacctataacaccatatactagggtagcaaagacaaagctactatagtatagtggctctaggatcgttcactgggaagaattaacaagctatcaatgataccaattcgaagtgaattggccttgtttcatttcaaggttagcttaagaagtaaaacacaaactttgattggtaaaggtttagacttaaactaactaacataacagaagtttggaataatttaggaagaaaagcattccttggagagttaggttcactggggtgattcctcatgcaaaagacatagctccggtcagatgattcatttcctcgtgttagagattcaacatatagtcaattctctaaccggtgttgtacagagactccttcaattagatttcactttaattctctcactgatgcaacttgcaatggtttaagcctctcactaagccttaaccattcaaggtgatccttaaccttggattatccgtcaaaagctcgcaagagataactaatggatgtctccttggagtccaaaagcttaccaagtgttggctattctagaaaatcctaccttgaagtcacctcccagaggctcgcaaggggtaaactagtgcatttccatggttggaaatcacttgccttaccaagtgttggcccaggtgactctaaggtgttttaagttaactaaaaacatagaaatcattaaaggatttcacttcctcttcattaatagctaaaaccacaaagctttgcattcttgcacttggaaccttccccggcaaccttagctccaaggaattagaggtttagttactcattctctggggaaaactcctcagagagttcataacttagtaagaaaatgaaaatacaaagtgagaaggtaaggcagtagaaagaactgaactttacttgcttacccaaacttttacagaaggaactcctctctgagaacaagctcccgagaggtatatatatgaacataatataaaactaattattacatagatatttagtctttttactaacttaaaagctaaggaatcttgtaattggtggtttacaaggagtattttgggatttagacaacaaaaatctaatggaaaatatctctcaatgtcagtagcaaatatcgggaggcttcaggaaccatttcgcaggagaaaaatggtgtctgcgagatttcgcagacactcaagagggctgcgaaataatttcgcaacaccaagctatcttcacagggctacgaagttggcttccaccttgaggttcccagcttccttctcgcggcataaatcgggcatcgtcagaaggagaaacatcacactgtttaaaaaggctgcgaaatcacttcgcaacaaaagggtgatttcgcaacattttgcaaaatgcttcctttagctcggagtgattggcttgtaatggatacaacttcttcgtttcaactccgaattgcacaccgtttgaagcattggattgttgacttcctgagctttgaaatggtatatagcatgcataatttggacttcagaaagtgctccaaaagtggctgctacgactgtcatcaagaatatgcttcatggcagattctctttactttttctccttgcaatccggatttactattggcaaatgacttctaagatttgcccaagattcctcatagctctcctcagtcttgacttgctttggtgatcaaaatactaacaaaaacaccaaaacttacacaaagtgatcaaaattgctttcaagggtccttaacatgccaattgagttaaaaggccaaaactactactcaaaagtgtttaaaaggattaattataggctatcaaatagcactttttgagtagtaatcattggaccggataagtttaacaagatgctatttatagactatcatttctttcaaaaaaaaaaaaaaggtgtggccacacaaaataaacttttctgtatttaacccgagagttttattttcaaaatgaatttaatgaatcctcaaaaacaattaatgtagcccaagtgggagaatgttggaaaatttttatatgggctaacattaattgaataatttgtatttgcaaaaacgggttaatggatagtttattctataatgagcccaattaattagtgatcacattttagattgggttttgcatcttttgagtagaagcttagttgagtggcaagtgtaggctatgggtctcattgaagcccattatgggagggcccaatgagaatccaatttgagttatgctaagtcccctctctaatctagataaaaagggtttttctgttttcccatagagccaccatagttattatcaagatcataaaaatgaagacttggttacaacaatcaatcacgttttttttatcatggctcaaacaggtatgttctttatagtgatttcctattgttagtatcctttaatcatgtatgattaatctatgtgattatgtaaatatttttacagccatcacttgcaattttatctggtgtcctttgtct

SEQ ID NO: 13124 - DNA, 5449 bp, Vitis vinifera
  Intron number 1 from transcript GSVIVT01030535001 (locus G SVIVG01030535001) derived from phytozome v7.0 (chr-ID chr1 2; pos 6555942 to 6561390 reverse strand)
ttctcaagactcagggaatctctcgcgttctcaatgtgaggatacacatattttggtatctttgatttctgtatatttagttaatggttcaaacttcagtgatcacgagtagtcatctgtgctgcagatagggacaataattagcaaaattagtatttgtgcacatgttccttcaattcggtgataaatttagtttattgaatcttgaggattggaattgaaacaattttgaagcatagctggtttcacttgtttgttacctttaccatatttggcactcagaaaagcccttagcttgattaaatattgtattttgcaatcaaacctagttttttgataagtgtttgggggataatgtagtggattcattgaaaggagtgttaattagatgtgatgcaatccagtggttggaaggtgattttattaattctctcctccaattattatgtcactagctagtgctttgtccatgaagttctatgtttcaagtgatttctatctctggttgtgcggatgaggcattattgggaagaggtagttttgacggttatgacggctgtgaatgctatatggcataaactgctttagttatggtgtggaaatctgtgaatgctttatggtatagaatactcaaaagtcaagaaaaatatgaccataaaatgagatttacatgatgaagatgctgagttgggaagtattggataatgaaaaagcattcatgagatgctagagtggtaccctatgaggacaagatgagagttttagctaaggaaatgactttatgcacaaggaggatgggtttagttgagctgaaggtgctactaggacatgcaggaagataaaaaagaatacatgttaaatttgtgagaaaagatacgagggtgtcataattttgaagatgtgactttagttagaggagccatcatggtttgaggcttaaagaagctcacatttatcttttgagttggagcaggggctaacgtggtggtaatttgggttagaaaaaggattcatcctcaggaccttgaacgagtttgccttctttatgcagaggatgcaacttctgtgttgaagggttaggattttctttgctgtgaagtggtggcatgattgaaggttaatttgaagcaagagggcttcgtggtggggaaagtaatgaatctacaatatctggaaattaatgttgggtgttgatgggacttcttataagattaagttggcattttactggattgttgaaagagttggaagcaggtttggtggattagggaggatttaaattctgaaaggggggaattagtgttggttagaagcatatttgttaatgtactgacttgctccatgtctagtttaagattacaggctatccagaagggtagagcaagttcaaatagactttctttgtatgggtgtgttgaagaagttgtgttttgggtattaggttgattgtggttatataagtcaacctctgaaggggaaatggttatggaggtgtttgtgtggcactatggtgatgtaagtggagtttggtgatctaaggagatccatgaagtcaagtgaaggatagcatccatataaaaaaaaaagtagatctatgaagtccttggtggctttcaaaagctatcatgaccagtcttgaatccttgtaagatggacagtgaataaaaatttggaggatttggggtgctgagactccccactaatgccatatccttaatgaaattttcttgataaaccccgacacacacacacacaaaacacaaacaaaaagagacaaaggtgaaaggtttccatgtaagtgtcaaaactaggatataaacaacgcgggtgtaggatgggtcaaccctatctcagcctcacccctatataataagaaaattcccatccctaaactaaatccatggtgggatggggcggctaagtttatttgcatctcagtccaccttggattttgggggtgggttgattcaggatggatcaacttgggccatatatcacttctaacaaataatcagtagaccatcaacagatgaccatactatgaaattgaaattaaaagaacaaagtcatccaccttaaatggccaataattttcccagggaaaaattgaacttttggagaaaatttgtaggatcaaagacccgtataaaggtggaaaaaatcaatcaatgatgtaaaaatgtatttctttcagaatatccctaagataagagcaaagccaagaagataagcaaaatgcagatgcgaaaacacacagatcttgaaacacagatccacctcttctaatcaaaccctaccaaggatcctgaaccccacaaagacgcaaatgccaaaaaacgaagtaaagggcatagaaagcaaaacccacaagcaatgttatcaccggattgagttggtgtccacctctaagtaatagtcttttgttttggatatttgatgaagaccgccaaaggaagatgctggagaaaacaccaaaaaaatgccattgaaaatgcttagaagacgttgaagaaatggatgaatggggcgctagggcttgaaatgtcggaggctgggagtgagaatggagatatttggggaaaatcacattatttatatgggattcataaggaaattttaaaatgttgaagggaaaacatgccatttctatataaataaaagctagacggtcaggttggtataaaatctggtctcctccaactcagcccaagtcttcaaacgcctcactaatttggcttccctatagccatcccaataggggtaggccaggataggtggtcttgtaaacccaatccactaccatccctagtgaaaactgatagaaaagattactaaaatcactttcagggcccaacagtgttgagtagatttacttgctttctaagtaaaaaccatccttcttacatatcaacgccattggtaaaattgtatatagattctgttttcttcattgtttgttaacattgaacacaaatttatctttatatttttaatgtattcactatttttttttcttgaataaatgatatttgaaactgggaatatgtgtttaaaaggggataaaacttaaaagcatggagtatgattatggagcaagtttgtggacaggaaagagaaaaggagtttggagtgtagtggaagtggttatgccgatttttgcaagaatatatgcatatggtaaaatttattgatacacctaaattagttgatcctttatgtttagtgattaagtgattgctttgagatttaaacatttcagaaattttcatgtggaattttgtaggggtttctttttcattcctacaaaactactgcatgaaaggaggtatttgagttttttgataacccagacttgtctcaaactgattcaaggttttcttttttctgatggaaacattggctgtctcgagatatttgcaaatgaagcacattgtttttgggtgggagtgaaggccatatgaaagaaaaaaaaaaaaagacttagtgaagcttttgattccatttattcctatctattatctcccactcttactatcttggtgttggtggtaaataaaatagatacacatgtcaagatatcatttaatggacgcgagatatagtttttacccccttaataatggggaatctgctttgatgatgaggcatttatccaactgccaatgaggcaaaatgatgggcccacccctctaccctagaccacttaaatactgggaaggctcaaacttgaaatctctggtccattgcctgagagcactactgttggtatacactttagggagtggatctaagaaatgttttgtggtttttgcatttatttcatttcttgttatggataaagcccttttgggatggtgactgtggcattattggtgaagaggacaatagctgatgtaaatgcagcactgacaggatatttggtttccagtactggtaggaaattgtgtaatcatggtgctccatgtctatggcctatttctaaagttgttataagaagcattaagttatctcattagctatgggatctttctttttttttttttttttttttttttgataggtaaattttttgtccctactgcgatttgaacatggaacctccctccccaaccctttaccacttgagccatgcctcaagggcttcattagctatgggatcttgtgagggtttgattagatttatggcatagggacctactctctctggagtttttcgtgatttgtttgtataagctttgatcatctttgttggtagataattaggtataattcttgtcttaataaagatattttggaagagtatgagctgggggtttttttcctccaagttttgggaagttgtgggagtaacatgattcaattgatatttagagtctcttgctcttgctgttaagcttgaggtctaatttggaggatttttatagtaggttttggaggtatgccaagtgggttgtccttatgttgcatcatttccttagtctctggttggtgagaaattggatcatggaattggattatccctgaccagtgtgctatgttgaagcctatgggtgttgatgcctctgtggttcacctattattgtttgtttcctgccactagaagccttcactttttggaacaaccaatgatttgttaggcttttgcttctgcggttttggatgtctcaatttgtagcactttgtggccaaatggtaaaatgggtgtgagtttagctttgattggtctttctctattctgggtcaaaataggaacataacagattttttatgatgtagagtcctccatgagtttattggtcaggggaggcttagagataggaaggcccttttattgtgataaatcttcaaccagttgggttagtaatgtaaatcatggtgcataatgttgtcacagaaattttctgtttgcaataactcggttcataatgcttgtttgcgcatattttatcacatgatagtggggaaatgaattccatagaaaggaaaataaagagtattgttaatttgcatttggaattttgttgaaacagtaaaatgtgtggcttatttgttataagttttatggtttcttgttaattcaactaattattgtctaagaaattgtggggtaaccattttttaatcctttactcactttgatgtatagatgtgaggatgttgtttcatttgtttaatggcagaaagcatacctaccatggtctattctttatattttgatgttgttctctatgccattggacatctttaatatcactaacttgttaattggtgataaaaaaattttgtttcattttttcccttttttccttttctaatattcatcattttatgaaaatctttgcaaaaattccttcacttatcactgaataatagaaggcctgacatgatctttatcttattttgtttctttgcagacggtacctgcttgtcaaaatctctacaaaaattc

SEQ ID NO: 13125 - DNA, 6620 bp, Vitis vinifera
  Intron number 7 from transcript GSVIVT01025735001 (locus G SVIVG01025735001) derived from phytozome v7.0 (chr-ID chr8 ; pos 12427707 to 12434326 reverse strand)
agtgctttcaataaagtcgttgacaaagttagaaggttggttgttgctgcatcttgatagagaagtaccactgatatattttggccaagcttgtaactacttcttgatttagaggtggtttgatgctctgtgcaggccatggcttagcctttatttgttggatttattttcttttgcttgtttcttgtatgcttcctatatctccatcctccatcctctactgccacccctgatttgcctgtcaaaatgggtaaattccataataggaacctagaaatcagattgcataatttaagggatcttgtcaaccctttttttgtatatattgtaaatcaaaatgcaatggaatacaagggagattacctttttttttccaacatggtataagagaagtctaacacgaccatgattcgtagagacttcattgctcagtcataaacaaccttcattgttcacttgtttttcttcccaaactagcattaattgttggtgacttagttccccattataattcccttgagtttgagactcattttctccacaaactagatactttgtcttcatttccccaaaatgtctaaaacccattgaaaatacatcatcctcttgagcaaccctacctttgaacccccctctaatattctaaatacttccatttttatccactattcataatgacaacccacactccaaatcaccactcaaaaagtccatggccagaatgtcctgcaatggtcccaatcaactaaacttttcatcaaatgaaaaaggaaagatggctatatcataggttctaaatcaaaacctgactccaatgatctaagatatgaattttgggatgaggaaaattcaacaatcatgtcttggctactacactccatgtagtcgaagattagccaaatgtacttgtttctctccactgctaaagagagttgggatgtgtcagtcaaacttattcaaagattagaatgacagcacaatatatgagttgtagtgttaaattcatgctaattaagcagggaagttgggctctgattgaatattaccacaaactttgagtttatggctgcaattattattgacacagaaatgtagctgttgtggatactgccatagtgaagaaaataatggagcaagagggtgtatttgaattcttggctggtcttaatccagaattagattaagtaagagaacaaatattggggaaacaacctcttccatccatgaaagaggtgtatacctacatgattggagaagtgaggtgttgagttgtgatgcttggaggctttactctaaaaaatttatcattaactactgttggaaatttgaagccaatggcacctaaaggagaaggaaggataccaaatgataaagattcactttggtgtgattattgtcataaaccaagacatacacatgaatcttgctggaaactccatggcaaacctccattaggaagtaaaaagggggagtggtagaggaggaaaacatgccataagatccagataggtgcatcaagtggccattgttgatgtttctcatgaaaccatccctgtcactaaacaataaactattttgctcaacgaggaccattttgaaaagctgaaaacacttcttagccggcttgaaacacatgcacaaagtcctactgcaaatactacctcatgttcatttgtccaaacaagtaatatcaaagctttaagtgtctataaggattgtttatctagtatttggatcatagattcgagtggtaccaaccctatgacaagtaactccaattatttttctacttttcttccatggttagtcaaggcataatctccattcctttgtccttgaaatatgctttacatgttcccaatgacactttcttcattactcctttattcttgaaaaatgtgtttcatgttccaatcttttcttgtaatctcttatttgttagtaacattacagcatggtaagggtaaatgtggatctaccaccttaatacactttggaagattagtgatcctattccacaagctcttgttaccactaataatccctcaaaagttgatcaaatataattatgacacagatggttgggacacccacctttctttctcttggaaaaaatgtttcctgcattgtttggcatgggattttcactgccaggttaatgagtttgtaaaacaccaccatgtgccttttccaataagaaatggattttttttttctccttttagtttaatacctttggatgttccctccagaataccaaatatttcgagttctagatagtttgttactttcattgatgtctacactcctacccacttgggtctatctcctaaatttcaaatatgaagttaattccattttcctaatattccataaattggtttttactcaatttggtgccaaaatccatacctgaaggttagataatgggagggacacttatcttcaatatgaaagtgttgtgcattaatcttcatgtgtagataccccctcaacaaaaagggtagtagagaggaaaaatagacatctcttggaagttgctaggtgcttttactttttcaaatgaatgattcacaattgtattaaggtgaagtcattttgattgctatattcctaataaattgaatgccttctcaaatctttgacttcaatctcttatttgtgtactctccaagtcttttcctaactttaagggtattgaatcccttcctcaaaaaacacttgggtttgtctctttcattcacattcccaaacaatctagagatagacttgatccaagagatcttaggtgtgtctttcttggatattcctctacttaaaagggatataagtgctaccatcatctcacaaaaagactatatatcaccaaggataacaccttctttgaaagttaatcttatttcatacacacttatcttcaagggggagattggaggaattgaagataagatatcaaaagttgttgctatgaatgatgagggtgtccttccccagttggttgatgtgccaaatgtctttactttagatttcacatcaattttccctattatctaagatttttcagccccataatgttcaaattttgcaccaatgtttcttgttgtttcaaatgttccaaccttggatgcctttaatggattagccaatgaacatgagaaattccaataaatttcgaataaattagcatcaaattttgaggaaattttagatgatttgtccattgaaattccaaccaatgaatatgaggatcaagtcaaggagaggtaacacatagtttgagcaaatacctttaaactaatagggcattcgagaaaggaaaaatctatagcatcctcccatatcccatcatcattctagtgtctacgatgatttgtgttggcttattccatcaagaaaggcattagaagatatatgcatcataaattttaccttattacatcgctcattttctacattttttttataggtaaagagtaattgaattaaatttgtcttctacatagtaagcccttattatccaaatgtcttcgattgaaattccaaacacagtttgagaggcacttagaaataagaattggaggaaagcaattaatgaagagatgcaaaaaagaacaagacatgagatataattgaattgcccaaagggaagaaaacaatagattgtaagtggatttttacaattaaatacagggcttatgggacaatggaaaggtttaaggctaagttggtagccaaggtattcactagaacttatggtgatgactactaagagacctttgcacccatggaaaaatgaacactattattattatatattttttgatgggtactgtttgtattacacgtctttagctgctaatcttgattgcctttgtagatttgatgtgaagaatgttttcttacatggcgacttggaagaagaggtatacatggatacctctcttgggtttggtgacaaggctttgaagaacaaagtttacaaacttaagaagtccctttatggacttaaatagtctctaagagcatggtttgagagattttcaaaatcaatgataaaaatgaactatcatcaaagccacagggatcacatactgtgtatcaaacacaactcctctgttaagtttaccaccttgataattaatatggatgccattattgtcactcaaaattctgaggggggaattcaaagaataatagcttatctgtccaatgaatttgagatcaaggatttagggagtctaaagtatttcctcaagattgaagagacactcaaaaggaagaatatttatttccccacaaaatatgtccttgatttttttgtggagcacaaggatgttaggatgtaaatcagcagagactcaaattgaacaaaatcataaactataaggaaaaatagaggatgatatgttagattgtggcctctttgatccattgaagattcgtggggcaatttatctatttatttatctcatactcaaccagacattgtgtatgctataggtgtggtaatccaatccatgcattcaccacatgaatctcacatggaggtagtatatagtgatgctgactgctggaattggaagctcacagtgatgctaattgggctgcatcaattgttgattgaaggtttactattggatattgtacctggagaagtaaaaagtaatcaacaatagctagatctagggcagaacttgagtttagggtcatggctcaagggatttgtgaactactctagttaaagattatttttataggcttggacatcactttgaaaggacccataaagctatattgcaataacaaagtttccataaatatcactcatcacaattgaatcaagcatgtggagatagattgacatttcattaaagaaaagcttgacatcgggctgatttgcagtttgtttgttaccttttttaaacagtttccagacatattaacaaagggcttatcaagttcagcatcttatgcaatcttagacaagctagggatgaaatatatctttgtaccaacttgagggggagtgttagaagaataacctaaaaatcaatgtcttgccatatattattcttttcttgtaaaagttgatctaagattttgtactaagaaatttggataaattccattataggaccctagaaattgtaaagcaaaatgcaatggaatataagggagatttttttatggtgaggcattgtctgatcgaaggctaaaaagtttattccaaaacaatttctctatgtgggttagggtgtatataggtggtggttatatgtatttaattgatttcagagtggttgggtattgggtgagggagggagtatttttttgtaccttcttttctactttttatttgttttacttgtatgcaacttgtatactcttgcgctctttttgtgcctttttaatacaatttctttcttatatatatataaatgtaacccctttaacatacaagtcatgtttatgtttggatgtccaacccatggaacttttttagttaattgtgtcgatatggcatgattatgtccccaaccacttacaacccatttggcctaaaaatttataaatcttgtatactgtaaattataaaagtaaaataaaatataaaactaaaagttcatataatcttctaccttatagatactaaaaatttaaaaatgtgttgtttgtttggatacacttcttgtttatatttttaaaaatagaaaatgacaataacttttatataaaatgcaatacctttttgagagttacttaaaaagatgatgtcttttaaatactgtttaaaaaaattgagatcttaaagaaactttaccacctcaaatcttaaaagtgttttttaaagatatttggtaagttcatacattttatatgaaagttactatattttatataaaagttaaaaatagaaaacataaagtgtatccaaacatgcactagtttaattaattaacataaatgttttgtaattaaaaaatgatagaattattacaaaaatgtaacactaaacatttgtatttatagttaagaagataaataattagagtgatgaaggctttaaaaaattaaaaagaaaaacaaagattgaaagtaaaaaacaagcaaagtaccaaattaccaaaataaatccttatatatttaaacattgaaaatatgttgtgattgaaaaaagtacatagcattctaacaaaagtttaaaactaaaaatttgctttatcttccatttaaaaatctaagtacttaaactaaaaaatatgaaaaactatagtgtaaactatctaactaaaattaaaaataaaaaataaaatacaagaacaaagatcaaaaaggttcaagtataaaaatttaacaaaatagaattaaataaaattttaacaccttaccaaattgaatccttacgcattttaaaaattattgtatggctaatgcaatagcctgcactatatgatttactagtacaacagagacatcaaacatgatttgatgtctgctaatgtgagtttattgaagtaagtttttcttgaatgaaacagttgattagacagatgtgtgatgggattgttgtttataattgtgcagagatacttggagctgctggggaagcagttgcagat

SEQ ID NO: 13126 - DNA, 8374 bp, Vitis vinifera
  Intron number 14 from transcript GSVIVT01018483001 (locus GSVIVG01018483001) derived from phytozome v7.0 (chr-ID chr 16; pos 14448483 to 14456856 reverse strand)
ttgcttcagtggctttctgcttattatctgcttgggtaagcgtaccatatacttcctttatgtttattaaggctaagactgtgtttgttgctgcaacataagtttgtatctatgttattatcttggaagtcaagtactttggtctctcttttgtcttcgtgctcttgaatttccaagatgaaccttgtcacatcatcactgcaccttaaaaagaaaatagtatttttctacttggtttcaggatgaattttggcattactatgactgaacactgcatcatgccataagaaaattcaaaaactaaacattctaaagacaaccagtttagcaagtgtccaaggcacttcaataataaagttcccagtaatgtccaatattagacttttgaaacaacacctttaatatgctgatgaaattccaaattagtatcaacaaaatttctgaaaagtacatgttcaagattaacaaggtggacttaccatggaaaagggcaacacttttactgaagtttctatattttaaaatataagtattaaataaaacaccatatgtgaatagtttagacgtaatactttctagttttccaataaacttgttcccatgaaatacaaatatgcatattacaattcatatgattaatattctaatttctcacttctgaccccaattatgtggatataaacttcacaacctacaaaagagagtcaaatgttgaataaagaaaacttgtacaagtctagccacctcatattgcagtgccaaacttcaatcatgcagtcaattcatgaaaaagagaaattaattaaatttgatcacattcctaaagaatttctcatccaaatttaatcacatggattaacattttcttgcagaatctacaacactatatgctttttttttttttttacaagtaaatgagtattgtattaataaaaaggtatacacgatgtacacatacaaaaaaccaatagggacgataacacaactgcaccctacggggaacttaaccaatccacaaaatctatcaaaaaagtaatgctaccccccatgcacactctaatctaatcccaaaataaatacaaaaaagaacttttaaaagtttgatctaaggattccctatcctcaaaagctctccaatttctttccctccaaatggaccaaaaaatgcagagaggggcaactttccaagccttcttcctttttttgccaactagaacaccattccaacttaggagcacccccctcacagaagaatgcatcacccattgaaaatgaaaaagagcacaaaccagctaccgcaatgtacttgctttcgaacaatgcaaaagtaaatgatctcccgattcctcttcagccttgcacatgtagtacttgtttggcatccatccccccttttgagttgatccagtgtcaaaatcttagaccaagttgcctcccaagcgaaaaagctggttctaacaagggcctaagagttccacattgtattgtgtgggaaaggctccactcttctactagccagagaagagtaaaaggactggattgaaaaatcaccatccttagtctccaaccaaaccatgacatcaaaagtacccaaaacagtggagtagttatgcaacctcccgaataaggcatctacctcctctatctcctaatcattgaattgtctaataaaccttggtctccaactacccccatcccaaacatctaccacccaagcatccttaaaggaagctatatagcataaagatccgggaactcatcccttaatgacatatcaccacaccatctatcttaccagaatttgacccgattccccgaaccaacctgaagcctcgttttatctttgaaggcctcccaaccatttctaattgtcttccatactcgtacaccatacctccctctcacctcctttatgcaccactccccctcccgaatcttgtacttaccaataattacccattttcaaagagggttcctttctttcacaaatctccaagaccatttacccaaaagtgccttattgaagagagaaaggcttttaaacccccccattttgcttctccaaacacacaatcgactaattagccaaatgagactttttctccaactctcctccccacaggaattctttttgaattttttccaatctagccaccacttttttagggataacaaatagggacataaagtaaatgggcaaactaggtaaagtactcttaatcagcttctgccttccaccttttgacaaatatcgtctcttccacaaagcaaaccttttttggaacctttcctccacagcttcccataccctactagtaaagagcatccaaggggaggcctaagtaagtggatggaagagaacgcaccttacaacctaaaacctcgacaaactcctccaaatttagaaccttcccaacgggaatcaattcacttttctccaaattaatcttaagacccaagcatgtctcgaaccacataaaaacctagctcaagtactccaagttttccttacttgtataaaaaaacaatgagagtatcatcagcaaagaacaaatggatacctcgacacctgcatcattcctctctttaactcggaaacccttaataaaactaccatcctttgccctagagatcaaaccggaaaggatctccatcaccaaaagaaaacaaataaggagacaaaggatctccttgactcaaccctctagagctgctgaagaaactagaaggagatccttgtttcaaccctctagtgttgaatctacaacactaaatgttctgcacatttagtatcaaatcttcttgtcttaatgtgatattttatttcaacaaattaggaagtcaaaattttcaaatatatagtgaagccttaatcattaccttcctcttgaggcaagttattgttgaatgcatcacaactcaataggcccaggcaaattgacattgaaactgataaaacaagtacacgttggaggaagattttccaactatgataaaatattaaggttaagttgttcatgaaatctaagacaaaagcaaaaataaaaaattagaaaataaatttttttagtaacaatacaacatgtaataatgaaaaaaggtttgagtattttaaatgatgtgcctttcatctcaaaccatagccaactttaagaacacatcaaggtctccatgttagattttgtggattggttaggctcttcgtagggtgcaattgttggtttttgtgtattcacgcttatttgttttttgggttgtttgtatacatcgtgtataccttttatttttttaatacaatttgcatttaccgataaaaaaaaaaaaattgttggtgtactaccctatcacttgtattacaaagttgactttgatgcaactatagatataagaatagcatagatgtgtttgatcattttctaaaaagttggatatttaacactatctatcttccaccatatcaagacatcaaaactaggacaacatggcacaataggctcctctcatgttgcatgggtttggtttgagtgtcaaatatggatgtgtgtaggtgtctttattcttcacaactccaattttaggatacgggggtttggctaaaaggaatccacaaaatgggtatgggtactgggatataacaaaataaaagaaaaatcaactgaaaataaattggaagtgaagatatccttaaattcccaccttttccctctaattccctttttttcctcttatccccaaatattcctacaaaatttcactttttagctaactcatctttttgtctaatgtaattattgttagaaagttgaaaaaaaataaaaggatattaatgaacaaatcaaacaacaacatctacaataaaataggagtgtccaacaaggatcccatacccacagccatatcatgttgtatcaaaatgggtacactgggtgagattgaaggatctaggtatcgtagggttcctttaagtaatggtctaactttggcttcacatgaaccacttcaaagcaacgatcaacaaataaataaccaatacatcaaaagaatgaccttatcataatagatgtgaagatgatccaactccattggaagaagcttggtggctcaacttaagactttaattgatactcataaaacaacttgtaacaaacttggacagactttttcaattttgtttgaagcttccaacccataaattgttggaaagtacaagtaaaaaagcttcatccaaatgctattgtcatcatggagtgacacacacaatagtacttatcaaaattttccaaaatagataaggtcattgttcttataacatcaatggaataggtgagccaatcatgcaatgcttctctaatttcacaaactttaacaacattgttacactgaaaaactactctaatatctctcatattttgttgtcatatcccactcttgttttgatgacacatgtgtagtgtttttcatgttgcttcaaccatgggaacacatcgttataagtgataacagttgatagtatcaagtgtgtagatttccactgtgttttcaatcaaggcattacttagtgcatgaaaactttccactcttgatggtgttgctaaccaaaataagacattctcatgaattttgtgaatctctacccctatgagattcaagccatccttcacaatcaagttcaacatgtgtggcacattgcatatgaagtaacatccaatctaagaaaagtgaaatagtcacaaataaattatccaaaaaaacattaattgtcaatattccattgaaaccaacaatccattaaaacttcattgcttttatatgtggaggaggcacataaacaaacctatcaaaaaattacaaaacttgcgattaatacaagtattatcattaaagaataaaatggacaaaaaagataaaataaatcaaacaataatataactaattaaataatccgatgatatagtgatgaacacaagtcaataactcgtgttgtgatagccatgttgcttttcttttgctgatgtccacatatcaattgtcactacaactcaactttcaaggtttccctagttcttataagttatatatataaaatattagatataagtgtttttttcaacctcatagatacttattataacgatccactctcaatcgtgtaggtattatccgctttaggctcaaagagcccttacagttttaaaacacttgtacaaggttaagagaagtttgtacatatatagcattaggaactttttccactacccaatgtgaaatatcacattcgccctcccatgcagacacaatgtccttgttgtatcctacgggattacgaggccaaatagacaaactcctcttgtagggccaaacaaacaaagtcccacgttgagtttaggattgactctgataccatttgtaatggcccactttcaatcgtgtaaatatcgtttactttgagtccaaagggacctcacgactttaaaatgtatttataatgttaagaggagctcatacatatgtagtgtcatgaactttttcctttatccgatatgagatagcataataatgtttttggggtgaggttaattgtgatatcccacatcagataagggaaaaagtttttgacactatatatgtatgtgctcttcttaaccttataaatgcattttaaaactgtgtgggcctaaagcgaataatatctacatggttgggagcaaattattacaaaaattatgatatcccacatcaaataagggaaaaagtttctagtgctatatatgcataggcttctcttaactttgtaggtgcgtttttaagcctaaaaaaccctttcgatccaaagtggacgatatccataagattgggagtggattgttacaaaataaagtcgtgaaaaccctttgaacccaaaacggacaatgtctacacggttgggagcaagttattataaatgttttttaaaatagtaaacgaaagggaatgaactccaagcccaataaagaatattaatacaactttatggatcaaacatttttaattatgattacaaataggagatataatgtacaatttttttcataaaaacttctgagttcaaatatgctaaaacatctaaaacttttcaaccaaacattttcatatttatgtcaataataatttcatatcaaatctaataaatgcaaatgcattcaaaatattcttactctaattatcaaataactaaaggtgctcaattaggtaggactttgttgctaggttaggtgagactttacaaatgggtgactagcatcaaatttgttcattttaatgtggacagaatcaaatactagtactcataacctctaaccaaacccttagaggttaggatcaaagtaattacattcctcatctgaaaatgtgaaggtcaacaattttatcttattgactagggtcaaatagacaaacaccccttataggacctaatgcataaaggtctacattaggatcgagaatcgactctgataccatttataacgatccgctctcaatcatgtagatattgtcccctttggcctcaaagtggacaatatccacacggttgaaagcaagtcattacaaatagtatcaaagccaatccccaactctaatatgggtctttgttttttcggccttgcaagggtatttgtctatttagcctcgtaatcttatgggacacaataaagacattgtgtttgcattgaagaggtgattgtgatatcccatattgaataggggaaagagtttttggcgcaatatatgtatagattcctcttgaccttgtaaatgcattttaaaaccatgagggccttgagggcccaaattggaggactatatctacatggttgggagtaggtctttacagttatcatgtcacatgttcttatattgtgggaaaacaccttaaactaaggttgaaggctactaaatagatccctaaggccgatataggcaacaacgaaaagaggatacttttgcaatataattgctcatgcatatttttacctctagatatcttgatcaaaagcaaaacccccaaattgcacctttccatcattcattctctttgttagtaacaattgctgcttagtgtcaacattctttcgatttatgcacctttgtaaataggcatgcaaatgttttgtcctgttcttgcaattaaccttaggttttgaattgcaatgattacaaatagcatagtcatgtccatctattgttatttttcaaaatcattacacactaatgattttcaacttcttccaatgccatattgtttaatttaaaacaaatgatgaaaaataaatgtagataataatgttatagcatatcaaggaatcaaaaaagctatgaagacatgttgaacttttagaaagtttcatgagtctagtgtggatttattgttgcaaatgccaagagcagagaggaggctggaaatttaaggtttcaagaaagaaatgtaatttatacataggaggaggcagagcaatataaaaccaaacacatcctgaacctatctgggtcttcaaagacctccccaaacccagcctgaaccccaatgaagctccctcatgcctgtcccaataggggtggagtgggctgggtgaccctataaaatctaaccgattgccagccccaggaaattaagttgttgaaaatttccagaaaacgggttgctggattttctagacagcaactactttaggtacaaacttcatggtagaaatatgtttaccattttatgaagataaagaaatcatgcctccaataatcaaaccaaaacactcaaaattccattaataaaatttgaagctcatttccgttcaaatttcatggagttttatcattattttggatgaacggttaaggtgtagggtactgtccagtgctgttatgctggttctttgtttctaagtttcttttctttgtagtgtaccttgtatactttacaggtgtatttggttttgcccctttcgtgcctttctatatatttgatatcttcttgaagaagataatgtgatgctgcacacaaagaatttagtaatattgattcatggtttctaagattgttttatacattgatgattttaatgcttgagtatggtatatgtgttaatgcttaattggtactagaaaaaaaaaagataaaatttaaatatgaaaaaagaataatgtcagtggtacgtggacattttttacctttagagtaagtgaatttgaagatattgaagctgcagcagaatataattcccaacacagattttctacatgtcttctgaaagtttctctctcatcatgtgattttaatgctttggtatgtcctgcaacattttcagtgcagtgataagctgggccttagtcttgaattggg

SEQ ID NO: 13127 - DNA, 1928 bp, Vitis vinifera
  Intron number 2 from transcript GSVIVT01015633001 (locus G SVIVG01015633001) derived from phytozome v7.0 (chr-ID chr3 ; pos 14490105 to 14492032)
tgaccaatttggcttctttgaagtaagttggtatttggtgtttaattgcctttctttctttctttctttctttctttctttccccccccccctgcgttttgagcttattctatgtgggccgacaaatggtgggataaatgtgaaatagaaggattaggaccggttgggtttcagagtggctgttgtagattgcatatatttttcttttcttttcctctcctatgatttctcagcaaccagatggagcagtgcaagatcgatttgatctgggtaatgggtgttcgctgattttggtaaccctcttgtttggtttaaattttatcctttgtttggttactgagaaagctgtcgagaagagaagagaattaagagttttgattttgattttgattttgatttcggagaagtgaagaaattagcttcactaagccaaattgttttatatagtgcaattaattggagttcttagggctcttgaaccaaacagaaaattgattaaataacatcttcaatgtcttatcatattttaggtaagagattgatattgaatttaatggttcttttagctagtgtagcgtctttatttcttgcaaacgaactgtttgaaaaaatgcctatcatgattataattttggcagcactcaattccagtgagaattttagggccatatttgaagaaataataagggtttgcacacctcttgttaattgttctgatgggcagtttttcagctggaaattgttggaaaagtttttcccctagttccaaattttgtttggatttttttaattaagtgctgattttcatcaaatggttttattttttattacatgatgaaatgtaattgaattccagtcacatttctgagttgcttgccgatgtttctgctaaattaatgaaaaaattaaaggcccttttttttaaacctgaaattttacaaattcagaactttctttggttaaggctgtttatttcaagctgaattgtagcccttttgaactcatgaagcctgcgtgaatcctattcagctgaatggtcatggccagttaccaaatttgaaaaacatagctcatggaaaggaaatatttaatacttgtctcccctcactttggtaacttccaaagactgaaaaatgaaattttaaagtcatggtttggttaaatcacctaacttagatggcaattgtttttatgcttgactgtaaccctccttttctgtttgtagtagccctcatcccttagcttcaagtccttggaatcttcttcttatttctgttgaagaacatgataacattatgtgcctaaatcttacaaacttaaacttataggaaaattggttgttcaacatagtattagagtaggtttcaatactaggatatgtgggttataagcccacatgtatatgatgctctctatcatattggactaccaattttcctaaaagtttaagcttgtggtatttgggcttacaatgtatgctctccaacacactctctcacgtatggctccatgccaaaagcttaagcttgtaggatttgtgctcatgatgtatatcatgcgctttatgcttactgcagcataatatgaaaattctacaagcttaagcatttaggatttgggcctatgtcatgctctataacaatattaatttaacgagtttagtaggatgatttcttggcataacaagcatctaatttttactctttgatgatttatttataggagtcatatttttaagataacagactaccagccttcaggattgaccccaaaagataagaatgtccccattttagtttaaactgcttattatgtgattctgttgacttaccatatttactaagacttttgttttatgctactccaaatttctggcttgtccacttgcatcagcagtcaatctctgagattaaaagcttcaagagagt

SEQ ID NO: 13128 - DNA, 12612 bp, Vitis vinifera
  Intron number 6 from transcript GSVIVT01026355001 (locus G SVIVG01026355001) derived from phytozome v7.0 (chr-ID chr4 ; pos 14752402 to 14765013)
gccctacaataactcatctctggtatgttctctctttttttgttagtataagtatgcatatatattttgataggcagaagtaattgtatttgtcatttgaaataaaaaataaagtcagtctgattatcttctctaaaaacatcttgaaaaataggtttttaaaaatgtaataaaaaacaattttataacttttagtttaaaaacatgtttggtaaaaataaacggatatggtttttagaaattagaaaacaatcaaaatttgttttgtaatatcagttgaaagtagttttgaaaataatgaaattttttttatactttattatttctaattggctaagttgtcattttacatattttcaccaattgctcaagttttgaacttttaacgtaaatgtgaaataaataaaatgggaagcaaaggaaaatgggaattttcttttttctattgctaagattctccttctaaaattttgaagctattgttagatggatagtttgctttgaaacaccatgtatgtgaatctcactaacttgtcttggggagagtttgtgagaggttccagctttaagtctcaatggggataaaagttaacctatcaaaaagaaaaaaagaagttgatgttggaatattattcctaaatcatgatatcttatatataaggttctgagttcacgacagcatcaatttgtaatttaacttctatcaagagggttgggagggcgacgaggggtgtggggcatgtgcctcctgaacctgagaaaaaaatctctttcacagacagctgtaggagttgaacacaggctcccctaccaaccttcaaatttctatctataggttctgatgcagtacaggaaataaaatgaaaggagagtataattgaaaggaccttaggaatcactcctagaaaccttaggcttcacacccaagtactctttgcatctcacaaaggaaaaactgactgctgaaaattcattcattgattgattccttccaaaagactaatcaactactttataagacttttctagggacttataactccttggaactagacacaataaatgcaacttgaaaatgacaaacttggactgattactgaccacattaaagactgttggaaagtgacaacaataatgactgaaaatggtaactttaaccattgactaagcccataacttaagctgaacccatattgacttatataagatcccaactaagcccattatcatctacagagtgccaaattaaagcttgggccttggagccagctcctttgcgcctctgataaacttttaaaggtgtctgccactcgtctctatcaactctccccagcttaggaaaactcgaccttgatgagttaaaggcatgaaatctctcataaaggtcttgattcaagtgctggaattccccttctgtgattcacgtgcaatctgaaagtggtcttcctctccatttgacaagatacttttgatagccccctcctctggttgaaacaatttgatgatcaataacatcttcaattttcgcctttaaacgaggagctggtgataagcgagcattggggccaccattagttataacatcttcaggattagaacatagggtgaggtcctcaatgttgaagatgttactaatacccatattttttggcaaatcaagaacataagcattggagctaattttcttgagcactctctatggaccaacattctttgagtgaagtttcttgtatttacctttaggatatcgttcaggccttatccataccataaccatatctctttccttaaaatcagcaaccttccttttcaaatcagcttgtgccttgtaattctcattgctaagagcaatcttcctttgaacatccttatgtaaatcaagtatatgcttactaaaagcatcagcttcaacacttggtcgtgcttccattggtaaaggaactaaatcaataggcttcctaggaagcaagccagtcacgatctcaaaggggctgtgacctgtagacctatttactgaactgttgtatgcgaactcagccataggaagaatctgatcccaattactaacatgttcaccaactaggcagcgaagtagatcgcctaaacttcggttaacaacttctgtttggccttcagtttgagggtgaaaagctgaagaaaatttcagctttgtgttcagcattttccataagcttctccaaaaataactcataaactttgcatcctgatcagaaacaatagtcttgggcaaaccatgtagtcggacaatctctttgaagaacagtttagcaacatggacagcatccaaagtctttgaacatgggataaagtgcaccattttagagaaacgatctaccatgacaaatatggagtcatgtctcctgaaagtttttggcaaaccaaggacaaaatctatgcttagttcttgccatggctcatgtggcactggaagtggcatgtacagtccagtatttttcttccttccctttgatggttggcatgtgcgacatttagaaacattcttagtcacatctctttttaaacttggccaataaaaatgatcttctgtcattgcaattgtcttatctcttccaaaatgaccagctactcctctagaatgcaattcccatatcacttgctctcgaagtgatgtgtcaggtaggcaaaggcgggtccctttgaagaggtatccatcatgcagcgaaaaatttggatatgctcctgcagtccctgctgctaaggcataatatataatgctgaaatccttgcaagaattataatcccgcttcaacaaatcaaatcccacaacttgtatagccatagaagaaagaatatacaccacttgactaagagcattagctgccttgttctcaacaccagatttatgccgaataacaaaggagtattcttgtaagaaagaggcccacttcccatgacaatggttaagcttcttttgagagttaacatacttgagaggttcattatcagaatataaaacagactcatgtggaaggagataatgacgccaatagcacaaagtttgaaccacaatatagaattctttatcatagattgaatacttttgctttgcttcattcaattttttgctgaaaaatgcaataggatgcccttcctgactgagcacacttccaattcccacatttgatgcattgcaagctacttcaaatacttttgaaaaattgggaagttgtagaacaggtgctttagttagcctctcctttatttcttcaaaagcctttgttgctgccttggttcaaacaaactagtttttcttcatacaaccagtgataggagccataatagtgctgaaacttatgatgaaacgtcgataaaatgtggacaacccatgaaaacttcgtagctcttgcaatgtgctaggaattggccattctacgatggctttcaccttatcagggtctacttctaaccctttggctgaaacaacaaaacctaggaacatgatagctgaggtcatgaaggaatattttttcagatttatgtagagcttctcttgtcgaaggattctcataacttgtcgtaaatggaacacatgatcttcctcagtcttgctgtagattaaaatatcatcaaagtaaacaactaaaaacttgccaataaatggttgaagcacttgattcatgaagcgcatgaatgtgctaggagcattggagaggccaaaaaggcatgaccagccactcatagagaccatatttgatgatacccattcttcagatctatctttgaaaagatgcaagaactagccatcatatccaacatatcatcaagctgagtaatgtgaaatcgatatttgatagtgttgagagagagaaagaggaaaaaccttaattctcattcatgtgattaactacttacaattgagaagtatatatatatatatacaagcctaggagaactaactaccatacatgtaacctatattaaaaaaggaaagactgtacactatatatacattatattcaacactccccctcaagctggagcatatatgtcatatgcactaagcttgttacaaatgtatttaatcctaggacatctgagagatttagtgaagatgtctgctagttgatcatttgaattaacaaaacttgtagcaacacatcctgatgcgatcttctctctaatgaagtgacagtcaacttcaatatgcttagtcctttcatgaaagactggattggatgcaatatgtaatgtggcctggttatcacagatgagtttcatctattcatcctttccaaatctcaactcttgaagaagatgtctcaaccatatgagttcacatgttgccagagccatagctcgatactcggcttcagcgctagatctggccactacatcttgtttcttactcttccaagatattagattacctccaataaaaacacagtaccctgaagtggaacgtctatctgtgggtgagccagcccaatctgcatctgtgtaaccaacaacctgagtatgacctctgttctcgtacaacacaccttggcctggtgtgcttttgatatatcgaagaatgcggattacggcatcccaatggctatcacatggtgactgtaggaattgactaacaacactcacaggaaaagaaatgtctggacgagtaatggtgaggtagttcaatttacctacgagtcgtcgatatctcccagggtctcctaaaggctccccttgtcctggtacaagtttgacattcggatccataggtgtgtctaccggtttacagtctaacataccggtttcttccaggatgtctaaagcatacttcctttgggaaaggaccacaccggaactggattgagctatctcaattcccaagaaatacttgagttttctcaagtctttagtctgaaagtgggtaaaaagatgttgctttagtttctgaataccatcctgatcactacctgtaatgacgatgtcgtccacataaacaaccagataaatacactgccccaaggagttatgatgatagaaaactgaatggtctgctgtactgcgaagcatgccaaactcttgaacaacagagctaaaacggccaaaccatgctcgaggagattatttcaagccatatagagaacgacgtaacctgcacactaaaccagactccccctgagcaacaaaaccagaaggttgctccatataaacttcctcgacaagatcaccatgaaggaagacatttttaatatccaactgataaagaggccaagaacacatagcaaccatggagagaagcagacggacagaagcaatcttggcaacaggggagaatgtgtcaccataatcagaaccataaacctgagtatagcctttagcaactaagcgggccttaaggcgatcaacctgaccatcaggaccaaccttaactgcgtagacccaacgacagccaactgtagatttaccagagggtaaaacaacaagatcccaagtgccattaaagtgcagagcagccatttcatccaccattgcctgtcgccagcctggatgggaaagagcttcatgggtgctctttggaagagaaacagaggatatagcagaaataaaagcagaatagggtgaagataatcgatgataactcaaaaaattgtaaataggatgaggattacgagtagagcgagtacctttccgaatagtaatgggtaaatcatcaggagaaggcagagtcggggtaggagaagccgaaggggtaggaagtgagtcagcaggtgcctcagcaaaagggagaggagcagcgacacgagggcgacgatgataaacctgaagtggtcgaggaggcacgacatcagctggggagacaatgggaaggggcaagacttcagaaacaggaagagactcagaagtggtggaaaagaatggtgagtcctcaaagaaggtgacatcagcggagataaagtatcgatgaatctcaagggaataacaacgataacccttctgaagtctggaatatcccaagaagaggcacttcatggctttggcagaaagcttgtcctgttcaggagtgagaatatgaacaaagcaagtacaaccaaagacacaaggaggaaggaaataaagtggttggtcagggaagagaagggagtgaggaatctgatcgtgtaagacagaggagggcatacgattaatcaaataacaagcggtaagaacaacgtccccccaaaaacgaaaaggaacattactatggaggaggatagtacgagctgtctcaacaagatgtcgattcttgcgtttagctaccccattttgttgaggagtatgagcacaagaagactgatgaagaatcccatgatgagacataaacgaagtaaatggggctgaaaaatattccctggcattgtcactgcgtaacacacgaatagaaatattgaactgggtttggatttcagcataaaatttctggaaaatagagaataactcagctcgatttttcattaaaaataaccaagtacatcgagaatagtcatcaatgaaagtgacaaaatattgaaatcctaaagtagacgcagtctgacaaggaccctaaacatcagtgtggacaagctcaaacggagactttgcctgattaatcaaacgctttgggaacgagacacgagtatgtttcccaagctgacatgactcacacggaagcgacgacaaagtggaaaaacgagggaccatcttctggaacttggagagactaggatgacctagacgattgtgaatgaggagaggaacatcagtggaaatgcaaactgcagcaaatgaatccgaggtgaggtgatagaggacttgagactcacgtcctatgccaatcgtcttcctcgtactccggtcctgcaaggtcacaaatttatcagaaaaggtaatagagcaattaagagtacgagtgagtttgctgatgcaaataagattaaaaggacattcaggagtataaaggacagaagtgagaggtagagaaggcagaggaagggccaaaccaatacctttagccacagtttgagaaccattagctaaggtaacaataggtaaggcagaggtagtagtaatagaggagaaaagatccttattaccagataggtgattagaagctccagaatctagaatctagggtccaagagaagatgtgtgggtaaggcaggcagaggcattaccaggctgggcaacagaggcaatagaagcctgagatgtctgagatgcggaggagctcggaggctgaggcaacggagaatcagaggactgggccatatgggcagtgcgaggaggccgtccatgtaactgatatcaacgatcgcgagtgtggccaagtttattgcaataggtgcaatgaggacgttgacctttacctcaggtatcactgcgtcctcctcgagaggtagtttgagaaactaacacagaagaatctgaagtgctatcagatggcaaagtctgagtggacgagatacggaggaggcgagcaaacacatcatccaaggacggaactgatgaactaccaagaatctgatcacggataggctcaagattcggatggaggccaataagagtaaggaccatgaagaacttgtcaagctgtgtttgttgagccccaacatcaggagtaagaggcatcacagtcaaaaactcctccataagagaggcaatctgaccaatataagtagatagatccaagtcctgttggctgatatggacaatagcagaagccaccttataaaaacgctggatatcattcttgtataatcctttggcctgagtccaaaatttaaaacaagttttgtaggcccgaagatgaagaagaatcctgggatcaaccgattgccataatacactacataactgtgcatctatcttcctccactgtacgcggtcaacttcagggatatctgcctcctgggtaaccaagtgatcctcatatccttgacccataaaccaaagttcaacaaaggcagaccaggaaagataattttcactgccaaccaatttctccgaagtaatcataggagatccagatatgatagaggaaaaaatggaagttttagtagccatatccacttatttggagaatgaagtatgtttggattgaagagagccctaatacggctttagattgcggcgtggcaccaccgaaaaagggagacgtcctcagatcgcggcgtggtaccaccagaaaggtagaagaacacttcccaaggtacgtgtagggattggggtggagaaaaagtagccggaccttcgccggaaagactgtttggagggccgacggagacaaaaatccccaaaagaggtacgtgtagggctcggatgggagaaccagggatgtagggaggttggtcggcgtcaggcgaagctggaggaggaggcgcgttgccggaaaaggcctcatgcgccctcacgcgccggcgcgtgagatgcagtcgccgacaggaaaattgcgcgtgaccggcgcgtggatgagcttttggttccagtgccttcacaaaagttggagatctcctccaggcgctccttctggtatggtcggtgtaggaaaaagacgtcgccgaaaagttcgccggaaaatgttgccggcggtgagtgttttctgacgatgatccgactgaccggaaagtattgggagatggggaaggtgaccggaatgaaacacggtcaccggaaggtttcccggagttgatgacacgggaaactggaaagaattaggttttctcccttggttctgatatcatgttgagagagagaaagaagaaaaaccttaattctcattcatgtgattaactacttacaattgagaagtatatatatatatacaagcctaggagaactaactaccatacatgtaacctatattaaaaaaggaaagactgtacactatatatacattatattcaacagatagttatcttgtcgattgcacggctgtctacacacatgcaccagctgccatcttttttaggggttagtaaggcggggacaaaacaaggacttagacttttgcgaataaatcgcttggacagcagctcctccacttgtcttttcagctctgcatacttgattggattcatacgataagctagaagattaggcaattgagatcctggcataaagtctatagaatgttgaatgttgtggagtgggggcagctcactaggcagatttgctggagctatatccgagaagtcgttgagcagttcagtggccttcggtatagaagaaatgctgccggcatcttttatgccaacttctttcattataacagcatatacaaccccattttccttgctttcatgttgaaacttcttcttagtaagaatatgaagagaactcttcatgacttaaacaacttttgttgacttttgaatccgatattttcccatttcagcagcagtcattggtttcaacacaaccttttggttcttaaacatgaagctctatgtgttctctttcccacaatgatgcacatctcgatcataaagccaaggacgaccaagaatgatatgtgctactttcatagggatcacatcacaccaaatagaatcactataaacaccacaaaagagagaaacaagacaacgttgatttactggaatagacatgttatttatccatgctaccatgtatggttgtgggtgtggctcaactggaagtttaagacgctaccatggaaggctgaaacaacattcatacaactgccattgtcaacgatgagtttttgaacttgactcccacatcggactaacatttgaaaaatagaaattcagtgccaatcttcttcctcaactttaggggctgcaagaatacgtctcacaacagaagctagagaaatgtccacttcttcgtcatccaagtcagcaggatcatagactccatagtcaaatgaattttcgttttgctcatccttctgtggttttagttcctcttcatgttcctgcccaatatgcaagttctttggacaattgtatgccatgtggctaggttgttgacacttgaaacatttgatacccttacctttagggccagccacttgagaagaagatgacttaaaccctgtaggtggattaaatggatgagataagcctggcttcatacttcaacttgtgtcgtggagcttcttttgggcagattccatggtcatagctcctggcttcctatggaatgaatgtcccacgtattcctccatgtctaatgcaacgtgttccaagctgtataatggctgacgcagcaactcccgcttggtttcaggccttaatccaactttgaatcttgcaagtgtttgtcgagggtcttctactatttgactccttgtttttaactcatcaaacgtctgcatatactcagcaacagacatgttgttctgcctcaaattaatgagctggtcacatagcttatcatagtaatttgtaggcatatatttctcccgaagcttagccttcatctcttgccatgtgctgattggtggtagccccatccttctaatgtctccttcaacacctgtccaccaaacttttgttaagcccaccagtttcattttagcaaacctcactcttcgatcatctatcatgtcataccaatcgaagtactcttcaattgcagccaaccaatcagcaaattgagtagcatctacctttccttcaaaatcaggaacctccattctcactttctttgtgatatctccagcggtgtggaggctatcaagctgatccaccatccgaatcaacatttcatcacgctggctatcagttaatcttcctctaaaactccttccagatcgtgtaaccatgatatcgccctcgctctgataccaaatattgatgcagtacaggaaataaaatgaaaggagagtataatgaaaggaccttaggaattattcttagaaaccttaggcttcacacccaagtactctttgcatctcacaaaggaaaaactggctgctgaaaattcattcattgattgattccttccaaaagactaatcaactactatataagacttttctagggacatataactccttggaactagacacaataaatgcaacttgaaaatgacaaccttggactgattactgaccacattaaagactgttggtaagtgataacaataatgactgaaaatggtaactttttaaccattgacaaagcccataacttaagctgccatattgacttatataagatcccaactaagcccattatcatctacagagtgccaaattaaagcttgggacttggagcccactcctttgcgcctctgataaacttttaaaggtggctgccatttgtctttatggttcttaccagtgaccactaatctggctcattaaatgttgaaattggtttgaaaaactgtaccaattatttactggtcttcagttgacatttttttttgactaataatacacaattgactagaccaagacacactctcttagctctcttcatcttttgccatttccaaatcaagaatcttacttttctcacttttttacttcactattaatactttttatctataaaaaatgggtttttgttattacttgcaaatgctctttgaaatttatatctaaataaaattttcatgaatttattatcatctgtagcatattttgcttttcttatataaaacattctgaaatttcttaggggaattacttttttatttttaaatttctatagaactttttcaatactaaagttgttaaaattatttttgaatgaagtttcttactcaatttttgtgcactaaatttcttttaaaaactttaatacatttttgaaaatattttagttgatgtttattatacttacaagaacttctatttgtaacttttcataaaaataaaacatttttactttctgggttatttattgctttcaacttgcatatatgactattcatatcttaatgaaaaggtgtttgtttctgatctgaaaaaaaattgaaaattcaatatcattggccagatttaactttcttttaattcttctataatattttagtggaactactgaatgtaatttgtcatgtgattgtatttgggtagtttctttttggatttcatgagcatgtttacaaacgccactttgcaccccaccatattttagcctgtccttcaaattacatgaaagtgaaggttacacttcatgaaaagatctttagctaaacccatgaaaagaaaaggaaaatgatacatgcaaatttttcccttgtcaaaaaagttccacatttgaattgaacaataaaatatgcaagttttctacatggagcctttagtgaagtagttatgatattctacatgaaatccttctttattgttgaatgcatttttatagctcaagtatgttttccttaaaataaaatccgttggtgttgaaatattagtgtctaaaaaaattgagtaatgattgcttgtagacatcatagaatgatatttttcttagctaaatgtcatataataaagaaaaaagttatataatgtgtatgtactttccatttagtaattttttttccttgtcactcatttgttgtggctaattagacgttttttttttgttttaaatgtggaggaccaatatatatactcgaattaatttgttactttacttcaggtct

SEQ ID NO: 13129 - DNA, 3726 bp, Vitis vinifera
  Intron number 1 from transcript GSVIVT01015339001 (locus G SVIVG01015339001) derived from phytozome v7.0 (chr-ID chr1 1; pos 2810099 to 2813824 reverse strand)
ttctcgaacggtcacttcgctacacgtcggcagcggtaaatcttcattccatgccctagaattttgtttttcttcttcttttattttatttttattttgtgttgctcaatcggcaatggacaattctggatttttgtcattttttgtttgtttttgtttttgtttttttttaaagattttattggatagaatttttatgttttgccttaatcaacctggaagaataaagaagataatttttggttacacgaggaatagaatcaggatcggtcaaaatgtttctcctgtggaaattgaattggtttattgtgtcttagactcctacacttttcatggaattctacgactgattgtatggcattggttgtagtaaagatttgcatttttttggatgttccaattatagatgatggatttgtattctggatcttcaaatgttatgtaaggaaaaatggagccattcaatttctgtagatgtttcattgtagacgatggattcttgctaatttgcctgagtgtggaagtcagtttgagcctcaaatctaataccccaagacccacttcgcttttgagcagtgggctagtatgactacatgagtttttttttttctttactatgtttggtttgtgcactgacttacaagacactttggatttgagttgggagttgttttgtaagggaaccaagtttgagcaactatcatctcaactaaactccggaaagaagtgttttgtgactgtaatatggcaccttaataaatttaccgaaagaatgtgatatcagtgtggtaaagaatttcaaagaattgaatcagtgttaggactgctatatcactgattcttgatgtgttttttcacaaaaatcctcactactcatgctaaagcatttgaaaaggcagtcttgttacacatgtgacacttttttttttactttatattttaatttatagggtattttttccatctatcttttcaaatgtaggagttcttgggtatctctataagtttaggtgttgtatattcaattagtgtactgagccaaaccaagtttgaatatcactatttcaagtcacttcccttacaaaaacaccaaaaacacacttctttcggttcatcttcaactgagattttcttgatcgtagaccaacctttgaagagcttctggatgtccttcttctaggatctgctggatgacatggcattcttgttttaatataggctgccgtactttgatggttcccaaggatccaatataaccacttaggtctatgttgcatgatattgttttatggaagttggcgagctgcatggttgttaactcgtaaaatgtatcttgtattgtttttttatttttctgtattgtgtatcgtaagtttttttatatagtaaaaaataattaaaaaaaaatgtatatgtgtgcatatctattgaaagtatgaagtatagagtaatatataaccaaattttaaggaaaatagtaggatttaaagagttaaactttatcatatcaaatgaaaacattgaatttaaagttttaacaagttcaaattaacaaaatatgactttaatatatagattcatcacataattcacaaaaattaacttcttcaatttttagctacaatttttagttccttattctaactagacatatgcccttattgtgttgtatatatatgcctttatgtgtcatctttaaagtttcagttgttcaagctcattatcattccttttccaccaaaaaagaaataaaaaaaaactaatatattaagtagaaatttttagtcgctaatcaccatcattttcattgtcaacagttaaaccattcaaatgaaaattcttcaatattcatcttaaaaataaactcacttgacttataatataatacttgacaacaagaatgtagcttttcatataagactattttacctatttctcatttttatgatcaatttttaaccttttagtatattttaaacaattaatataataaattatttaaataataataataatttgattttttttttaaatcatgaaaaatagttaaagatgtatgtatcattgcatcgtaatatcacgtatcgttttgttgtatcgtaatatcatgtattgtatcttgtatgtatcttattcttttaaaataaaatacagattgcgatacgtattgattttcataaaaaatgtatcgtatcattgtatcatatcatgtatcgtaagcttttaactactatggcgggctagtagaagtttggcctagtttgctttggtgctataggggagggattgacctttctaacgcatattcagtcgtaccagcatggccccactgatatgttttcaatcggaagattcggaacatcaagcagtgcaacccaattctacttgactaagccttgtgctagtccaaggcaaaaagcctttttttgataacaaggcagaaagccccaacccgacattaatgttattcattaatgtattaattattaattaatgaatccctagatttctttctttatcatcaattgaatcactgtttctaacccaaaattttattttattaccaatccaatcaccattcacatttttccttttttcttatcaatgaataaatctttttactttttatttttatttttttataggtaaattaggagaatatattaaaaaatagatctcttaacttatatgactaagacgtctcgaatttcttgaaaaagtgatttgattgataggatttggtatgatacttatgagatcgatgatatttatgagcagcctcctacataatttttgttgcatagcaatataattttcaacttatagatagggtgagcatcgcacgagcttgtaagttgacaaatgtggaggagtcttgtctatgaatcctgtcttgcttgcttttggcaaagcttctagtgaagcatctagcattagataattggaattaaggtatgataggaataccactagaccgacagagtgatagcaaagctaagtcatataaaagtgagcagccctaatagcgatgtaggagtttttgggtatctctataaacgcaagtgttatatattcaattagtgtactgagccaggctagtgtataagcttgtactcagccaaaaccaagcttgaagccttaatatcaatatttcagcttgagctaagttgaagctatctgagtaaatcaatagccagagcgttccacctctcagttttcgacttgcttaaccaacatgcattacattcacaaaacagaagtactattttagcattagtgtactcattttattctttttcccttatattgccattttcttattccttttaaataggttttctagtttaacctagttttcttttgggctttatttcataatgacaaatatcatgtttctgatttgcattgaaatatttatattgctgtttcagagatgatatgttgcattgtagctgatataaattacattctatcagtctgacagttgagttgtgtatctgttataattaattttaataattgattgaagaattttgaggactaagacttctattttgaggctcccatcctggaggttgtaattgttggaggttctaggtctcctaacatgcatttcatttgaaaatactgtttgatgcttgagatggtactgctatgaattcttcaaagacttgatgattttgttttgttatccagctattccgcagtcccaaatttttggtctaa

SEQ ID NO: 13130 - DNA, 6834 bp, Vitis vinifera
  Intron number 2 from transcript GSVIVT01031744001 (locus G SVIVG01031744001) derived from phytozome v7.0 (chr-ID chr3 ; pos 4003097 to 4009930)
ttttcatttctttttagtggagattgaaattttccgttagtggtggtgtgaattttttgtaccatttttgtatcccttttaatttaagattagattgaaactttcatcaagtaataatagaaaaaaaaaaaacaatattgataaattgtgttacaatttatataaagttattcaagatttacattccagttaattgttgccaagaatatatatatatatatatatatcactatattaaacaagaagttggtgtaggtcatgataacaacaaagatgggccttcccaaacagttatgtgatgaaaataagaagcttctattcttttctctttttcaacctcattaggtattaggccattgttgtaagttcatcccattgaagctgcaaggagaaataatttgtgaaaaaacattataaacaacaataaataagtagaaattcatatgttaagactctatcaaaggcttacataccaaaaggcttactcaaagttaacgattttgatgagttggatggatgattgcgaattgaggcctattcaaatgcgccagtttgtgtgactaggtactgacacatcttttttccctcttttaatgttccaaaactatcaatggcttagatttaaatatcaggaccatacaaaattgacaatgtaagaaacatcatattgaatggatcttgtgtgtctgtgttggaatttttacatcatactaaaatacttaatagctttgtttacaataaactaaaacagttattttttttcatatttaaatttaccaacacaattttatttgtacaaataattgtggtcaattctttaaagaactagtctccaaaaattgattgttgaaagcttctatttacatgcttctattcagtcttaaatatgccaattatttttgaaaagtagcaggcctacatcatcaaagtaaggaaaatatgacttttcaattgtagttgcaaggctgtgacagagtgaaatatcagtattaaagaaaattagaagtgaaaggccattggatttaagggaaaaaatgcgaggttaggagttttaactccacatgaggccccataagatttttgtaatcttttatcttcatattttaaactataacgatagtaaaagggaaatagagtgaataataggtaggattataaagaaatcttcattttacatttacttacagacacaatgttaatctccatcacaaatcaagtgtatgaagatttcacgtaaatgggaaaatattaggaaaaaaaaagaggaaaatggttaagaaattgtgaaacataaccgtttgaaaaactccatcacataaatcatctaataacaccaaatcagtgtacacttttgttaattcaagtttattgatgaatgtacatatgtatatgaaatattttgcaaggaatgttgatcatcaactacatgttcagaatttggttttccaactgatgaacattcatcatttctcatccatcttggttcataaaacacctaagctcggacaacttcttctttagaagtacatgatttttaaacactccccttataaaggagcacatttttttgacatacagcccaagaatcgtacactccatgtctacgacccacaaacactacatagtatgtttgcttgttcgtcatctgatgacataattattgttggttaattttttataatcaatcaagtaataactattgaaaaatatagtgcgaaacatatataattcacacatgtgtaccacattgtaggataataacagtgatgattaactacaaaatttaaaatataacaagtaatgtctgggattgaagatccaaggtctcggataggtagaatccaactttaactaaggtagtacctaaggtcgcttaaggtagtacctaaggtcgcttaaggtagtacttatggtagattaaggtggtacctaagggctattaaggtagtacctaaggtacagtccgaaaaaaaaccaaaggtgaaccacttgcccacacaaaagaatcacataatggcatagtctaaggatcacaaaggaaggtttgaggcttcagataggtagaacccaactttaaataaggtagtacctaaggttagaacctaatgtagaataaggtggtacctgagggctattaaggtagtacctaaggtacaatccgcaaaaaaccaaaggtgaaccacttgaccacacaaaagaatcatataatgacatggtctaagggtcacaaaggaaggtttgaggcttcggatggtagaacccaactttaaataaggtagtacctaaggtcgcttaaggtagcacctaaggtagaataaagtggtacctaagggctattaaggtagtacctaagatacagcccgcaaaaaaccaaaggtgaaccacttgaccacataaaagaatcacataacggcatggtgtaagggttacaaaggaaggtccaaggcttcggataggtaaaaccccatattttacttaatggctcaatcaccaatgttaaccggttgaaaattttcctctatcgattatagttatttctcaaccggtaaccactggaagaaattgcatgattgcattgaacaagtcaaccaattgagaattggcctcagttgattaagaaatggcctttgtcggtcgggtgaattccttagccggtagacactgcatccaataatttctcaaccaattgagaaatttcctcagccagtcatgtgaaatcctcagccagtagacactgcatccaatagtttattaatcaattgagaaatggcctttgtcggttgtgtgaactcctcagtcgatagacactgcgaccaatagtttgtcaaccagttgagaaatgggctctgctggtcatgttaattcttccaccgatagacactatattcaatacttgcatgtgaattaaatggaatcggtcgaccagtacatataggctgaaattataatgcaaccgacacacactgcttttacaatttctcaatataattcacaccagttgacctctaaatatgaatcggctaacctatacccccactggtactcactatataccctttgaatgtaaagatcttattacttactatatttgaaaattgacccaaagtttatagagataaaaaaatatctaaatacctaacagatgtagaaaagcatacatgtagaaaatgaatgatgctatatattacaatttcattttgcttagcatattcaaagaaaagtatagcatattcaaataaaacgaattgatcatgaaccctgtatgttcatccaaggtcacaactcaccatgaacatgaccatatatgaagatggaaatgataaatattggaaaaacaacaaatgtcataataataataatcttctcattgttcttgtggatgtatttgtaaaaacaatagccaaaatggtttgtttttctctattttcctcgtgtaaaactaaatcacttgctatttctgaacgtattttagcaaaattacataagttagaggccttcatgcaatcaccatttggaatgtctgcatatgtttaatgacatgtactccacagtcctacctacgaaagatataagaaaaacaaaacaacttattaaatggatgtataattatagctcaaataaacaatattcatgtgagttatatattcatactaacccattatcttgggtcacaaatgaagttctgaggcttcacacaagtagtaccgaactttaactaaggtagtacctaaggtcggttaaggtagttgattggagccaaaatatgtgctttaatgacacatatttgatatgatttgtgcaccaaaggacattcaaatcacccaacttgacttaaatcgatgctaaggccctagccatgagtttaatttgtactttggagacttatctcaagttcaagggaagaaaatggtgcaagttgaatcactttaaattttgaaagatcaaaaaatggctaaatgatgaaataagtgagtcaagactcatgaaccaaaaggaaaggtaagatgaggatatcatgagtttggaagatgataaatgaccattatggagtaagaaagaaggcaataaaacatgggaaatgaggcatgaagcaagattcagctgcatggaaatttagaacacaaaaatctgatggtattatatactctgactttgaggacaaatttagatcactttctggagtccattgtatacattctatatattttttcgaagctcgagaagtcaggagtccaatgcttcaaacggtgtgcaaattggagctgaaatgaagttatggccatttgaagacaactgcaccaagctggagggtcatttcgaaatgatttcgaaattcaacttataaattcgaaatccacttcgaaatgacaccaaattcaaatttgcccactgccactttgatgtttcacctcctctacctcgggaattgcatctagggcacttcatctgccctaagtggaccccacacgactagaaatcaccatttaattattttttaatcatttttaggaaattattttgtaataagtggccaatgagagtgtgccacatgttaggtaattgacgatattatataaactctctcaattctaggttttagggattttggatctttttccagagagtttgacattgaaggtggaagaaaacgaaaactttggtttgttttctttttcttctttattaaatatattatttttagtttcttttgattcaaattatggattttgaccctattatggattgtgaatgtgacatcacccccatgagaggctaagagccaacttggggttttgaagcatgaaaacctaagggttaggaaacctatagggacaatgggtaaattattataacaatgagattaattattggttgggtgacaatttatcaatttttttattctatcattgtgagttagtttagggaattatacggtaagttattacccgatactagtgattcttggtaattcttgatcattggttatccttgtcttccctatcattatttgccccgaaacaaagctataaggagaggaagggttaaaaaggcaaatcttaaactagtaattaatcttattcacatgatgactttagaaatctgttttaaaaaagaaaaattaggtttcaaatgcaattttgagtaatagaactcaatttaatcgcgagcgaccaaggatcccaaaaccctaagatcatattacttaaaagattcttgttttctctaatttttataccctaggttggattgtggaaaaccctaaacttgaatcaactgaatttaaaatcaatattcattttttttattaatttaatttcttttacttagtttcacattattcacatattgtttttcactttaggatttaaacaaaagcaattcatttattctagtattgacaatttccataagcctgtccttgaggacgatacccggaatactacaaaagttgtagtgactctttctctagtttttcttgaccagagttgctacgtaaaaaaggctaagtattttgatacaatagaaaagttcggtcagtagtacctaaggttaattaaggtggtacttaaggctattaaggtagtacctaaggtacagtccccaaaataacaaaagtgaaccacttgaccacactaaataatcacataatgacatactctaagggtcacaaatgaagttctgaggcttcacacaagtagtacccaactttaactaaggtagtacctaaagtcaattaaggtagtacctaaggttgattaaggtggtacctaagggctattaaggtagtacctaaggtacaatccccaaaataacaaaggtgaacaacttgaccacactaaataatcacataatgacatgctctaagggtcacaaatgaagttttaaggcttcacacaggtagtacccaactttaactaaggtagtacctaagatcggttaatgtagtacctaaggttgattaaggtggtacctaagggctattaaggtagtacctaaggtacagtccccaaaataacaatgcaacttgcaaccggatatgctataagttctatctggattcaatacgacttgtaggtcatatggttatttgggaataatatggtttccacaaccaacacaaaagttcaagtccaccaacgactccaaaattgttgatgtgctccatttcaaacaaagaaactaaaaaacaataaataaaaattatttaccttcaaatttcgatttggggttagggcaaaatgcgactcaagtcaaatcagcaactaagaagaagaaggagaatgtaatacttttggtgatgagaggacgagtttcgagcatgccgaaataccaatccagaaatccaatcttggaggactatgatgatgatgatcaaaacgaataggcacaaagtagattaattgggtgaaagatttctaaacccccaatattttcaagttggtgaatcgatggaaatggagatggaggtaaagttttaatcttagggtttctttaggttttgagagggataaggagaagaacaaatgagatcttgagttttctttggtgctcagtggagaaaggggttttttttttttctttttctaacatgtggacgcttgcttacctagtagaaagggaaggtaaatttgacattaaaacccacataagctcaaagtgcatgaaatcctaaatatttttaatattaatatggttaactttaaaatgggaaagttgggtttttattttaccaatatttccatatcagcctatggaaaccaaagaaacccttgataatatccatatggcccatggtgcattgtatacggaacacttaaaaaataaaagttggaa

SEQ ID NO: 13131 - DNA, 5386 bp, Vitis vinifera
  Intron number 5 from transcript GSVIVT01008077001 (locus G SVIVG01008077001) derived from phytozome v7.0 (chr-ID chr1 7; pos 6015307 to 6020692)
gaagtggtaattatatcatgtcatatcataaactttcatattatttccagttcttgcgaattttaggatgaattttatactgcatgctttatttctagtaaaacagttcagatcctccactgatgtaatactgcttgtacttctaatcatttaatttacttcattttgtttgttactttgaaaatacatgttggaacttctctgtcaaactgaacttgtaaacacagctagatagatcattgctattctgggattcaacaaaaccagcctgattgtctcaactatataaaactccaaacatttgcaattgtaaagccactgtagatccagttaggtgatatgctaaattttgttttgtgtagatttatgtttttgtttctaaaactcttctagagtctatgaagtttgttcacttactctatattggaaaactgatattagtagctttatacgagaggacattcaattgaaagacggaaattttgttggaatgccatattaattcaatattttggctaattaatagtaattcaggcttcaacaaaatggtttatataatggtgagtggagagagggggggagtgagaatatagtttatatgtagaacactgccaataagatgagtggttaactgaatctgatgttaattgcagtttcaactctgttggggggggggggttgggcgtgggtgagggaattcttctctccctattgttttcttttcaacctaaaaatatttttgcttccttcatttatgggcctagctatgtttaaattttaattgcttttaaatatcttagggtcttagggcctgtttgggatagcttctaacttctgctttcattggtaaaattataaaggacaagtaactacattttttgtgcaattggttttaagtctagaaactatattttaaaaatgattttataaaaaaaaaaaggataattctgacatttcaaaaaatttaataaaatgaaatatgcttcccacatcatagttttgatccttgcttttcctcaaatgttcgattaaatcatgttcagaagtggtgggttgacctatgagagttctattcaaacattcttgaaaattgtatttgaccttcaaacgatactttagtattcaaaaagctctcccaagcagggttttatgcaggaccataaaaattctagcattataaaagtttttctttgttgtatgatgagcttgagagataaaagaagacaaaagaaaatgaaaaataatcaagaaaaaaagaatatgtcaatcacatctagggttcctgagtaatctcactaggtgaagctaagaaaagagaattatggcattcacaccctaagtgaagaaagactagatagctattaagctctcaataattctattattgaaattaaaataccacatatgtttatatatactaatggaactttttctcttaataagacaagactatttctaataggaatgggacaaatttttctaatcaaattggaaatttaaacaaatagaaattttattaaaaaataaactactaaaattaattcaaataagataatctctattatctctctccagcttggaaaaactcaactccattgagtaaaataaatgatactgtcacaatccaggcactgaaatttactggagctaatccaagacaatcagagacacaaatagcataactaaccacccaaaaagaccgtcctttatcttgaaaatcaatttctattcacccttaaacctcatcctaatttggtgatagccactcttccaataaatcttcaaaaagattatagaatccaccaaaatgtctaacatatcatcaagttgatgtattggaaacccatatttgattgtaatattgtttactacacaaccattaacatacttaaaccaactaccatccttttttgatgtgagcaaagctggtgcaacacatgggctaaaacttcaactaattctagtttcgatactgttattattattattattattattatttgcagaatgagatgaaatataagacaaaaggaaagaaagtccttagaaatcatattgagaggcttctaggcaattacacttaaggttcctaagcaatttcaattttcacttaggtgaagaaacaaaagagaattttggcaatcacactttcttgagcaatcatacttgggaagtaggagtgacaccttccaagaaaagtgaggtagctactaattctcaataattctattaataaaattgaaatactatgtatgtaattcttccttgagcaagattgagactatatgtcctaataggaatatactccttttcctaatcaaattagaagcacaaatagaaatttgattaaaagaaaaaaagaactagtaaaccaattctaatacgctttatttaaaaataaattaatataaacctctaattaaaaatgtgaaacactcacattactgaagtactttttttgaataattttcctttttttcttccccataaaccttcaaagtgtttctttccctttttctttcataagtcttcaaagcaagatttccaggttgttccccatcattgtgtctactaatttttgcttcagctacctttgagctgcatgacttagagatttgtcagaccatttttccatatattttcctttcctggtgagatcatcgatcgtgaactatgatctagaagagagaaaatattgacagttgacgacattagtttgggaaattaggtaattcctaactatggtgttcttgcatggtagaaattcgagtcattgaattgctcctttttgaattttgtttagattgctaatggaactcttttcagtttatatatggtattgcttcagtaagaaatgctcaagtgtttaggtgggactagggggtagtgatctgggtaattgattccgttgtttcttggagacatgtctttgaaagggaattgaggatgatgtaggcttctttgcagcacatccattctttaactgtgagagaaggtaagttaggctgaggttagaaaatggcaagcaaaataaaagatgttttgagggaacaaggagttcagagatagtgaaaaactcctgtatagtttcattgtactcttgttctagtcctcttttaactggtgactttgtttccttgtttggttttatcttcattttatgaagaagccaatgatttgtttagttttttgttcttttggtgcctttggtgcattttgtattctcctcatttgcttgggtgcgctttgccccttttttttcacacttaattttttttttcattttcctataaaagaatgttcttataggaaggatagaaacaataggatttttgagagaagggaaagaaaggtagaggtaatttaccttaggatcatagttttaaaagttacaaggcacacctaaggcacaaaagtcttctatagcttaggcttagggcacaacataaagtgtgtacctaagcgaagtaaaacatgacctacgatgcatatcaattttattgatccgaaatctaatccaattaataaagaatttaagattctaaacatttaaaagaagtattcagcaaaaaagtaacaagatcacataaatttcaatatacaattagaaattttaagaataaaagtgtttaagaaggaaaagtaaagtggacaatgtgtgcctctccaataaggcatatgccttggcaagtgaggcgctataattggggagtggttgcgccttgggcctaggtgtgctttaagcgcgccttttaaaactatgcttgagattaaaagttcagcaggttgaagtcattgaatccatttgaccttagtggaggatcgccatcttggagcagagatgctttgggttaggatggagacagacatatttgaaggtttttggaattatttttgcctcttagacatcgtatttatgagtggaggtcatctgtctcgagttcttttcttttctctttttgtttacatctggtgcattcgatcccttttagttaatccatccatatgaaaagacaaaataagggctagatagaagaaagaaatttgatatccaaataaaagagcatttaagttcacaaacttctttatgcattcttttcttcaaaagcatctcaatcttagcttttcaagaagtgctgatgagccccaaatctattctttcttaactgttttagtagttaaactttggcggctaagaagtgattctagactgctgaaaaattgaaccaaatggatcccatagtgatataaattggaattcttcctagagaaatttagtatttgctcactgttgaatggaaggatatgaatatgtagtgatgtagaaatatcccttttgtagatgatgaaagttctctttaaacagtgatgttttacttggttataaataattgcttttgctattgtgatgggaaattttattttgtattttttcaaggcaactctcacattggaactctttaatgccaaatagtggatttcaaagtttgaattagcttctgtttttttgtttttttatttttatttattttatgtgaggtaaaattaggaaagaagtgccaagtttatatgttgcattgttgtttgatggtaatggtgtttcataatgtaatgcaatatgagatgaagtcctgatatttgtggcctgtctatgctctagaaaatatcttttctcaatacttgtcattcaccttcattttggagaatatgtaaatttttcttatcctttgaaaatgttagtgttgtgagttctctagttgcattaatgtcagctatccatgctgcctaagttcatatacaagtgacatcaagaaaggtgaaatattagcacaatcatgtgatttaattcaagttcctgagtcttaggtatagtaaaatagttcttgtaatgattatagaatttagtacgtttaatgatctttgcagtttagtcagcccattaagataaaaaattaaatacatgttaggaaacaaattctccactttctgtagattagttgaaaactaaaatttcctcggctgttaccattagaattatgaagattcccaagattgcataaaataattatttgcattttggttgtctaaagcattgaggctgcctggatgataaggaaaacatgctatgcatggtcaaagagatgtatttcattgcagtaggccccatcagattttattttattttcctaatacaccattaataaaactgagagtttggaagatgcactgtcttcaggtgcagtttaggcagtttgcattgcccctgagattttcagacacttcctgttatttattttatgacattagcagatagtccttgtgaattgagggactcccgacttttattcacagaataataataccttgtgaacttgtggttaggctg

SEQ ID NO: 13132 - DNA, 6333 bp, Vitis vinifera
  Intron number 15 from transcript GSVIVT01032285001 (locus GSVIVG01032285001) derived from phytozome v7.0 (chr-ID chr 11; pos 14542089 to 14548421 reverse strand)
gctcgtttgtttttttcccttacgtattgtaggaccaattaaatattagtctatgtctatatacttggacactcttcaacttcactaagcatatccacgtgaaatgacatgccacaagtgtttgtgtgagcttcttgtgggatactcctactttgctcaagagataattgtttgttttaattgatttgttttttattttggctttcttagtggataattatattaaaataagtattttggaaaagtgaactcttataaatatatttcaggataaggagtaagagtgatagttcttatttaagacatctttacttttaattaaaatttggtaatttatttattttccctttattatgccctatctaagtgttcatactttttatctagatcctctgtggcaaaatctatgtatattaaaatttgtaggggtgaagaataagacacctagacacatagccatacccaacacctccacttgaaccctggcaacgtaggtttattttttgttaagttgtagaaacaaatgttattcacttgaattgtattagaatacaatttgtacatcctatttatacataattaggggatcaaattcacctataatctctcccataaatcaggaatcagattcacctaccacctacatgctataatccctcccataaattagattctatcaaagaaaaaaggaaagaaataaatacaattgataaaaaaatcattatattgactaggatcacaatcaaattcctaagaatctgacaaacctcctcttgatggagaatagatattatccattcccaacttgcatgtaattatttgaaatcagtgactagccaatcctttggtcaacacatttgcaagctgcggttttgttgaaacatagggtgtgcagatcagagcactatagagtttttccttgataaagtgtcgatttacttctacatgcttagttcaatcatgttgtattggattgtgaacaatgttgattattgatttgttgtcatggctttgaactttgcttctgcacttgattaagtcaccacggattacttcttgcttcatatcactaagttgccacctaagagtgtataataaccaaaggtagattatgtttttgtcattgatcctgcctaatttgtatcaatgtatgcctttaggcttagctcttcattttttttataaaaagaaaattccatttttggagtagatttcaagtatcgtagaatcatgtataccgcctcttgatgaacttccctaggagaatgcatgaattagcttatgatggtgacaacataggctatatctggccttgtgtgggaaatagattaacttcccaactagacgttgatacattacacattctactattgcatcatcttaaacttctccagcttatggttttgtagggttgtcaacaagcttacaaccaagtatacctatctccttaggaagatccaaaatgtacttctattgagagataaaaatacccttccttgaatgggcctctttaatcctcctccccttcccctcccctccccactattgcaattatgtcatcaacataaactatgacaatggtaagtttacctatatgcgagtgtttgatgaatccacatcagtcatggcttttgcaaatctgccaaactatgttggggagattgtttaaggccataaagagtctttcttagtctacacatattgtttctcttgaagtcttcattgaaactcgatggtgtttccatatactcttcttcttctaaatcattatgcaataatgcattcttaatattaagttgctacaatgaccaatcaaagttagctgcctagctgcgaaggatagtgacatacgaatgatattcatctttgctactaaagaaaaggtttcttgtaccttagccattgtcctagcgttatatctctccaatatcccatcagctctatatgtaattgtgaacactcatttacatctgattggtttttttttttacctttgataattcaatgatttaccaagcttggtttttcttaggagctaacatatcttccatggctttcctcccactccaacttctaagtgcttcttgaactatttgaagaatttcaatggtagttaattgggtaaggacgactttatattttggggatagattttcaattgaaatgaaattggaaaccaggtgttcatgcattttttttggtagctttcctaagggcaattggtaaatggagattaggaaacattgctgacaatgtttttaaaaggctaaagacagtcttaaggcattttgcccaaataaggcgaagcgtaagcctcaaggtggaacaaggcataagcctcaacttaataatactaaaaataaaaaaatcttaaaaatcagaaaaatactaataaaatcacatgaaaattaaataataagaaaactatacaaggtataataatcaaattaattgtatatcattttcaattgcttctaatttggttttttttttgtctcttctaaaatccaacttctctcatgcatttatcaaataatcttcaaagctgccatcactatgactagtaggatcctcttatgaatcataattatatttaattgcttcattatcctctccatcaataataatgtcaatccatttttcttctttatctattaattagagtgatcttttttcctttatccatcaataataagataataattatatatattgatggatgctcagtcaccaataattcttttaattcatcttcctaatctcttcctttcatctccatgggttaattagccaactaagcccttattttttaaaaggtataacactaatcttggatgcaaaacaaaacttataaatttatactaaaaccctgtaaaagcacaagtcactacaaataataaatattgaggcttaaacctcttaacaaatgtatataaaaagccaataaaggccttagaccctttaaaaccttttgaatatttgaggcttaagcctcaataactttgaggcttaagcctcaataactttgaggctataaccttaaggccataagcctcaatcaagtgaggcttaagccttggttacatagccttgccttcaggcctcaatttcaaaatattgactattgaatcttcgttctaaacaaactaatcatgtgtttttggtgagagcaacaaatataaagcagtaggagaaataacactagaaatagagttagtgaagtttgagtgttcattgcctggtgccgtttcaaactcttgagcttgcattcaatcaagtcagaactatttctgcttaggataaacctgtaatggcatgatagtcgcgttaactccttgatctttttctagtgagagttcttgatcaggtgctaaggagataaaacatataggtggcatggatttagaaagtttaggcagattaggcaaatcatgagagaaaaacttatctttgcttaagctctccccttgaagataagtattaggaaaaaatgattgattttcaacaagtgacatcaatggttctaaaattttttcgagaagcaatatgctaacatttataaactcatttagttagagaatatcccacaaacacacattttagagctcgaggatcaagtttgctgcaatttggaggattggtatggacaaatggcatgcaaccaaagaccttgggaggaagtttactatatctattgaaatgtggaaaaaaatttgagtgtgtccaatgaagtcttatttgcaagcacttttgagaatagtcggttaatcaaatgagctgcggttaggataatttctccctaatatgatttaggcatatttttctaaaaaagtagagctcgagtgatttctaataccacactattttgttatggggaattagtacatgatgattggtgtattatcccttctttttttagaaaaaggagataacatctgattgaagcactttttcctatcataagatgtaatgttttttatcttaacttcgaactatgtgctaagcattttgcgaaagataggaaacacaaaactaacatttgatttatttttcatgaggaataaccaattcaccctaatacagtcatcaataaaggatataaaccacatcactctagaaagacttggtattcaagagggaccccaaacatcaatagaaattaacaagaaatggcatgttgattttgcattacttgaaggaaacaaaagaggatgatgtctagctaaacatgctacatgatgaaaaccgttaacatccaatttattgaataataaagcaagcattgttttgagcaaagaaaaggatggatgccatagacgaagatgatgcaaccaaatttgggctttattcaatgagaatttttcgagaaaatgagagagcaacatatgatcacctttactagaataggatctaagaccctcttcttccttaacatgcccaatcatactccttgtggctcggtcatggatcacataataagatgggaaaaatggtataattcaaatcttaaataatttcatgaattgctaagaggttagttaaaagttttggaacatgggacacgaattgtaatgtgagaaccgaagttaaagcaatttttccttgcttgccaaggtggctagtgtgccatcaacaacactgattttttaatccccaaaatatggattacaagaagagaaacaatgtgaagaataggttatatgatcagtagcacttgagtcaaggacctaagtacttggaaaacaatcctttgaaacactaagaacatgataaatgggatgcttaccagattgggcgagagagcatgagcaataggcttatccattgaagttagaaggctacagagcctctcaatctcctttttgttcaatctacgagcatctaaatcattagaagtcgagattgaacaataatgggcttgactactccccttttcaaagtatatgtatccatttccatttgttttttacccaataattgtggctttccttggagtttccaacaagtctcctttgtatgcctcggttctttgcaatagatacaccacaagccatctttgttgactagagatctaaatacttcacttcctctataattgttgttagacaacatggagtttggcttcatagtgacaagagttgagtcttctatcattggagtgtcaaacataacattcctactcttataatggagaaatctttcttttgggaaggtagattcctttccaaggactttaaacatcatggcaacatctttgttgcactttattttaatattctgataataatctaatttcgaccataagcttttcatgatattattgtatttggtaacagaaaagataccttgcttggtagcaccaatcttggcctttatttcatagatgtgggcagcatccctcactttggagtatgtttgtctgacaatctcccaaatttccctagcctttttcaagagcaggcacttctactgatctccagatgttttgaatttcacaaccacggcataatcatcgagtcctctcatcccacatagtgaactttggatcgtctttgcttgggacatgtccaattagatgactcaattttcattttcccttcaaaaaacattcagactagttgaaaccacactaggtaattgcagtcattgagtttggctggattttgtagattttgatattgtgctgaagggttattgttagtcaagttgagagtagagtttgaagattggatgatttctgatgagcaaatcagaaacaatttttgtaaatttgagatggaggaaaatttatgatgctatgcaagccaaaaaaattcaaaggaatgagatggacaacaagttctattgttggcaatgaagttcatacaaatgcagcaaaatctcagcaattaaggttgggaacaggaaaaacttagggtgcaaaagagagctctagctttgataccatgaaacaaattctgttccacttgaattatatttgaatacaatcctttcatcctattcatacacaattagggatcaattcacctacaatctcttccataaattagggatcggattcacctgccacctatcatcctacaatatctcccataattcagattctaccaaagataaagggaaaaaaataaatacaattaatacaaaatcatttctttgactaggatcacaatcagattcctaagaatctttttgcactactgtattagttttttagctttgctacaagcctctcaggtgactgtaactatgttttcattagctttcacaaaaaggtcgaccttgtgtttcgaatgtattgtacactttaataactagaattttttactaggt

SEQ ID NO: 13133 - DNA, 6293 bp, Vitis vinifera
  Intron number 10 from transcript GSVIVT01001855001 (locus GSVIVG01001855001) derived from phytozome v7.0 (chr-ID chr 5_random; pos 38709 to 45001)
cttttcccagagggagttgagattgctaagatttggtaagctccactgaacaattggttgagaaaattttcttttaccatctatgcaattgtgtttccattttctgttgccttatcttttcaagtttaggtggtactatttttctggtagtactcaggatatgctttggtaatgttttgactaatcagttatacctatcaattttttttaaccattttttgatttttcagttactcaagtcctggttgacaaagtcttcttttttgttggttacattagcttccatattaactgttttagtgaactaagtaaattgttttatgctcacttttaattatgcttgcattagctgtttcttgtatgttatatttacaactgtatatcaactttcaaacacatacaacactggagaaaagaaaaatgcatgttcaaacaacttaacattcaactcttgaagagctaagactggatgttatgttaaaatcagttttcatgtgtgtgctgctttaaacagacaaaagatcgtaaatgctattaagttgttcaacatttatctttcaaatactagaaaataacttgcttttagctgttagaagttgtgagaaacatgggtttctttagcctaagaaaaaagaaaaaaaaaaaaaaaaaactggaactagaatcatggatttgtttcttagttaaatatcgaaaaggggtgaatatgcttgttcccatattgttgcacctgcaaccaacaatgtctagggaaataaccaagtttaaattgattcatttccaagatttctcccaaactctcatagaggatgtgcagttgctactttttatgtattgcatgtagcaaatgaattcttttgagtcatcatgataaaaacagactcatctttctgattgttgtttggttttataaacccttttgctcagaaaagaacttgtgtttctcacaacttaaaaagttaaagtgagaatttcctgatggatttctggatatcttccctgaaaacgcaaaatcagacagcatttattctactgcatttttttttttaacacaaaaagttgcactaatcagtaaccatagtgtatatgtttttagcatagaagttcaaaagaagagaatactcaaaggatttgctaggaatgtgagaattgcagttcaaaagaattgtggaacatgaggtgggacaccatagagaattgtgaatgttctgtcccttttggatcttgaacttggaaactcccatgtcccaaatttaatcctttaccacatgagccaagcttcaagggcttgtagatacctaaattcagttaccaacacatttgtttactggcttgcttactagttactgcacagaaatttaactaaattgtgctaattctacttgatgcatttctagttgttaaagttcttaatacttgatctgcattctgttatggagctgtcatgatgttccatttgtttttcctttattctctccatttttctgcttaagttattttgaattgtaatgtgctagtttgtttgttatttcagttcctatttcggtggatgtaaacattggacaagctatatttaaagcttggcaaatattgattaaagggagggatcgaaaattcattattctgccaaaaaaaaaataaaaaatcttgtgcataacaaatctagtatcagagcccaagcatggagctacatgtctgagtgaagaaactagaggagagtctagacttgcttgctaatggccagaaacaatatttgtgtcatgttatcgagaggatagagcgactgagtcaatagttcattggcaagggcacttgcaatttgggtgaaaactcaacaaataggttcgggcaagatcaagtcacatgtcctcacctatggatgctagcttcttgtgcaaattcattcctaaaatagtgaagttggattttcctaggtatgataggaaacaagatcccacgatatggatttgcaaagccaacaaatacttcaggctctatgagattgctaagttggagaaggtcatgttagcctctttctatttggaaggagacgcctaactttggtttcaattcctagagcaagagatcatctatgtttcatgcaaagatttcaagaatgggcttctctcttgatttggtttgaatcaattcgaggatcattttacagaactaatcaagctaccacaaatgggctcaatagtcaaatatcaaagtaggtttgaaaagttgttctctctcaagattgaaaggtgagttgcttcttaacgagtttgaaggttatcatatggattggtgtacacaccaacagatccccctacactgactatagatgataatgggcatcttggtatggggttgaatcatcaaccttagtgatggctccccttactagtaaagggaactgaaagggcctactattaaaagcaagcggtgctcaatctccaagtccagttacttgactttcccaatcattcctatttgtcttaaatctattatcttagttagatcaaggatgggggcttcgtggctccttttttctacttgcgagctattccaccttctttccaacatctgcttatggttctcttctttattctttcttattggggaggtaggcttgcctatgacgacggtatttttagatgctttacttcaacacttagtagaaccttggttctatcaaggcacaatattttactcactccgaacaataaagatgcaaaaaacaacattcctatgtaacccccactcctacttctaaagaacctgaaagttgaactcctaactttctagtgactcccctcctctctacctttcgaaaagtaaactacactttgcaaccgggttagcgagactatttgaaacttgtgatcttgctgaaagaaggtccaatactcaagctatttgaccaactaacccggttgtgagcaaccccggtattcaaagttcataggccaattgcaacaatggttaagagaatgacgccggaggagttaactatttgaaggaaaagaggtctatgtttatattgcaatgaaaaatacacctcgagacataattatcagaagctcttcatgatcgatggtagttgagaagaagaagatggagatgtcgagatcggaattgaagatgtagctcttgaaatttcctttcacgttgtggctggagtttaagcataaaaaactatgcatgtttggagtagaattatgggtcattttataattgttcttgtcaactcaaatagtactcataatatcataagcttgcaggtggtgcaatggatgatgggtgaatctcccattgagttccaatggaaagttggaggtcatgatggctttgagagaataattagtcagtctaaggaaatgtttcaagtgcaactcaagctctaaaaggtgccatcttcaattgatttctttattctacctttgagggggctatgactcagtacttgacacacaatggctttaaatattgggtcttactcagtggactttgaaatgttctatataaagtttagttggggcgttaaagaagtgataagaggtaactagctttcacaacaccttaagtgactttaacccctaacaaaaataaacaagaacaatcgggaatcattttacatgttatgcataattcttctattcccttacaagtgcgacaaattccatagggataccaagaattgttaaaggagcctatggaacttcctccaatgaaatcaagatcattgcattcctcttctactagaacagggaccagttatggttcaaccttatcgatatcctcagtttaaaaaaaatgaaattgagaagattgtcaaacaactactagttgttggtgtaattcatccatgtaacagcacctatgtggcaacggttttgctagttaaaaaacatgatagatcttggaggatgtgcattgactaccgggtgttaaacaaaattatggtgaaggacaaattttcaattccaatgattgatgaacttttggatgaattaacaaaagctcaacatttcatgaaattggatttacgctcaagctattattaagtacagatgaatttggggaaaattgagaaagcaatttttaggacacaccaaggtcattatgaattctgggtgatgcacttcaacctcacaaacgctcctttaacctttcaagcactaaggaatgaggtatttgaggattttttgtgcaagtttgtgttagtgttttttttttttttttttgtgtgtgatatccttgtttatagtaagagttgcaatgatcatatgacatgtttgtaaattatttttgatgttttgaaagctaatcaattatgagtgaagcttgaaaaatgttaatttgggtaggaagaagtgcattatttaggatatataatttcaaggagtggagtagatgttgatggcccaagccaaagaatcctaaagctttgcaaggatttttaggcctcatgggatattattggaaattgataatatgcaaaaatagtcacttcacttaccaacatgttgcaaaaggaatcattttcgtagttcctaacggcaaaagaagcttctcaaagactcaaggtagcaatgagttaagccccagtattatctctccgatttttttaaagctttcattgttgagtgtgatgcctccaatcttggtgtaggtgttgttttattacaagattgacccatcgcttattttagtcaagcactttatgggaagcaccttttcttgtcaacatatgagaaggaaattcttgcattggtgttatctgtttgaaagcggagaccatgtcttttggggagaaaattcaaaatttggcaagatcatcaaaatctcaagcacatttggactcaaaagatcacaactattgccaaacaacaatggttatacaaattaatgggtttatttctcacgtagagtataaaagggtggagagaacgtcgtagctgatggactataaagatgctaggaagctggtaaagaggcgggcacttgtgtttgattaattcatcattagtagacaggaggagagtgaagctgaccaattgctgcaagaactcggaaaaagaattcaacaggaggaagcaattgggccatggaaactacttggtgagattattctgtttaaggactgaatatatttaaaacttgtgcaagatatcattggagaattccgcggaagcacacatgaaggatatgtggagacgctataatgagtcaaagccaatttctattggtaggagatgaggaagcatattaaagagtataaacatggctgtgatgtatgtcaatgtcacaaggtggaacaaatggcacttgtgggttttattgtaacttccaattctacaacaaatttgggaggacatatcgatgaattttatgaaaggattacatccatcaagtggtaagactactatcctagttgttgttgataggttgtctaagtatgcctttttattcctctatctcacccatacaccactgtgggattagcaagattatttttggataatgttttcaagcttcatggccttccaaagtcattcaggagaattatttcatttaaatgatgcttccttcaattttagttcaagctatcatccacaaacgatgggcataagtggagttgtgagtagaaccttggagatgtacttggcacatattgccttctttctaaacttcacccttgtggacaagggtgattcttaagaggggaggagctgttgtagagctattacaatgttccatttgttttttctttattttctcatttattctctctattttttatgttttaagttgttttgaattgtaatgtgtgagttcatttgttatatcggttcctatttcattggatgtaaatgttggacgagccatatttaaagctttgcaaataccgaataaaagggggattgagaattcattattatgtaattctaagttgtgattgggaggcgttggtccctcgaagcacctacaacaatcaattttgttctgtttgtaattaaaaaaatcttgtgcttaacaaattggcattgttgtctcatgtggagttggtacatattaattatgtaggtcaagccgtttttaggtaatgattgggcttttgtgtatcaaactttcacaatcccttcctatcataaattataatttggttactttatgttaattttatcagtgagtgcaccctgttttacaattctaaatgttaaggtttcaaactatgctgcaaagttctcattcttagtcattttcatccaggttggaaaaaggtgtaattgtgtatatttgtg

SEQ ID NO: 13134 - DNA, 8444 bp, Vitis vinifera
  Intron number 4 from transcript GSVIVT01011908001 (locus G SVIVG01011908001) derived from phytozome v7.0 (chr-ID chr1 ; pos 3068718 to 3077161 reverse strand)
gaatacagctcacgagtagggtttagttgcattttaaccatactgctcctctttctctagggatgttgtagctgacttcttcactagtagtagtcaaactagtcgccactgaacggaacagtgcgaaggttgtgtacagtaggcatgtgaaataattaataaaatgaagcctttttagtatcaccctgcagtacaacccatctctcacatatttacttcaggccacatgttttttgttttgttttgttttctcatctctgtagcatattccaaaaatattgacaaggagggatagcagccttttgtcttatagtatttggccgaacgagaggtgctagaagttgagaattgcagcctccttgcatgtgaacttagttctacggttctaccacatggggctttttaacttttacactagtttaaaaaaattcgtaattacaaaactattgataaatttatgactatttttgtcatgttgaaaggtatcttttgagaatacaccttctatatttttttatatataaattataaatattaaataaaaattaaatttacactaaaaatatctcttaaaaaaatattttttttataatttcataaaattgaatttatattaaaattatttctttaaaagatacttttccacatattttttagtagtctctacattaaaaaaattaaatttatattaaatgtatctttttgagagactttttcacaataccacaaaattgaatttacaataaagatgcctcttgaaatacatttttcaaaattttcatatcaactatacaatgaaaaaaataaattgaatttacattgaaaatgtttccataattttataaaattgaatttatattaaatatgttttttgaagaaatatcttccacaatttttatattaggcactaaaaaaaaattgaatttatactaaaggtgtattttgaagagacatctttagtataaattcattttttttaatggataattgatataaaaattgtagaaggtatctcttgaatagacatttttagtataaatttaattttatggaattatggaagatatttcttgatttgaaaagacatttttagtataagttcaatttttactgtatgacttatatggaaattatgaaaagtattttttgaggagacgcctttcaatgtgacaaaaagtatcgtaaatttataaatatttttcaatgtattgcattttaaaaaattatttttaaattcaccgtgcttttataaaaaagaagaagaaaaaactcttaccataagcaaaaggtatttgtgtttttcttgcttcttgtcaaataaaatataagttttaggtttttttttttttttaaatttaacttgaaattatattttgaaaatacttgttatataaaaatgaaaaaaaaatgtaattttaaaatgtggtctattgagtttgtactaagtgatttttttgaatttgtattaaaaatgtagtttttaaatttggtttcaagttaattttccattaaacaattcaaaagataattatgtgaccaaactagatattaaatttatgttggtaattaaactcttgaattttagtggtacattttggagtgatgaaaggaaaacgggtcatctcaaaatattattcttatgaataaaacttttcaatggaaaaacatttaaaaaaaaaaacaaaacaaaaaaagaagctaataatcacgaaataatatttttgtgtacaaaaaaggagaccatccaataatgaacttaaaatgttgttagttatgatttgttttagaaatattgtagattgttgttgaaaaattcacgacaacaaaataatttaatgtttttttttgtcaaatttaattagtgagtgttatgtttttgttacggctcaaacgtaggaaatgaagacgaaagatgaatgggatgacgtgaaactagtgtgacgagagctttgactcaaaattgtatattgaaaaaaaaaatccataaaataaatttatttttaaaataatattcaatctagtgtttctataccacataagttatcatatcataaaatcgtagtagatatttacaattttatttttctaaaattattagaaaccatagtcaccaactacgatatgttttgaattcttttaaaaaccgtagttaccaattgcaactttaactttaattaattaattatatatatatatatatatatatatatatatatataatttaactttaattttttttaaataaaatattatattattttgattttaaataaatttatctcattatttaaaaaataataatatatgaatataaaaatatttttaaaattttattaaaacaattgacattatatttaatataaatataattagttaattaaaattaaatataaataatatataataaattatatttatttaaaacaaataatataaattattatattaattatccaggacaaacaacagttcatgcacacaataattaattatgtctaatgaattccaagaataaaaactgaaataattaccgtctaattctttctaatctgttacagaaatttaaaataaaaacagagatatttgaatctgaagatattgtttattgaaaatataccttgattatagagagttgttgaatacaagtttgtttgacagtagaggaatgactcaaagtgatgaatacaaatgactagattttttaaagaggaaattacaaaagagagaaatttttagaacattcttgaactctttttcactttcccaagctctccaactctgcctgatgaagaaagttgaagctctatttataggcgaaaattcggacttgaaacgaagttttgagtcttcaattttgagaaattttgaatccacttccacgtgtatgaagcatgaatgaagtctacataaggtaaattttattttccttgtcttcttcctttctttttccatcacgttccttttgagtcatggtgaaagacaaaaaaaaacactattcatcatttttttaaacatggctctgataccatttgcacgtatgacataccatagttcatgcacataataattaattttgtctaatgaactccagacacaaataattactgtctaattctttctaatttattacagaaatttaaacataaaaacacaaatatttgaatctgaaaatattatttattgaaaatataccttgattacagagagttattgaatacaagcttgttgacagtagaaggatgactcaaaaagagagaaatttttagaacactcttgaactatttttccctttcccaagctctccaactctaccctatgaagaaaattgaagctctatttataggtgagaatttggacttgtaacgaagttttgagtcttcaattttgagaatttttgaatccacttccatgtgtatggagcatgaatgaagtctgcatataaataatatgtaataaattatatttatttaaaacaaataatataaattattatattaattaataattttgtatatattgtatataagtggtatataattacatatatatatatatatgtgatattatataccacttatatatagttgtggaccccgtatttcgactcatgcattttccactcgaaggcgagctcgattttgattttgaaaaatgattttattgattaagaaaaattgatttggagtcgttacttatttttgttttatttttaaaaggtaacaaaataagaaagaaaaccctaagtgcgactccttatttttgaaaatgtgatctacgaaaaaccggatcaggctcaaggatcaggttgcttatcgggaaggtacgataaagaccgtagcacccctctaagttcttaaagtcgggtctctactaataaaatgaagctgatatggcaatcaataaaaaaatcaatggatactcaaatcaattaggcgcatatgggaatcaaagcatgcaatagagagtgaccagaataggtgcggatgcgtacctgggccacgaacgaacaatgcgctatcatagaaatggagtcagtgcacaatatagagtacgaaacatatcacatgcatcactaagtagggattaaaattgttcaaaggaaaactggatttttgaaattcattcgagagtcggaatcttagcgattatttgaaaattggagttttggagattatttgaaaattggattcttaggaattaaatgtaagaatgagaattttagaaattaaatttgaaagaaaattgggatttttaagaaaaattgagttcacaaaaattgggactttgggagttgaattttgaaagggatcagagtggtaagttatttgagaagtagaaattataaaagttgatttataaaaattggaaatcttgaaaatcatttgaaggcggacgttttagaaacgaatgaataaaatgataataataagtgataacaataagtgagtaaccggataaatacgataattggaatattgagaagtgaaaattaaaaattaagttcgaaaataggacgaaattttagatagctaaatttagaaattggaatttttaaagaattaaactttaatggttgagatctttaaggggaataaataggtaagtatggaataatgttgctaattaacgggagcaacatttttaaacgaatagaaaatgaatagtggaatttttaaaattgaaaatcaaattaggacgttggattttttaagaactggactttaaataaatagataagtggggggataataattctaattgatgaaaataagatatagatgaatagtgtaattttgaggattgagaaattaaactaagacataggatttttgaaggattagactttggaatactagataaatatgggataatgattctaattgatgaaaataagatttaaacggattattaaaagattaaattgaggcatgagatttttgatagattatactagataaatatgggatgatgattctatttaaggaaaataagatttatacgaatatttgaaagattgaattaaggcaggggatttttggaggattagactttaaataactaagtaagtatgggattacaattccaattgatgaaagtaagatctaaacgtgtcgttgaaaaattaatttaagatattggatttttgaaggatttagactttaaataactagatatatatgggataatgattctatttgatgaaaataagatttaaacgaactattgaaaaattaaatctgagacacgggatttttgaaggatttagactttaaataactaggtaagtatgagattataattataattaatgaaaataagatatagatgaattgtagaattaaataagatatagatgaattgtagaatttttaggattgagaaattaaattaaaacatggaatttttgaatgattagactttaaataactaaatgaatatgagatactaattctaattaaagaaaataacatttagacaaatagtagaattttaggattgaaaattaaattatgacattggatctttttaaaggattggattttggataaataaactaatataggatgataatactaattaatgaaaataatcatttaaaccgaataaaaagaatagtggaatttttaggggtttgaaaattaagttaggacatcgggcttctgaaggattgggttttaaattagtaaacttgtataggatgataatactaatcaacgaaaataacatttaaacggaataaaaataatagtggaatttttaggggtttgaaaattaagttaggacatcggattttaaattagtaaactcgtataggatgaaaaaattgaagaattaaatcaaaacacatgatttctttgaaagctttagactttagatagctggataacatatgataataattcttaattgatgaaaatgagatttaaacggattattgaaagattagattaggatatgggatttttcaaagattataatttaactttgatgaatgagatttttaaaagatgacaaatagatacatgcgaaatgataataataataattgacaaacataatatttaaacggacgaatttgaatagtataaatttcgagattgaaaattaaatttgggatgttggatttttgaagaattagaattaggctttaacgaatgaaattttaaaagacgataaatagatacatacgaaataataattaacaatcataatgtttaagctagtgaaattgaatagtataaatttcaagataaaaatataattaacaataataatttgtcttttaattgcctttaagtttgagctaaccaatttaaaaaaaaaagaaaaaaaagtaaaatgaaaatgcatgaataagttaatagtttactaagattaaagatttaaaacttgttaggacatgaagtagctaaatgggctcactcatcatggacttgggccatgagagtggctagcataaggagcaatggggccttccatcagcaaacttgggcctgggctccaacttaagcccaaaaccaaagccatgggcaagcccaaggcatccatcctcagcatcaacttgggccggggctccaacttaagcccaaggcaccatcaccatcacagcttgggcctgggctccaacttaagcccaagttcaaggccaacatgggcaaacccaagagctccaaacttcctcacagtccacctctccagccgagcaccatcagccccaccagcagcctccttggcagctaccttcaagctctttttcttcactctcccagggcgaccgcctccaagagggctcgtgagggaggagtcgtcacgcttccgggagtccatcctcaccaagaatgagagctttggctgatggcaggaatgggaagatggtaagtgagagatgcccacgggtatgggaaagacgggcatgaaagttggtgtagaggatgggtattgtaatgggtatgatttttgaggggaatgggcagccagcagtgggtgcaatgagcatgaaagaagacgtgatgggtatagatgaggaccatgcgtgcatgaggattgatggatgggtatggaggttggaatggatgtggctaacagattcggttgggtatgaggcatgagaaaatggacgtgatgatggaaatgaggagtagttatggaaatggagattcaaaggtatcactcaagcacacaaaggagagcaaaagaagaattagttcattctatatcaaatttcacatgaagaacaagcagcggatatattatagcataataacctcaacccaaaagatttcaatggcaataaaaaaaatatggcttagcagacgtaccttagaacgctccccttcttttttctgtttttttgcttcccctggcctttcctctcaagccaacttccatcaccccgggttgctgttcatgcatcagcaagtatggtgccttcaaccaccagcatggtttggccatctccctgccatgcccatcagctggtcccatgcgtagggaaaagggggcccccatatctcaggtgttgcctagctcctccaatgctatgaaaaatccctaaaaaaaaactaatagcgtttggctcttcaaagggtatatacaaatttattaattaatatattaatttatattatttgtttttttaaatagacttttataatttatttgttttaaataaatataaattattatattttatttatatttaaatataattaactaattatgtttatattaaatatgatgttgattgttttaataaaatttaaaaaaatatttttatatcaaataaaaaatatcaattatttaattttatatattattattatttaaataatgagataaatttatttaaaatcaaaataatattatatttttattttaaaaaattaaaattaaatattttaaatgaaataacataatatatatatataattaaagttaaagtagaagtgggtaactatgatcttgatcatttaaaaaaaaaatagaattgtaattaccaactacgtagtttaacttaaagttaaagacaaacgcatcaactataatttcatgacagcagtacaaacgcattagattgaacgtggaaaaaaaaaaattcaatgtactattttgggtcaaaaatggtgggatgaaggcgagggaatgagtgcggtgcgggcgtgaggaagggcgcatgaatagccaacccagaaatccacaaccacaacacacgctttggcctttccgcaacacctggcatctccttgtaattaaaagaaaatctaggaccgacttatgagcggcctctattattccaacccacctttgttttattccgtttccccattcaaattccaacctttttggggaaacaattataattttaataaaagtcttagaccaattttaaataaataaaaaacaaatcaaaacacaagggatgaccaaggaggggaagtaaagcg

SEQ ID NO: 13135 - DNA, 2013 bp, Vitis vinifera
  Intron number 5 from transcript GSVIVT01021186001 (locus G SVIVG01021186001) derived from phytozome v7.0 (chr-ID chr1 0; pos 2401033 to 2403045)
cctcttgcatttctgcagatttaagtactgctggatattctagcggtatgtagccaagaaaacataggttgttattgttgggcaatttacttcgaatttcaacatattctagtattccttttcctgaatccttatcaacatgtgactaatttcacccttgagtagcagggcaagtttgttgaaggtttcgtccttggtatgagtttgagcaattctaactcctaggcaattagataatgatgaaaaaataaggttttcgggttatcttttaaaatgccaaaaaatctcaattggttgtttcattgattacttttctcacctcaagacgtgaatgaaactatgaatacgagaatcactttatttacacagtacaagtgtcttgatcttcatttttatggaaaaaaaaatcaaaaatcaaaagagaggacttctatttttaaaaaagaagaattgtattctttctattcttcaagttttcatgaagagagagtagaaaatataaagagagtagaaaacatattttttctaatatttttttattttaattttaatagtggtagttttaaaactgttagaaattgtctcctaattttttattttgttgggtcggatcgagttagcccacttggacacctaattaacccaactccaacagatataaagattaataaaacacatctctcttgcaactaaaagtgactaacttatcaataaatctaaaatagatataaagatattgtctaaaaattttataacacaaagccaatgagagctcaagaaagagtttaaagggcttgatccgattcttctttatggacaaaaagttttgcttttcttccaaatggtttaaaataagcatgtaatggcggctctccacaacttcatatgcttcttcccaacaaaagtccaatgtcaacttaatagtatttttccaagagtaacatgcattaatattcttatttcattttagcacaataaaggacatgattaaggatgacattatgatgaaaatttttagtgaccttcccacccctaattagataggtgtgggaataaataaatgcgataaggatgagtttgagatttttttttttaatttttttttggggagaatttgagtattgttttgtccttctttgattatgtatataattacattaaaaatattttcattttcccatttttaacacaaaaaaagctacttttcaaaaaaataagttatataaattataatatttatttatttataaaatatatttatttttaatttatttaaatatttttgaaaattttcatattaaaaaaaaagagggatggggtgagccaggtgtaataatttcccattcccatgtcacctagtttaaaatttttattgggatagggatggaaataagtttatgttaatacaacaaggtcttctctcacaagtgttcctccttacaaagaatctctctgaatttttccgcttctcaagtacatgtttcttggaatggtgaacaaggacatacgttatactcccaaattaccattaattaacattagtctttcaccctttaattgatagcaagccttttaatgaaattttctttaatttccttccaaacttctcataactaaagagaaatacctaccagaagacctaaattaataagaaagagctcccccactttgcatcctaatagataagctaaatcctcttaatgaaggtaacattttcgaaaagtatgggggaagccatagagaagtcatgtaggctaagggccttatcctcacccaagctttaatttcaaaaccttgaagacccatgatccttagaaaaggatctccccaagcaccttgtctccttgctttgaatagacttgatacacatctcattgatactaactcttcatcccttgtttcttataaaggatctttaaaagcatttgtcaccttctcctttaatttagattcttgtaagtgccttatcctattttgcttgcttataaggttccgttcgtgtgttgtcatttt

SEQ ID NO: 13136 - DNA, 7321 bp, Vitis vinifera
  Intron number 2 from transcript GSVIVT01026870001 (locus G SVIVG01026870001) derived from phytozome v7.0 (chr-ID chr1 5; pos 19757780 to 19765100 reverse strand)
aggtttctaatgcttgcttaattttctgccttgtatgaattatactatacccttttgtttggctagtaagaaaagttattgacaataatgttcttgggaaagtacaagtaatcgaatgattaacaagcaaattcactacttatttcgggtgtgggaggacaagaattataactgagaagtgtttgttattattgtttgcatctgtttctagctttgaactgtttagagtaaacctcattcatgttatggtaagtgtacacccctttttggtatcttatcactaaagagaaggcttctacagctagaagtatggaactataaatcgtagtatttagaagtctaagatccaagtagaactacaatcctgtactattggaaataatgtttcaaaagttgaagcacagaaaaaattatgataaagagtctaagttccacataggactttgatcctgtattgatctaagtaaagttttacaagttgaagcttcaaaagatatggagaatgataacgtaaattgagttctgtgttgagccaatctttcatttttgggaattgaggatatgaaatttatttatttatttatttttgataagtaaacacggaatatattaacacaaggcaaaaaagccacataacatataaggagtatacaaagcggcaaagacctcacaaccaaaaagaaacaaaaaacacaccaacccttaaatggaggctaaccacttcaaaaagcctataagggagcgcgactccactccactatacaattttgcccagccccacacattacaaacaaaagaatttttaagtttctgaataactaactccccccctaaaagctagtctattcctctccttccaaatcgtccaaaaaataaataacggaatggatctccagatttttttcctttttttacccacaaaagagcccttccagctaagtagaatctcctttacagtttttggaaaaacccattgggcacggaacaaaccaaggacaatctcccacagcactccggccactgtacaataaatgagcaaatgatttacattttcctcttcgctatcacataaaaaacatctattaggaagttgccaccctctcttttggagtctatcaagggtaagaaccttcccccaagcggtttcccacgcaaagaacgctaatttagttgggactctatccacccaaatggcatttttggggaaaacggagagaatggggctgatcaacgagctgtacgcattcttaacaccaaactgtccgttttttcctcccttccaaaaaatcgagtcttcctccaaagtaaccctttgacctcttaaggcttgaagtaaatcatctaccaagtccaactcccaattgttgaagtctttgaaaaaccttaaattccagtctccttgaccaaaattctggtcccacatttctcccactgtgacattcctatgggcagccacagcatagagatgagggaatcttagggacagctcaacacccccacaccaaggatcagtccagaatctgattctggtgccttttcccacattgaaagccatattatcccagcactaatcagattccttcagaatttctttccgaaccccaacaccaaacgtcccatttgccttcttagtcctccaaccaaggtcctcttgcccatattttgccataagcacttgcttccatagaagcacttggctcgagcgaatctccaaacccatttaccaagcaaggctttgttcaagaggactagcttcctcaagccaaacccccccttttccttacctgcacacactaactcccaattgattaagtgggtctttctttccatatttccccctccccacaaaaagtctctttgcaacttttctagccttcttgccactatcttaggcatacggaacagggacaattgatacaaaggcatattagccaacatactctttatgagggtgattcttccacctttggagatatactgccatttccaaagggcaagtttccacctcaccctctcttccaccccatcccacacggaagaggccttattgggcgcccccaagggcagccctaagtaggctgagggtaactgacctaccttgcatccaagctccatagccatctcaacaatctctttcacatcccctactggaataatttcacttttagccagattaatccttaaccctgaagcagcttcaaatcacaataaaatccagctcaaatgagtcaagtgttcattctttacctcacaaaacactattgtgtcatcagcaaagaaaaggtgagaaatattagcagccggcccactacctcgcctaatgtttcaccaagaaataaaacccccttccatagccctcttaataagaacactcaacacttccattcccatgacaaacaagtatggggaaagagggtcaccttgatgtagccccttagagctagagaaaaacccagcagacactccattcatcagaactgaaaacttggcagttgagatacaactccacatccagcccctccacttagacctgaaccccattttttgcaagaccctcatcaagaaatgccaattaacgctgtcgtacgccttctcaatatccaatttgcaaattaggcctttctctcccattttttgccaagaatcaatcacctcatttgcaattaaggaggcgtccagaatctgcctatccatgacgaacgcattctgatccggtgaaaccacttttccaatcacttttttaatcctattggcctgcaccttagccaataatttgtacagccccccccaaaagactgataggtctgaagtcccccaggtcctccgtcccttcttttttttggtaaaaggactagaaacgtgttgttgaggctcttgaggaaagaattttgctcatggaactccttaaacatctctaaaatctcctctttcacgaactcccaacagcattgccaaaaggccacagtgaagccatccggtcctggagccttgtccccattcatgtccattagagccgaatgaacttcatcctcagagaagggaaactctaggatttccgcttcttgctgactaatttgattcaagtttagaccccctatatccgccttccactccgagtcttccgtgagcaactgttgaaaggcgtctgcaatccctgtccttacttcttgatcctctgacaaccacacaccattgatttttattctgtccagggagttccttcttcggtgtgcagttgccatacgatgaaaataacccgtgtttctatccccttcccttagccataactcccttgataactgtctccagtgtatttcctccaggtttactcacttagtatagccctctttggcttcttttttaatagagatttcctcctctgtcaaactcctctcactttccacctgatctcagtattccacttgctggagagctgcagatttattacattccagtctcccaaacacattcctattccagatttttaaattctgtttaattaccttcagttttgtagccaacttatagctagcccttcctctgaccgacatcccctgtcaccagctctgtatgaggtctttaaacccttccactttaagtcacatattttcgaacctgaatggtgagtgacctcttcttatgccacccccctcaattaggataggaaagtgatccaagatgggccgagacaatcttttctggatcacattactgaactgatcaggccagctgggagacacaaggaatctgtccaacctggccgaggattgattataaagacctccactccaagtaaatgatcctccttgcagggggaggtcaacaagctcgagataatctataatctgagcaaacctcttcatagctgaggtaatcctcccttgtctacttctttccccttgggatagaataatgttaaaatcaccccctacacaccagggttcttcccaaattcctctaattgccccaaattcatcccacaggctctcgctttcttctttggtgaaaggaccatagactcctgtgaacacctagactaccccattttcaacattcctgaatttacaggagattgagaactgacccttctcccaatccaaaatttccagagaccttttgtcccagcaaatcaaaacacctcctgcctatccagaagcatctaaagctctccattctaagaatctccccgcccctaaacttctcaccaccccttcagacattaaatggatttttgtctcctggatacaaagcaagtccaccttctgttttctaacaaaagacttgattattttccttttagatctgtcattcgctcccctcacattccagtttaataatttgagattcattatccgatcgttagttgacctcctctgccttgaagaggacagttcttcttaatttccccctcataattgattgaacactctagcctcttgagttccctttcgaatttcgatttctccaaaatacctttgttgtgtatcttttcctgcctttttttgatcttgatcaaaaaacccaagatttccttttctaggccttctgttggaaatcccaaaaagtgactaaatttggccagactgctttcctcccaattaatctctttctcgcccctaacttcttggggctcagcccgaaccaaattccactccgagttgtgtgcctcgtttgcggcacaattaacctcaaccaaatcccagcaacccttaccactctctgtggacccttctgcaactgccaaactcaacatatttccttcctgaagattctccctcattgccccagaatggtcgtaatactcctcctacggagtccgaccaaaagaaaaaggagaagaatgagaaggccccgaagcccttaatccccacgagtttaaatcagacccataccttgaggcttcttccactaacgcacaatctgtcattgaactttgggattccggctgctgcttcctcctatcttccttctctcggcactttagaaattccatctctaggttgcacccaaagcaagccaggtgggctggggaacagaacttcaaagagagcccattatcgtggggttaggcctgaaaaggcctaggactgcccccaagcaggactgaaggcccacaaggcaaaaccttcaacccatcggcggcccgcccctcaaacggcccgaacgctggcccaacactaacagttgcaaccccctttaaaagagcaccctctagagggccttgctcagggggcccattagcccacttcgaacccacgagaccctcaaccgggccagacgaggacaacccaacactcgatgatccagaagaaaggcgggtcaccggctcgatatgagcccgatgttcaaactcttcgttgcctgcccctcttacctgccctccagtcctatcaattgaacgaaactgctcctcgggccaagcagctggcagctctcccacgcgcagtccagcgcgtgtgacaccatcacccctaacctccccattttgtcgcccaagccagactcaacagttccccgatttcttcctcaatgatggcgaaatctcccaccacaaagacatggagtagttcccctccctaaccccgatctccagcgaactcggcaggtcttctccactcgtttttactaaaatcctagcccacttgagctcctccatcctttctgtttgaggatcgatacctaagaacccaacgcacgcttcccccactcttctcaagattgtcggaacccacaacgaaattaggagacctagaatccttacccaagcttcgttcctagcttctccctctgttgaacacccaaattttggactccatcgctccaaacccatctgaagccctcccactgatctcttcccagaggcgaggacacttctagcttcctccacgagttcaaactccagaagaactcgtccctttcccagccttgccaaacctaattttcctttcaacccccatgcacttgccactaaccaccctaatctctccaaatcctcttcttgtgttgaactagggttccaatttcctaccaagcaatgttccaatctgctcagatttttacttatttcctcccccttacctccactctgacccttgtaatatccctgctcctcggtccctttgccacttccacatacgaccttcccgtggccctctcttcttgtttatgctccttcttgtcgaaacaagatcccatatttcgtaaggactccaccatggaagcccatccccccttttcccccctgcctttcggaatgcagatgctatatctcctcttctccatgtcgataacccctaagagaaggaaacaccctgccctattggcatcttgcactagggagtaactccttccttttttccttccatcccctttcccatcttccttctttcccgtccctgatgcactgaatcaaaccttccgtaaaaggccttatgcttgccggccccagacggacccaagacgagacccctcccttgctttccacgataataacttggattttgccttttctctcatcgactcctacttcgaacaccttcgactccaccacaaagctactccccttccttttccctcgattctccgctcggctttcaccccatcgtcattactcgcgtactcatgctcactctctctcatcggatatcattaacatttgaggatatggaatttatggtaaactcgtatacaaatatttgttttgataggcagataaaagtatattaaaaggtgcctatcaaaaaaaggggtgcaaccccactggaatatttgaaaaacaacatgatctaatataagcattaataatgtgtacgtccattctcccattccaattgtttgagctgttaatgtttaagaacataaattcaaacatgtgcttaagtttgcatcatcaatagacatttgtttatcttgttttgggatccatcagtgtgaaatcatgaaccgaattcggtgagtaataaaaactagagttagatgtctgagttgtcatccataaaaaaaaaatgaagaggtgattagcagttccatcaatatagaacttgttcttgaccactctatgtaaagtgcattggtactagtgagtttcaggcttctgttgctttgatttttgaagtcttaagttaatctggattctagaatgaattaccatcattttaattttcacttgaaaacaacattttgaaggattattaagatttatacaataaaaccccaaattatgtgtgattaaatttattgctgctctgaggatgcataagaattgctttttttccccatcacaacaggttcttctatacagagatacaaagtcttttgacca

SEQ ID NO: 13137 - DNA, 4191 bp, Vitis vinifera
  Intron number 2 from transcript GSVIVT01026067001 (locus G SVIVG01026067001) derived from phytozome v7.0 (chr-ID chr1 8; pos 25032913 to 25037103 reverse strand)
gcaccattgttattgcttctcttctctatatcctggtttgtctccctcttttctcatcatttcggtttattcatcaactgatattttgtatttgcaccttgtgctgaattactggcattgaaggtaacgaagacgaactaaatgaaaaatacttagattgagactgtaatcattgtttctaataatagcttttacacgtcttttattttactcattcttttataaaggtaatcacgatcatatcttctgtagattcttttcatttatatatcaagataggccacttgccctaaaatattaaacttgtaccaatgtgtatataatatatacaataatggaatctctaattcaatataggacaagagtctctgacttcacacttctaggtaggcatgtgaaagggcagggtgagtagggccaggttgcaccctctttgctcgggtttgggtcgggggcttgagccatccttacaccttggtcagaggtagccttcaagtgttcgaaatgggttggaaatttaggttctattcagtaacagttttaaaaaatagctttcgataataattcttgaaaacctctctcacttgttttttaaaacaaaagtttgtttgagatgaaatataaaaaatataatataaaagttttaattcaaagtagtctccaaattttcaattatttttcaaacaactcaacaaaaaaaaataaaatgaaatgaaaatacttcaaatatatatatatatatatatatatatatataaagatattttcataacaatttctaaaaaacaatgctttatagtctccaaacaaggccttgctttacagtctccaaataatactttaaaattttcaattgtttcgattagaataaatttattaagcatgcatttttagttaaaaaattgtttttaaaatagtttccaaacaaggccttacttacaagttcaagcttggctataggcccaaatatttaaaaatactttgttacttttcttataattatttttttaggctttcggtaatgctactttacatatttcccaccttgggccaatttactctcttatttttaggcattgttctctctattgacatgatgccatagttgtatgacctactataagactatttctcttctccaggtgttttacacatagggaatattaaggtactaaagaagtatttaattatcaaatttttatctcgatcattgaaatatgtgataaaatttaggtggttgagcagaggtacaagcaatgggaccaagttacaaagaataagactaagatgcaaagtaatgaaactaaaggtataatataatgagatttaaatatgcatatagtactcttcatgaaacaaacttattagaaatcaagacattgacacactgattgcctattcccaaaattaaagcatttggtaaacctcaatcaaaggaagaatactctaataaaaaaggcaattaacaaagttgaaaattactatttggttcttatttggttccttatgcttaggaatatgtttcaatcattttcgttttttgtaaatatctcacattcacaatatattagtataccaatattcaaagtaagaataataataataaaaataaaaaaaatttcttgctatatgtttgaaattcttcatggtattcaagccatcatccttacaaactccattgcaaatgcatgctaacacttttttttttttttgtactctttaaaaataaaaaatatagatccaccaaattctaagttccattccaaggttaatttcttcttctcaaatcctcataaaaaagtttaggtttaagatttatgaattctacattcacctaaacaccaatttgtttatttaaataatttttttattatattattattattttctttatgaaactaaaataacaattgtattgtaaggagaaggaaaatattttgaaataaaacccttaccttggtctgaaatcccaactcctctctatccttcattcattatagtgtataaaagtgtattccgaatgtatcttagggtttttatattattaatgctaatattatttttttgatttatttatttttctttttggcctatatataacccaaaatttaagcttatggactaaaaattctatttttgggctactgtaacccttgggtgttacaaggggaaagaaaattagaaagatctcaattgattgaagattcaaaccagcaatgatgaaaaaagaattggttcttggtgtggagggtgagtgggaagggtgttgggcggcttatatattagttttatggtagtggtcaagcccatgtggctttgaaatccatataatgtgtccattaggtcatatatggtaacaacgcattacttgtagctataggagctcctatagtagcgcccaatcaattcctgctgctttaaggtcagtgggaacctctttcgacccacgattcaaataggtgtgaggctttatatgctctttgattgtaaattttgttgattcctactaaaattatgtggccatatacatctcacttttcatgtagtgtttattcttatttttattttcatttttactcatgtattctaaatggatcctcaatattcccattattagatgatgtttggtgactttgccaaatcgtatataataccatagttttgaggtgcttttaaaatttaaaaaaaaaaaaatgtaatgaagggtaggtttgagattttatttttattttattttctttaacttgaaatgagtttggggtgggttttgggcacttttaagatttttttaatagagttaaacacgatgggaaaagaaatgtatgagaaattccttatctgttttgtctcatttaaattttcattaaaacaataatgaaaattgatttaaataatcaaaacaaggttgaaatgggtaacctttcttgagcctgttccattcccatcctaaacgaaattcatcccacttgcatcatcatgagtactcttaagaattcatgcacaccctttgctagttaagacatggccacaaacgagtattcatataatcacacgttggtctacatatatgttaatatacaccaccttttaagtcatgagtgttcaacacatggcatattaactttgacaaaattaggtgttatttgatagtgaagttaggaaaaaattaaggcataaaattttaaattaaatataaaaaaggtcatgcagatgaagtaattaatacttaggagagctcatgcttagaggcaaaactgctataaaagtatattgatcaataaaccaagcgaagttaaatataattttttttttttataaaaaaaacagaagtctagttgataaataagcaaaatagctcaatgtataagaacttttcaattgatgtataagacactacaaaattccataactgtcattgtgaaatggtcctttaaaactaggaggtaaaatattacttcaaaggatccataattcatatagatgtaactttcacaagctaaaataaaaggaaatacatgtttaattgatttactaacaagcacttaatttaaaaaatattttcactcgatgtataaggcaagtacatcaaaaattaatttggatattgtgttatgttggaccttcacaatgattttaacacttacctgaccttcatattttataatattgcattcattccttgtatgcatgatgttttttctatttaaaaatagaaagcaaaaagtatatttaaagatcaacaaagtcatttcatatagtaagacatgcaaaagcattagaagtcgatatatttcccatatgtgccttgagagataatgaaagaacattcttttaggcacttgtatccctttaaaagtagtaaggtaggttatatttggaaagtgctttcgaaaataactttaaaaaacagtttttgagaataatttttaaaaaactgttttttgatgttttataaagtaaaaatttgtttgaaaatttaaaatgttctaattttccagggctaaaccacaaggtcataagagaaaaatcacctgaaactgtgagatttgatacattgaaatggttacgaatttctttgagtactatactattataaggcttcatagtaatggaaggataattatctttgacctggaatgctatatattaatggcagggactaggcttgttaactctctctgctgtgcttcc

SEQ ID NO: 13138 - DNA, 5413 bp, Vitis vinifera
  Intron number 8 from transcript GSVIVT01023393001 (locus G SVIVG01023393001) derived from phytozome v7.0 (chr-ID chr1 4; pos 12806560 to 12811972 reverse strand)
tgaaacgtaggagatatagaaagagaagtacacaggtgtagtgttcatttcttggcttttttggttcattccattgtcctcatctgaaaacggttgagaactttgtgccatctatactgcctttctatcttgatttttgatttccactagtgaaattgaaataataaaactcactcggaatgaggttagaatttcaaatgtggtgaataaaattttatatttggtaagtgcagatatgatgggctaagaatatgggccctaggctgcactttgttgccatgatattgttgcagacatttttcataatgctaccgctcacaacttaggatttggatcattgttaaccaaacaactatactggtatagattaaatttagaaaaatcttagcacagtactaaattccacttcttcagtcaaaaactgtgtcagtttcactttaatgtcttatggtacattatttcactttggtgtttttttgataagagcttatggacagatttggctggttgacacatataacatttaaatgctagattgattctgtttgcaaatatcttaattagtggccaggttttatagagtcttaagtttgatgcttgtgagtgcagtcaaaaaatagattttagggcttatgaatgaaatatggtgagtagagggttcatcagatcaagaatgttatgaattatcctcattgttgctcactttgcatcttattttttctctccatcattttctagtgagaggattgggattttggttcccttaggactgttttcatctaactttttgttttatgttcttgccaagagtgattctctagtttcctttctacatgctaatttagtttggaagtctaaagttcctcccagattcaaatactttgtatggttagtggctggtaaaaatggattaataccaatgaattatgacagattaggtgatcctttaaaactcttaaccctagataccttgttctttgcttagcttttatgtgactgtgaatcacctttttcttcattgttctgtggcttggaattttatcttacagattgtttggagacatggtttgtcttgggtcctctaagggatgttgcagagatgatgcttacaaaatgttgtggcaccatgatttctattcattcggcattttggcttcatatgacaggatttttagagaagtggatcccacttgcttccttaattatctactatcttacttgattgtggagcttagtttttatagagttcttgggtttactcctctgggcattattatgttgaattggagagatccttggagtggtagagctagtaggactttggttagggttagtgcagtatgggacctatggatgttccaaactaaattttgataggtgtttttcttgctctagttacagtttgatggaatgattcaagatcaaagtggtagtgtgatctgggctttctcaaagccatctggttcagttggcaatagaggttcagaacctagcattgatggaaggcttgactgaatcaaaatctatggggagtagaaacttccaagtggaaagggacttggcttttcttaggggaatgggagtatggaaatgggatacatggattcagaaggtatagcctgtggcttctctaggacgctgaggtccaccattgaaagagtggacagttgctggaaaattttgaaacttttaaatccatgataaggttgcattttttcttatttatttatttatcattattattagtcttctgaatggacaataaatagagagaaaggaacttacaaagaaagatgaggagtcccttctacagaaaggaaaaagaactacaaagaagaaacaccagaaagaaccctagtaaaaagctaattagagggtggggttaaccagcttctataaaagatgtgtgggtggcagttacttgggatgagataagggtggggggttattggaatctgcatttctctatgcgtttaaatgattgagagttggaagctgctgagacatttctctcaaggttgcaagataagttattgaggaggaaagatttcaatcggatgatttggaaggagttgaagaatggtgttttctcaatgaaaaccttttactgtctgttggagttgaggtcaatcccctattctttgagcatcacttggaattctcgggttttgactaaagtgggtttttttttgcttgggaagccaataggggaaaagtcttgaccaatgttttaaaaaccggactggaccggccggtccgattggtccaactgtcgaccggtcaccattccggtccgatccgatcatttggaccggattgagattgaaccggggttgaaccgctcgaaccggtgaactggacgaactgaccggttcaaatgattttaattttttttaaaaaaaaattacaaaatgaaaatattatcctctcattgatgaaaggattccatagaatttaaatggtttttactaaagcacatgttgggcctgtcttatgacacaacccacatacccattccacttactgtgggctgagttttgagcccacaagaccatctaaagcctttgctgaggatggcttttataagagtcatttgactccttgttcctctcaattttcgatgtgggattgctaaatatcaaagaaaaaaaacataacaaaactccaagaagttttgaaccttggaccaccccctgtactatagtccacctaggacaccactcggctacatgtattttattatctaatataccaaacaaaacaagacatattagattttaaaattttttataatattaaataaaaataatataatattttttaaaattatgaaattagtttaaattttcatttttttatatattcacatttaaatattatacatatttcatttaataaaatttaaaatattaatatgatttaatttgataatatcaaagatataaaataatattattgatgtttaatttattcatatatattttaaaatttttataattatttttaattttaataatatataaattatatatttatgacgtcaccggttcgaccgccggtccgatcagtgaaccgtgaaccggtaactttttcggttcgatcaccggtccggttctgaaaacattggtcttgacattaagcctgcctcaaagatgaggacaactgttggcgaatagatgctatttgtgtaaaattgaaggggaatcaatcaatcacattcctcttcattgcaccatgtcaagggttctatgacaattgctgttctggtggtttttggttgcttccttcctcagtcaaagaaactcttttaagctggcatagtactttgtagggagaaaatggaagaaggtttggcaagcagcttcactgtgcatttttgggactttttggaaggagaaaccaaagagtttggaaatgaggagcagtatgagaataagttgaaatggttgttcctaagtaatctgttacttgggttgggatgcacataaagaagattcaatgcctttgattgattttgtagattgattgggatcacactgtgagtgtgagagggagagggagagagagacagagagagagtggttttttgtttcttttttgtggtctgccactttgtgcctgttatatatagcctgtgtactctggtgtacatcttttcttttcatatatatctatatatgtttctttgcttatcaaaaaaaggataaaaaaaagaaaaaaatgctgaatggagcttcactgaactccttgttaacagtcattcaaaaagtcctgaggtgataccacttctcccgacatcaaatactgtgccttcaaattttcagaatttctagtgttcttctcaagccaaataacccacatcaaaagctaggaatgggttggccaacatatctgtattccttagaccaatccatgtgattttggctaaggagatcaacctttgccattattcttatgtaaaaaagaagaggaaaagatgatttactgacttcttactcctcatacatagaatgcagcaaccaaagttgttagtgttaaagctgaagcaggttggtggtattaaccctcttattagccattaaccgtgcaaaggctttgtgtttctgggaagtatttgacttccaaatgatagttgcagtccaaatgatttttgccatcagggaacacaatcagacaattagatctactaaagcatggagaatggttgagagagaaaaggccacacaattgcaatgctcaacacctcttgtctggggtagaaggagaaaatgacatgttgcaaagcaggaggaaaagaaagctcagctgttgcttggtctctcaggtttctacagaagccgaaatttcaggaagtggaattataagagagaaaaagctggaatttctggacagattgctggaatttctgaaattttgtaaaataggttgctagaatatctggacagcaactaattttgcctttttgggaatttagttcaagacttagaagttggaagagctttagaattatggaagaaggaatttttgccttaaaagttaaagtagctggttttgggttgaaactttatttacagaaatactattcttaaagagaatctaggcaataatggctgcaatgttaaaaaagtgattcattagtcaagtgtctatattcatgaattcttaagatctttctagcaagggttttgcattggtggtcaactgttcagaagaggaaatccctaaacacatttttccccttcataatgtgctttgcattggaaatcttacatactgcagtggcttatataagagatcttaactaacctatcaagaaactagaccataagcaaacgactgctgacctggatacaaacagttataatctttaatattatttattttattttgttttattttgatagttaacttattcctttttattttttttttaaacttttatgtttcttcttgctgggattggaacctggaaccgccctcacctcacccaatgctttaccactagatccagccctcgaggccctaattcttaaaattattaaaatgctcctatatagataatgaaattgaaataaggaaaaaagaaagtcccatatgaacacaaattttcctttcttatcaatgtgctttgcatcagcaatattatatattgaaaactgcttcatttgtgtaagaggaaaggcttaatgaacagatgaagttacttcactttatgtaggtttaattataattaataattgatgtaagcatggaaaagaggtttgcttaggagtgtcatttctaaacatgtcatttcagtattggggtgttgtgcaccttgttgaataagtacctgtccctcattttggcatgctttgtttgttctgttcttgtatcaggaaaccattcagaaagaagatcggttggcagaaaa

SEQ ID NO: 13139 - DNA, 10320 bp, Vitis vinifera
  Intron number 2 from transcript GSVIVT01000275001 (locus G SVIVG01000275001) derived from phytozome v7.0 (chr-ID chr7 ; pos 20949163 to 20959482 reverse strand)
cacacgaccagcttttgcatcattcttggggcttggtaagagatcgtataattcttaataataatgtcttgtttgagatcagcatataagattatcttatgcattaacgaaaaagagtgaacccattgttagcgttttctgtaattatcttttccagaattgctcattcaatcttaccgagtatgagaaggcatttttttattagcactcttgacatactttacctgagaggaaaattcaaagctgtatttgccttcaaaatcaagagagatgctctaactctcacatacgttagcttttcagactgttcattgcctacaacagcagcggacatcaactctaaaaagttattctcttccaaagttttatcgctaggacatctatctttaatccaagtgatatttttcttggggaatcacaatcttgtgtaaaggccttaaactttaattaaaggttgttttttttttccctgtaagatcagtgaaaatataaattaataaaaagaggtgccaaaatagcgtccccaagtatacttgaagtatacaccagccacccaagggctcacccaaaagagagagggagagaaacacatcacttacccttgcttagaacctaaccaatcaataaagctaacaagggaaataagtctcacatctacaaacgccctaaaccaagaccacaaattacatacaaaagaatttttaattttatggatcgaaatccctgcattatcaaacactagcaagttcctttctttccacactatccaaaaaaaacataggggccaccttccaagccttgttgcgggctttacccacaaaggaaccatgccacctagggagtgccttcttaaccgagaaggagagaactcaagccacaccaaagagagaaaacatctgtttgtattgtaaccatgattattgagttgataaagagaaaattcaagttttagggaaagatagaatcggttgcactttaattgggagttagggttaggttttttgttgcacaggttaaagggtgattaggaatcggttaatagaggatttggtgtagaaataggtgttttaggggttttgatggtgtaatttgtggcttttgtctaatacaacaaaattgtgtaattgcaatagaattaatagaaaagaacaaaaaatacacgaatacatatatgcataattatgcatatagaataaagtcttgatgctatgaattttaaattcagaattcttttgctcaaaatactgtatacaacgcttttgccaaactaaaaattccattaactattaatccaagcctctaattcaatctaatcctttatcatcaactaaaacctaaccaaaaagaacaagtagtgtgaatgatactgctatattgatgtggacactaacattagtgtaaattaaaaaaaaaaaaagaatattgaaaatttctcatataacgattaaaagaaaaaaaaaaccacaagcaggcctctttggtaaatgatgattttatttagtttcctttttaacaattgtttgtatcttaagaattaaaaactatgggcatgttaaaaagactttgaatttttggcattttcaattgtttaagtgcttgcgcttctaaaacaaaaatatatatattttttattatcatgaaatgttttaaagaatagttttcatgaacatgcttccaaacatcttctaattcttttttctttggactttggagagttgtcttagagtccgactcttaatcccactttgtttccttcttcaacaaaccagttaaagtagcagtgaccttggagtaaccttttataaaatgatgataataattagttaaaccaaggaaagaacatagttttgttacctttgcaagggcagaccaatcccttattgcctccaacttagtctcgtctatctgaattttccccttagagatctagtttcctagaaactttatttgggtctaggcaaattcacatttttccttcttcacgtattgctggtgttgtcttagccgctgcaacaccttcccaaggtgaatgacgtggtcatctagaatctgactgtagatgaccatgtcatccaagtacactaccacaaaacagtccaagaaatcgaataagacataattcctcaagttgcagaaagtagcaagggcattggtaagcccaaacaacatcataagaattcattgatgccataccgtgtaacatgcagtcttcccctcatccctttgtgcaatttggacttaccgatacccaaaatgcaagtccagctttgtgaagtaggtggctttggataatctatcaaacaagtctacaactagtggcatagaatgtttgtttttgatagttaccttgttcaaagcttgatagtcaacagacatgtgaagggtctcatcttgcttcttctgaaagagcactaatgctccacaaggtgctgtcaagggctggatcagacctgcatccagtaactcatttagtttcttccttaattccaccaattccagtggagtcatccaacagggcacttgtgctggaggcttagctcccgacaacaactcaattcgatggtcaataagttgtcgaggaaggagcatcttaggaagttttggtggcatcgtgtcagacctttgagccacatactttgagtcaaagtgttgtggttgttgtgctgctagtgacacgctgcattgtctaaagtggcacattctgtgttgtgttggctgcaacatgtcacgttactgcatgcaatccctcatgccattccaaatgctgttccacctactccacttaggttgcacacactgcacttgttacatcattctccgccttgtctcactcttaaggtcctcatgggtacatgccagcccatgaggcttttggtgcaaattcgtttgagaaaaggtgcttacaaagccacccccacctgaagatgaccttctcatatgcctaattcagctctgattgggaacttccattccatgtctttatccaattggtatttcatgcaaagccttccatgtgctcagacttccttacctcactgttgccaataaaagggtttagccaatgctgtcaaagtccttcctccatgcttaacttctgtcttgttcactgtaacaccttttccaaacctgcttctaacaactcaattagttgcttccttgtatgttgctcctttatgttgttgttgaccctctttagactcctatggagttggatgatagaaaacatgcttgtctggcccttcccagcaacctttcccctcagagcattcacaaagcacaactgactttcctccaagatcattagcctattaaggtgagggagcaacaccttcttaacttgtagaaagaattacatgcccaaaatcacatcaaagttatctaggggtattgctaaatggctacaggtgctccttcaatcttccacctaaaaatgaaccttcttagcaatgccatcaatttgcgtggctctgctattcatggccttgattttgcagccatcttcctctaaattcaacccaaattcggttgctaccttgctagccacaaaattgtggtttacaccactatcaaccattgcattccccctttttccattcaccaacaatggcacgtccatcagctcattgtgaataaagccctttgggtgaagaacattcaaccattgcaaaggatcgacttgtacagtagactcatctgaatttgagtctcccttagcatcagtagccatgagggctaacaattttcccctccttggacagtctctagcatgatgaggtccatttcagatgaaacaacttgccattttggatgtctattgcaccacctcagtggtttcctccacttgttttagggttgcaattgaccctgtttccttctaactcttttttaggaggttttccctctaccctcgacttctttgtcccctcagcttttgagttttgggtggtggagatggcatcgactatcttatagtccactaagcaatttgttgtagccattgcaacaaggaaatctccagtccacaatttagtctgggctcacccttgcaacctagacatgaggttgaatagtttgtcttccttgaacatgttcttgatgtccaacatcaaggaactcaactttttgacatatattcttgtagaaaacccatgtgcttcaatcttctcaaagattctcaagccacccatggagcattagtggggaggaattgatccctcaattcctttttcagagtttcccatgtggtgatatgggacctccttgactcaacatcatcactcattctcgtgtgccaccaaagttttgcatctccagatagatacattgtggttatggtcacctgcttgactagagggatatagacaacactaaaatgttgctccatgtcttacaggaagttctttaggtcctttgcattatgcaccccactaaagggctttagattaggtactcgcaccctggctggggttggttttgaagtagctggtgttccctgaatgatagcccgcttcaacaatgtgatctcccctcaaagggactcgatcttgccctagaattcctcaatgatggccttgttctcaattgtgaaggcaacaactcaattcttaaccaacttatcacaaccttcaagtgcacgccactaaacactaggttcattgcaagcctttgccactcttatagatagagtggtgtctgcattaagagatcctccaacatgtgtctccaagcgtgcaatttgttcacacattgcctctaatgtgttggcatgcatggcagtaggtggcatgagcatcacatggcctacactactagcacgcataggtagcaggtggcataagccactcctaaccatgcttttgcctatcaaaaaaataagccactcctaaccaagggcacacactcaggctttggacatatgggttaggagtggtagtgatccttgccaagcacgcacccatgggtattaagccatggtatatggtgcaacccgtgggtgcaatgacatggggtgtgggtacaaaacaaacatgagttggttgccttggcttggactcaatctcgatatgggaatgcacgtaagcatgtttagcatgtctaagggctaatggggagcaacatgggtgatgagccgagggcaagattggcaccaaggcatgttgctaaatgtgtggcccagagagggcttggcacgcacacaaattgcttagagacacatgtagcaggcttataagatgcagggctggtgcttgaatggttgagatgtggactaactcataaggtaagacacttagcataagtgtggactaagtcacgaggtaggacacttggtaggctaaatcatggattgagtcatggggcaagacacttgactaagcaagtggagcatccaagtctctaaagagcataatgggttgagtgtcttggacatgtggtagcagcatgagcggggaagacaatttcaaaaggataaagtagttgttgaagacctttgaaagtataggcttgttcttagatatgtgggggtggctggtgccaccaacttgtataaagagggcaagagtgccttctcaaagatttgaactcaccaagcaaattgtaggagtcttgctggaaggttttgtcttgaattttatagagaataaataaacaagttgggggaatttgaccctataatcttgtgtgctctgtggttttctctttgttccaatttagtgtagcctctcttgggctgtcttagggtgcgttaaagcattgcatagacacaaaagttcaaaggaagaaacgtgcttgtgacaattgctctcaaacccttcctttgttagtgtttgttgattagttcctagtttaccttcttttagtcacttcaattatgaaacctatgagttcgataaaacattataagtctacttccaaatttttctttaataaacctatttgtatcccttttagctagtccattctaatatttggggtccaactttggattatttggttgttattttaattagttcatagatgatttctcccatatgacttggttatatgttctcaaggatgaaacccaagtatttgatgtttttaacgcctatgctaaaatttctaatcaattgaatgttaaattaaaaattcctatagttaacaatgtccttgagtacaaacattcacactattagtgtttctttgagtgaaatgatattattcatccaaatattatgtgttaatacaccttaacaaaagagaattattgaaagtaagaatgatcttatgcttgctattgcttgtgccttcatagttcaaatgactataccaaagttatgttggggagatgttttcatgatgactcttctactaaatgatcgtcttctcaagttctttatggaaagtctccttttcaaatgttatttcatgaccaagaaccttttatcttcctcccaaagtttttgagagtgtctatttcttggttattctcaaacttaagaaggatattggtgttacaatcctacttcatgaaaacactttccttgtgctaatgctacctttttttaaggatgtaccttattattttatggtgtgaaatgaattacatgagcctttttcttccaaaacctgttagtcctattctagttctttttattccttcttatcaaaggttcgatgttcacaaatgacaatggcattctcctcttaaaggagtgaagtcctcgttgtcacctccgccaatcccttggtgtccgtaatttggcttcggacctcccaatcactatttgtcaaggtacacactcattttaaacatcctttttccttgccccccttttttagagccttctttacctctctctcttctattacttttcctaagtcttacaatgaaactctttttggtcctagttagaagcaaaaatgcattcttttaaagtgaaatcatgccttgggtgttgttcttaagcctcttaatgttccaattgttggttgttgtcgagtctctaccataaagggaaatcttgatgatacatttgatagattgaaggcttctttggtggctaaatgatccacttgacctatgaccttgacttattttgagactttttatcctgtgactaaactaaattttgtaagaatcttgtatctattgcaacaaatcataattggtccctttgtcaagttgacgtaacaaaacgcattcctttatgacaagttgaatgaaatagtcttcatggcttagccacttgggttttcgtctaaggggagtatgttgtttaatttaaaaagtctatttatatattcaaacaatctcttcatgtatgtttgaaaaatttaagcaatataagagtatctcatggcatgagcagaactcaatgggattgaaagtttgtttaatcacttgtatacaactttcatactatagatgtcgataagcttcgttattttttgtgcattgaaatttcaaaatcaaagaatggtatttgcttgcctcagtagaagttcattcttcgtttttggagagagaaagcatagttttaaaaggctcaaggcgcaccaaaggcgtgggctttagtgaagtgaggcgcaccctattttacatatatatttttatataatataatcaagtgcctgaaaattttcctctattttccctttatttttccccttctcttctcttctcctcttcttcacactgtttaggaggctagggcattttttttgtgttttataggtccaaaacgaggatatattgggttttggaagaagaacatgccaaaatgatgtttattttgcctgtttttgtttttaaaaagatcagactccaaaatgacgttgttttggcccctgttcttttaaaagaacagaccaaacaacgtcgttttggtcttaggaaattaaaaaaacaaaacccttgtcgttcttcctctgttgctctgcaactcatcgccagagggtgagaagatgaccaaaagaagaagaagaagaagaagatgactacaacagaggatagaggtgcacctgttggaggtgtcacacctggccgagaagtgagtgccttgcgcgcctaatcagcgcctccgcgaaggggccggcctgcaatcaggcgaggcgtcggagggtggcctcacgccgcttggagcctaggcatgcctttcacaattatggagacaagttagcttggtgttgatgctgttgttatgtttattgaagctaatcaaaatttgatgaatgatggagagtgagggtatgaacctagattgtgtagggggctcatgggaaggttgattttcttaaccattactcaaccatatatatgtgttgtgtagtcagtgctgtcaaccaatttatgatcactttgagtttcttacttgaatgtagtcatacaacattgaaatatctcaagggaactattggtcatggtcttctcaaatgatcctcaggacatcttcatattgaaggatagattacctctgatcggatgaaatcttcccatgacagaaaatcaacaactggttattgcattttattggaggtaatcatgtaacttgaaggagaagaaataattagttgtggcttgttctagttcataggtaatagtatcagaaaatagcaatatagaatgtggattaacttggttgaaaactgttatgcaagaaattggcataccagtatcagatccagttcctctctattggtacaagtagtcatccatatttctagcaatctcatttttcatacgggactaaaaacatatcaaagtgccattcacttgaaggtggggttaatgaaatcattaccccacttatatgatgaaagaaccaattgactgacatctttatcaaagccctttcaaaagaaccccatgactctatttgtgactagctgggagttgttactacctattctccaactcaagggggagtggtaagatgcagaagaaactgtaggagaaattatagtagagattggagggaagattgttggagcattttgatttatgtaggcttataaatattcttattacttattcagaatggacagaactcgctattttcaagttatcaacatcaataattataaaagagttgaaatgaggcctaactgatttgctcttgaatcaacttgagaataggccaataatttctgcaaatagatcaacgaaaagcttaaaacccaatagcatcctaaattaggacccaatagagtttgtcattttttaactgcccaaaatcatggggtgcctgagattaacatggtaaagtgcaatcttctggcacaagatcagtgcccacctaagttttcccttaaatgagggtgctagccaaatgtttacttgtcaaatgcccaatcaacagtgccactgtctggagggtgacggttgagggtggggaagtccataactatctgtgtgtaaagaatagcctaacagtggagaagcagctgtggagagagcccagagcattgtgtatttggaggtttacttcagaccggaaggttgaacaaaactagcctgtttgggttctcagagtggagaagcagctgtggagagagcccagagcattgtgtatttggaggtttacttcagaccggaaggttgaacaaaactagcctgtttgggttctcagaggctggtttagagtatgaagtagaagagataaactgtgtcaattagaatatgggtccattgttctgtcatggagaagaagacgcaggggggatttcttctgaagatcaaggaagctgcaaggctaccttaattagaagggggaagacaatggccttccattggaacttcatgatcttttccatgtctatcctgtgttaaatctatagatatttgggtaaaaaaaaaaaaaggcattctttgatcccaatctttcttgctagagtggctattctaaaactgaataaaatggtttggttgttgcagcagaatttcgggctatgttagacagtttgagaagcttctactggaagtttgagcaactctacttgtacatcattgaaccaagttggttggttgataatttagattcaaaggttatcaatggtagattattaattatatggagctgtgtatttgagatttggctaagaagcaacagaagttctttcagaagtcctaagatgatgctaatttatgacaaaatgagcaagtactgagttttcatatttgcaacacaaagatgttcactttttactaatgggcccaacaactgatcttttcacccacatcgctgggacactgattcatcttcagttaagtttgttgcaagtctatgttcactaattcattcttctccatttccaggtctctctgctgcacttgttggagtg

SEQ ID NO: 13140 - DNA, 4703 bp, Vitis vinifera
  Intron number 5 from transcript GSVIVT01016353001 (locus G SVIVG01016353001) derived from phytozome v7.0 (chr-ID chr1 3; pos 4677920 to 4682622)
aagaggtgctacttttatttggtcatttacataatctagtacttctctaattttgcatgatgttttctttttatggcttcccattgtgacttcattagctaaatgcatcacctaagaaaaacacatcccaactctcttgcaatatttaaaatttagtgaagtcaggaccaatccccttggaacctctcctccttttagacattgttgaaatgacaacctttgaatcgacccctacataaagagtggataaacaaatggcttttgcctactgcaaactctccaaaagagctaatatctcaacctcaatgtccaactttctcatatgggttttgaagaagctctgaacactaccacattggttcctaggaatgtcacttatccctaaaagggcacccatcaaagtttaacataattagaccctctcaagatagtgcctacataagaagactctccccaattaacctttttttaaactgtaaatatgtccaacctaacaacattaaagcttaaaggaaccccaagaagaacaaagaaaaaaaatgaatcccatatgttttataatgacctttttcctcacatttctattattcgagatgagccaaatcaaggaaggactaggaacattccaaagaaccctgcctttgaaatgatctccaaaacccttaaagaaatgatcttctttttcatgcttctaataggaacctgattaatcatgagaacattgaaaaacttatgcaaaagtcacaaagctaccagatgatatagaaagagatgtaaaatgattttccactcttcaagcacatggcacaaatatccagatttagagctgtataatgtcttcttacctatagcatattaccctcttattagccacaagtgatttaaaggccttaatcttagaggagctttagaattccaaatgaacttcgtaggatcaaaagaagttgtgttattagattgtgaaaggactctaaacaatgagttaactaagaacaaacaggaggatggcaaatatcatacctgtccatgcctaactatgctcatagtcccttcaagtgctcaacagttgaatttgctgaagaaactactccactatctccaacttccgatcatgagaactcttcaagaaggatatttatttccctattcaggagggattagtgttctagggaaaggtgaaaaaacactcctttccctataacactaatcctttttctataacactaatcctttttggatagccaaatagatatcccttgaacacttgtcctcttctccacaaacaatctatttcgaatacaaatctttacaaccgttcaccaaataaaaccttgtttactatagaaaggcttataatatccggttctctattactcttatttaaaaagccactaaccatttcactaagtggcaatttcctatctagataaccattgacacactataagttttattgaatcttctctagctgaatatgcattgtcctagggctcacaaatagggacataaagtacctatcaaaaataaataaatagggacataaagtaaattgacaagtggaaagggtgcttttagtgagtattaatctcttatccttcgcaaatattgccttttacaagttgttatctctgtcttggaacattcttcaatcgactattgtattaaacaaaacttaagaggagcttccagtggtagatcctaataggtagttggcaactttcctaacctttaagcgaattgtgactctttttttttttcttttgataagcaaataatgaaaatatattaaaaagcaccaaaagacgtcgtaacaaagtacacgaaacgcgtacaaagagcacctaaaagcacatcgatcacgagacaacacaaaaaacaactccctctcttaacaagaacctaaccaatctacaaaaccgaataaagacatagaacttatatctatatacatcttcacccttgaaaacaaatgtctaaaaaaagagttttcaaatcttgatccaaatgttcttcattatcagatgatcttcaattcctttccttccatgcaatccaaaagatatgcaaaggagttgctttccaaaccttcttacgtcttttacccacaaagggaccatgccaccctaggagagtctctttaatggtagcaacttgcgtccaatgaataccaaatagcgtaaacaacaactaccaaagaacacatcattgaccaaagaccacccttttttctaaagttgatctattgtcaaaacgtttcccaaactagcctcccctcccctccaaaaaaaaaaataaataaaaaataaaaactaactaactaactttagagggcactcatgagttccaaattatgttcattggaaaggaaatcgatccctctaggttacaatgtgacatataaatacttgattgagaacttatttattaagttcatctacaccaccttgtcttcccccacactatcaaccacctctccttgcaatcttgaaaataaaactccacattatccacttcccaatcatttaaaggtctagataaataggggttccaatgacctctttccctagtctgaacccatagatccacgacccatgcctcttttgaaatggctaaggcatataaagaagggtttgtccgcacaccatttatcctttcaaagcttcaccctcctattacccatcacaaatgaagaactacaatagaagttattccactccttcatgatagatttccatagctcgacccatattttccaccctaatttcaaaagattcctcattcagttgcatatcaccaattccatttgcaaaaaagcaccttattcaacaaagaaaggtgtcttgtacctaaccaaatccccaacaaccccccctcctcctctctctcctctctccctctttgctcttctccattcacactattgaccacttcacaagtttatattagtcactccatgcaatgctagaaaagttgcatttaagcttctatccaaagtatcgaactcctgaaactcattttatgatgtctcccctccttgaagattgaaccaacaattcttttaggaaatgatagtaaaaccattcaggtccaaggctttatccttgaccatatcagctaaagcgctagaaccttctcatcctcaaggtaagtctttaaccctactctatcaaccacaggaataattttaggggggtgtcccctcaatatcggagcttctaacacaagaatctgaatatagggttgcaaaaaaatttagagatccctgcactgatcttaagaatctcatcaaacaccattttctgtcaatctaccaataaagttacccttttttctgtgtatgaaccattttatggaaaaattttgtacttcccatcctcttttctaagccacagcatgttttacttttacctctaaaacatctctttccatgttgctggatgattgcactcctctagcacataacaactacccttcacctctccaactctctctgtcaatacccaaatttccccacagcacaaactcctagccaatctccctgaccttaacttttgtcttcaagccatatgtaacatttattgtagttgttgacttggtaatggggcttctcctttcctctttgggatgtgtgtctttgctggatgtcttgtaactggagagttttcatgcatgctccttagggttctgagaagatacttttggccactgactctttttaaagttcatttcttctcttgctgtaaacagcagtgctgctgtttcaagtattttatgagtatgttggtccctataggattgtgtttttcattgtattttccttgatggtagtaaaaatatttaaataccatatttggttctttaaagtgtagtagggcaaatggaaaaaaaggcaggcagacatggaaaaaatcaaatttaatagtcacagaagtctctatttatctaggacataaactactttttcagaaaacactcgttcaccttctaacaaaaatatccggtcccttatgtcactagaagttgaacttttcattgtaaatgagaagagtactcaagacatatttggtactctcttttgaaggaccatatttaatattaatttctttcaatcttgttctttctattcttgacaaacttttaaaataaaaaatgaggtagcctaaccattcttgcaactgatttgtggtgccaagaaactccaattctgttgtcttaaagattcttgttgcagtaagttgctgggtcatgtactagcaatagagtggttcgggagtttgtacaaggaatacttctctgatttttaacttgaattactgtaagtgcctttgtccttcacccttgaggtctggctcgagtcgtgaaggggaggctttgtgggaggttccaggttcaagtcccaatggagacaaagatatacctagcaaaaaaaaaaaaacacaaagagtgcttttatctttcataattttattttagtaatttagtttagcaaaatgatgttagacactaacaattatcatggttaattttgattctagaaaccttgaacacattttttttctttttgtaatgtttacaactttatttttatttttatttttatttttgagttaatggatagcataacaatctttttctgttctttagttttcttctgacattttactgcagttttttaagggccttaacatcacagcagatcataa

SEQ ID NO: 13141 - DNA, 2572 bp, Vitis vinifera
  Intron number 21 from transcript GSVIVT01031931001 (locus GSVIVG01031931001) derived from phytozome v7.0 (chr-ID chr 3; pos 5498195 to 5500766 reverse strand)
cagcctctgcaaaggtatgttcatctcgacttgtttctttttctcaagccaagtagcacttgatctaggtagaatgcgagatctttgattctcaaccgacacaaggttttatggttttattacatcctcagtaatctaatttatgagtagccgcttctttggcactccctcctacagttgtttggttttgtttgactattaatttgtataggtacatattcagaaatcaaatgaaaaggttactttgtaggaatatatataacacagttagcaattgtcccttatcctgtttgatttggaaaactattgcagtatgcaacacatttcctatgatcactgctctgtgtgtttgtaatctatttagataatattatttgctaatgcacagtggtttagcctgtcaggaatttgttatatgtttcaaatttcttcattgccttacatcttatatgatgtcaatttttttagataaatagcttcctttttttgacgagaacaaatccattgtattaagtgcctaacaaaagagtgcaatgaagtatacacaatgtcttcaaaggcaccacaaggccacaccaaatggaggggtactcgaaaaacaaccccaatccactacattgagctcagctattccataaagtccaacatggacacaccaactcctgagtacactctagcccattcaaaaaatttatacataaatgattgtttgagtgtttcatctactttttcagtgttctcaaacgctcatttgtttctttccatatggtcaaaaatagaccgaagggagcaacttttcaagctttctttctcttgctccctacaaaagatccatgccaactcaggagcgccttcttttctgaggagtgcattacccactctattccaaataggggcgaaaatcagctgtcacaagattattgttttcgagcagtgaagcaggatatggtcaaactttcttcttcttccttgcacatatagcatttattcagcatcatacacccccctccttttaagttggtccaacgtcagcatcttaacccaagtggcttcctaagttaaaaaaaactgtcattgagccaaagaactctaaacaatgctgtaagggaaggtctctgtcctaatggacaaagaggaacaaactgatttaactgaaaaaaggccacacttcaagatccaccataccattttatcctcaatgtccctatcaatggactggatcaaaatattaaaaattggcaaaatcttggtggttggcggaaacttaaaaaaaaaaaaaaaaagaggttcaatagaataaaagtttatcaaaactcacaaaatgttaagaaatactttttaaaaaaatgataaaataagcaataatacatacatacatacatacatacatacatatatataaattaaatctattttattaaaaaagaataatatataagataaaatttattgcattgaataataatacaccatatttgaaaatgcatgatctattttcctgctttagatgtaaatatgtaattaatgatataaaaaatgataatatttatgataatttttgttaaaaaaatatttttaattttatttataaatttaattttctttcatgtttaatttttttttataaaagatataaaaatgcataaagtaaataaaactaatatattattaaaatttaatttataatattgtatatatatatatatagatagatagatagatattgtggaggaaaccaagatcaaacccattttgccccttgtctttcatttctttcctttttctttttttttctcttaaggtttcatttttacagaatcatatcttctctatctcccctgttttctgtttctgctccaaattgaagctttatccaccgaggttgcacagtttctctcttctaagctcaaaaactgactcaccgagggcacaattgagatcagtggctgttgcagagacgcctggttttggtattagtttagtgttttttttttttttgccttttgtgttcttgtttatgttctgtttggtttctgggaaatcccaacagaagaaatgaatacttggaattttatggagggtctgggggtgaaatgtatcccgttgatgtgcgatgtgttgtcaattttggccaacacagggggataaaatcctgaaatatccaaaaaaataatgaaatatcatgaaaattggtcaaaaaataataaaaaaatcactggaaaattgctgaatttctgttggactgacttttcctcccattttttctttcggggacgactgataactgatatatctgtcaatatattggagaatttcgctgatattttattcttgcttctatggtatcaattctaacaccaggatacactgtagttacatatgtaaagttagcagctaaaaaatgttcaagaatttttcatctctaaaattcatgaatttgtggatgaataatgaagtttctatttgatttaccctgtatttctaaaaagtgtatcattccttgctcaattacttagatttattctctattgtttcagaatagttcatttcaagcgttattgccagttgttag

SEQ ID NO: 13142 - DNA, 14459 bp, Vitis vinifera
  Intron number 5 from transcript GSVIVT01000237001 (locus G SVIVG01000237001) derived from phytozome v7.0 (chr-ID chr7 ; pos 20360890 to 20375348 reverse strand)
caaagtaagctggctgaccttttgaattgacattcacttaattgactttgatattggtttcattctatttactgcaaattagtagtgatagtattcttataaattcaaaatgtatcctaaattttattttaattattcacatctttaacccttctagaaggtctgagaggcaaagtagcttggtttctctgatgtcttcttgaaggaggattcaaatactgttctttcctgtatgactgactagagaggatgaaggccacagagaggcaaagttacttggttgctctgatatcttgttggaggaggactaagctaatattctttcctggatgactaatgattggagaggaccaaggcccgagagaggcaaagttgcttggtttctctgatatcttgttggaggaatattcatcactgctctttcctggatgactaatgatttgacaggaccttggagatatgactattgactaatgaggatagtggaactgtcgagagatgtgggctgatctttcacatggaggcctagatcaacaaatcaggaagctgagatgttggctaatttgagcctcttttgcattaggctatgtgggagaccatctccctcaatatcatttttgtatgacattggcatggagggcaagttgttggaattctttgttctttatgctaattctctttcaacttggaaggacgcctcatcctttttgtgctttctcctctatttattatattaccttgttttttatcaaagaaaaaagaaagaaaagaactgaattgtttttggtggagagcagtgatgtaggtgagttaggactatgagatccaaggctacatggtctttagaaatctgttcctaaattgggtgcatcatttagaaaaagataggttctcaagtggggtgtcagggatgagtggggtactgttaggatatatgggcaggtaataatcctttatgcagcctttcctagtagttttcatgacaacttgcaggattggaatatcaattttgtaaaactcaactggcaatgcttcttatagttctagagttctttttatccttgtttctattcgtattcatttttggataatgtgataggagaagatgattgtagcttgttgtggatgatgctctttggtaatgatgattgtttttcccaattgaactcaagttggaaggttacatgggttcaaagaatgagtgtaactaagttgaggatgttaaaatggatgcgtgacaatggaagaagctacagaaaaaaggaatgcttttatcataagttagaggttccactacttaaggatgggacaaggaaagtgggcatgctcagtcacgtgctatggagggaaatgaattgctaataaggagcgcttgaatcaaatcaaagggttccgaaaagcatgatgtagtagaaacaagagaatgaagaagttgatgatggaatgatttccctttaattgatggataacatggccttgagggaaagaatgtacttatatggctgacccccaagttggggttgaagtctttattgagttgagtaatatgggccttaagtgtttagagtatttgtatagcttgacctcaaagttgggttgaaggctttattgaattgagtagtataagccttaagagttgaaaggaaaagaaggtacttgtatagctgaccccagaggttggttgaaggctttattgagtggagtagtatagttcctttcaaggtctcttctctattttggggtagttctgaataacatccttagagtggataatttgattttaaggatttgggtaattcaaaaatgatgttttgtgtgcaatttggtaagtgattgaagatgccacaactctttttttgagcgcttctgtttatgctccactcccttcagataaggcgcacccatcatgagaaacatatctagagttgtagtctgagtgtaacagggtattattggttagcatagaatgtagggttttgctggaaaaaaggtgtttgaaatgtaaaaatctttatcaatcaaatcatatatgatttggtggttcctaataagtttcataagatgaactaataagataatttcccaatctagaagattctttaagatccttcatgaatttgaattgctagttgttaatttatttatactcacagtttgtggtgtgttcaagcttcttatgcttatgttagcaggagccacataaaatctgtccagattcatagagtttggtttagtcaatgttttatgcatatttggtagggagtagatcatggagcaaatctagagattgaatagtggtatataggacttttccccccctctaatagctgtacaaattgtgtatttgtaccctgtaaaacttttctagtctgattaagtgaggaatcattttcctctcttttcctctcttctactcacatggtatcaaagcctggaaatatattctaatcctttcctcacaattttttctggtcttcaccttcttgtgctgcctatttgttttaccaatgacaggaatttttgtataaactcctattgaaacaacttaacagcctagattcatcacccattatgataatcggtctccaaattatttctgaaaagctgactggtaagaattttcttaggtggtcataagctgtggaactttaccttaagagtagaagaaagatgggtatttgtgcggtaccattaaggaataaaaaatctcaaatccttcttttgaattatgggaagctgaaataagtcatctcatggttgatcaacttgatggaacttgagatcaatgaaccttttctattaacttgccaaagaagtttgggatgtggtatcatagacatattccaaaaaagtaaatgctacttagatatttgagttgaaggtaacaattcacaagacaaagtggggagatctcattgtgattgtttgctacaacattatagcaattttatggcatgaatttgatctacattatcatttaaagacaaaatcactagaggatgtggcaatattggaagaaatgttggaacaagattgagtctttgaattttagttgggctcaatcccaagtttgatgtgtggttagaggacaaatgcttggtaagaaaccttttccatcttagattaaactttctcgtatgtgagcggtgaaaaataacatagggttatgatgatgaaacccatttcataagaaagctcaacatttacaatggttcaagaagtgctaactctgttgctactagtcacaacaaactagggataaaaaacctagggagaaagatactaggtggtgcaactactgcaacaaatcaagacatacaatgaacatgttgaaaactacatggaaaaccttcttctctttgtgagaaaggaggcaaacaaccttagaagaaggtgaatcaaactgtgaccaccgagaattttgaacctaaagatggcatgcccggtgggacaactcaacatttagataatgttccttatacaaaattttgagacagattaggaacttaaaactctagtaattttgctcaatccatacatctttgagtgccttttatgatgtctcatctaatccttgggttattgattcaggggcaactggtcacatgactagtgattcacatgcctttttaacctatattccatgtttaagaaaagataaggtcaaagttgccaatggctcttttattcccattcatggaagggttcgatttctttgtcttcttctttgacgctaccattgctcctcatgttctaaatattgcttgtaatttgttgtccattagtaaggttataaaagagctaaactataatgtaactttctttcccactgaatgtgtgttttaggatctagctatggggaagaggattgacagtgctgaagagagagaagggttgtatcacttgcatcttgaagtgtacaaaagtgcccaagttcatgtcgttggggtactcaagaataaagtgaaggaaatttagttgttatagtatcggttaagacttcccaactatgtttttttttttataggcaattaatatatacattaatgacacctaacaaaaaacgcacttaagtatacgttgtgtatactgactgcaaatctttgttgtaaataaaatactaaagcttaaatacgtggtaattgtggctaagaaaaactagagataaagttagcatgactttgtagtgttttaagttgttgtcctttgagataaactctaatgtgtttatttgtttttagattaaaaggattaattatttgctaaagtgattgaaaccctaaattaaataaataaggagaaatttcctaaaatattacatgaaataaatcaaaccaagaaaaatgtctcaaagagtttcacaacccattgtcaaatccttagagggggagaacattataaaatttagggtttaggagcaaagtcaatccatgaccaaattgaatcctaaggccaatattacatttggaacttagatttttactattaaaacacagatctcttaaaccaattaaatataatgattaattttgatttttcagttttattcaatcaaaagcctatatccatctttgtagattcaacccttacattcgttaacagtatgatcaaattatagtaactaatgatcaaggttttcctatgaatcactagtatcttgataagaatcctctataattcatctaaggagaactaatataaaggatctatttctaacgatctaaacttgaaaacataatcaaaccattcaatacattttcgtttcttgctactcctcctttggattcttcaccttcgtgttagcatcttcggatcaatcaagttaaccaaacatggtggaagatttctcctcacaacctatgtttggttgctaagaaaataaaatagaaagattaaaaaagaaaagaaaagaaaagaaaacctaaaacattattaaggactttcaataggtgagatcaatctccctctctctattctttcctcctctcctaaaaaaaaacttaaactaagagagtttatataataaattcaataatctaacatgtgacatacttccattggccatttattagaaagaaaaagtcatagaaaacttaaaagacttaaaatattacgagttctaaatgagtatcatgcattttgacttggatggaggcatttggaactcgttttgatgtgtttccaaactcaaaactcgatcaccagtggccgagttcaaaattggagtgagttcaaaatggttgggttcaaaattggagtgagttcgaaatcaattttgaactcataagtggggggaaagctcaattcaaaatccaagcatgtgagtttaaaatttactatgaatttcgaactcacccactgcccaagctatttcaccatgttttcgggttcaaaatgcatgcctcttgtttggaataggtggtgggttggggttcgaactcaacctctactaaaagtatcgttgcattcccttaagttcaaatggccaaaaaccattttgaattcaagttatcaattttgagctcattattcttctctacccagtttgcttcaaatgtgcgtaacttccttgtttttgctctgatttgcacactgtttgaagcgttggactcccgacttcttgagcttcaaaacgatatgcaacttgtcaaaaaatgaccttggaaagtgctccagatttcaattcaaagttacagtatatgttgctgctagattccaagttctaaattgccatgtgaattagttgaattttgcttcatgcttcctttcccatgattgtgtgccttctttcttacttcataatgaccattcttcatcttttaagttcataacatcctcatcttgtctttcctcatgttccttgagtcttgactctttcattaaagcatttttaacccctttttcttccttggttgataatgacttttacacttagtattcttttcatcccttgaacttggaattaggctcaaaatatatgttagatccataactagggtttgaacatcaatttaagttaagttggatgatttgagcttttatattgtataaattatatcatatgtgtcattggagcacatattttggctctaaccatatacaaagatgtcgaaaggccaaaccaagtagagggatatataagaaacaactcccacacactacatagagctcaattaatcaatgaagtctaagatggacaaagagtggtctcctatgaatgctaaccaattccaaaaagtaatacataaaagattgtttgagagcttgattgactttgttagtattctcaaatacacacctatatctttccttttatatggtctaatataggcataaggagtaattctccgaactttcttcctctttctcccaacaaaggaaccaaacttttatatgctgaaaatttttctgttctagactcttttagatttgaatgtgaactttgtgagttttcttagagtcatcatgttttatttctcatgtaaaacaaaaaaatttagatcctgttttccattattcatagtgatgtatgggataatttcatgttagttcttattttggtttagatggttcataaacctcattggtgattgtattagcataacttggatttactttctcaaaatgaagtttgaagcaattataatttttaaaatcaatttcatacaaaaagtaaagttgaaagtatattataataatattttgggatgcggagcggtcaacaccccaaggtttgggtcctcatggagagtcttaggagcttgaccatggaaggttcctcgattataaaaaaaaaaattataataatattttgggatcttatcttcttaaaaatgggattgttcattattcctcatgttttgatatgccccaacaaaatggagtggcagagagaaaaaacctacatttgttgataattgctagagccttatggtttactcacaatgtccctaaaatttattagagagaaaaaatagacatttactgataagtgctagagccttatggtttacccacgatgtccttaaaattcactagagttatgttgtcttaattgttacttatttaataaatcccatactctctaagactctaaactccaaaactcctatctaggttctaagaacactatttcccaatattaatctccttaggtcccttcctcttaaggttcttgggtgtgcaacctttgttcatcttctaagtagggtacaatctaaattagatcttagagccattaagtgcatatttctaggttattcacctacacaaaacgggtataggtatttgtcactatggatgtaaaattctttgaagatttgttatatgcttccaataaagatctttaggggagaaaaacagtataaaataactatcatatcctttagatcaacctaatatgtgacacctaattcaccaaatacttctttgatggatcctatgcttgtctttgactagccttgcacccaaatcgataccgtgtaatagggaacatgaggggaaccaaactggaaactgaaccagtaaatgttgatccaatccttttaagaagaaaataggacaatgtaacggatctatctctctctctcataccaatcttcaaatctaaaggttggtaattttgatacccttttaatttttttttttttttttgttgttgaaaaccttgtttgatattgatcttgatgttcctaattataataagaaagggtattaaaagttgtataaaacattttctttccaattttgtgttgtaccatcgtctttatccttatttaaagtgaaaaaatggtacctttgagaaattgggatcccttcttggaagaggattgagtccttttttatagattagttacaaagggtaaaaatgtaaataattgaaacctataaaattggaaactaaattttgtataaataaatgtataaaatcctaatcaatttttcattcttattccataaaatctgaacttaaaaataggaaaaagattcatcaatgataggattttccacactcctcaagttggcacaaagctatcaatcattcccagcttgcaagttaatgacttgaatgaatctctttgaagtccctttgtaagaatatttgccaattgcttctttgaaggaatataaagcatacaaatcactcaattttttatgttttctataatgaaatgtttgtttactgtaacatatttagttttttcatgatatatagggttatgaacaatgttcattattgccttattgttagagtataatttaataggagttttagtcgacatcctctatttttgtaggagtcttcttagccataagaattgacaagtgccaagtgttaatgctctaaactctgcttcaacactatgtctagaaacaatcgattgcttcttgcttttccatgtgatcaaacaacctccaacaaaggtgcaataccttgaagttgacctcttctcacttacagatctaacccaattagcatcggtaaatgcctcaacactcatatgatctctctttttgaataacaatccctttcttggagtcttctttagatatctaagaatcttgtacactacttgaaaatgttcttcatgaggggaatgcataacttggctaaccacacttactgcaaatgccaagtccagttatttagcgagttagataaactttcctactaatctctaatatcttcttgtatctattacaactccttgtgacaacctcaacctgtaattaacatcaattagagtatcatcatgtttgcaaccaagtatccctgtttctttcaagagatctagggttcctttatgagataaagatcttattctttgatctagctatcttcatgcccaagaagtattgtagctgaccaagatcctttatttcaaaaactttgtctaggatctactttggtctctccattttggtaacaccattacgagtcataataatattatgtacacaaacaatgaaaatagaaatacctccattgtttgaatgtttgtagaacattgtgtgttttgattgacttcgagtgtaaccatggtcatgaattgactttgtgaacttgtcgaaccaagcacgtgaacattgctttagactataaagggactttctcaactttcatatcttatcaaagtcatacacatcctttaagccaagggtagattcatgcaaacttcttcttcaagttctccattgagaaagacattctttacatctagttgacataaaggctaatcaaaattagttgcaagagatagtaatacccgaatggtgtgcatttttcactactagagtgaatgtctcttggtagtcaatatcatatgttttaagtgaaaccttttgcaaccaatttggctttatatctttcgattgaacggtctactatgtatttaatagtaagcacctacttgcatcctgctagattcttctctttaggtaagctcactaacctccaagagctctcatctcctccataactgcttgtctccatttttgaacaagtagagcatcttggatattattgggaaaaaaattcctaaaccagacaagtgagttgtaaaaccgtttaaggttggagacaatctatgataagacacatatttagatataggatgcatagtgcaagatataattcctttcctaatggaaataggaatatcaaggtttgacggaggaatggaaggggaaattgagttacctttgtttggatttgctatagattcaagctcatggcaatattcaagaggttgaacttctgttgcttgaaggttttgctgtcttgaataaacatgaagttttgattgtggagcaatgatagtgatatccctccttgaactagatcgattaacaacttgttgtggcattggaggttttaagctaggggtccatagtatcctaggtgagtcatggatgattttggccaatttaaggtctgatggtttttggcttggagccatattgggttgtgagacaacaattggtaggggtaaggacaattcctaaaacaactcttcctggggtgagttctcccaccaaagaggagtttttgggaaataaggctgattctcaaagaagataacatacatagtggcaaaattttttctagaaaaaaatcataacatttgtatcccttttgagtcggagagtagccaataattacacacttgagtgctcaaggatcaagtttactttagtgatatttataaatatggataaaaacagtgcatcgaaaaacctgaataatctaatatgtaggtagatggttgacaattggtcaagagatgtttggaagttgaatattcgggtaggcatttggttaatcaagtatgaagtggtaagaatcacttctccccaaagatattttagaacccaagtggtaaacaaaagagaacgtgatgcttccagcaagtgcttatttttaagttcaacaataccattttgttaggggttatcaacacatgagcattggtggactattccatgttctaataggtaggaactaggaaaggtattgaattattctttaccattataaatttttaatccttgtatgtttgtttggaattggttttggactatggtatggaagtgcttaaaggtttttctgcatgagatttttctttcaaaaggaacacccaacatactctagtatgatcattgataagttatgaacgagttaatcactttagaagggccccaaatgtcactgtgtataagagtaaaaggtttttgtagggacaaaacggaaaaatagaatgatgattcttagcaagttgacaaattttacattgaaatgaagagaaatttttattcttgaataatggagggaaaagtttttgcaaataaggaaaacttgggtgcccgagtctataatgccaaaacattatttcactatgagcagaaaaagtatcactagttgctgtcttttgagcttgtctattcaatgtaacatgatcttcgaagtaaaagagtctatcttgttccttagcactgccaatcgtcatcccagaagccaagtcatgaaatttacaatgagaagggaagaatttaatgatccattgcagatcctttgtgagtttgctgatagataacaagttacaagacaaatttgggacatgaaggacaaactttaacaccaaggaatccgaaattgtgattgtcccttttcctactatagaagaaagagacccatcagctgctttgattttagcatttccaggacatggtgtgtaggataagaataaatgtgaaaggctggtcgtatgatcaattgcacctgaatcatgatccaagaagccttatgatcaaaagaagctgacagtactttaaaaaattacctttttgagccaactaacaagaggatgaaggggtagaagtggggctctggatctgctttagaagttcaaatagttgctctacttgttccttactgaacagaggcattttggctcctcctaaggtggagataggttgttgctcagattagaatccttgatcattagccttatctggtggttagttgctctttcagtttgctgtttttccatgtagcttccaacaagtctcccttttgtgtcttggtttattgcagaagtcacaccagactttccctttttcatccccctttttctggtttctttgggtagcattagtagtggctttgaatgttgttacaagtgtagaatcttctgcaatattaggtgtggtaggagtccccatcatgacttgtctcctgcttttctctctacgaacttctgagaatacaacttgaacagatggcagggggtctttgcctgatatgcatttatgaacttcatcaagttctttgttcaaaccagccagaaacttgaagactcaatccctctcaagaattttcatataatgggtactattagtaacacaagtccattcaaggtcgtaaaacatatccagctctttccagagtcccttcaaggtgttataatattttgtaacaccatcattaccttgtttaagctcttgaatcttatttatgatctcaaacacttacgaacttcatcaagttctttgttcaaaccagccagaaacttgaagactcaatccctctcaagaattttcatataatgggtactattagtaacacaagtccattcaaggttgtaaaacatatccggctctttccagagtcccttcaaggtgttataatattttgtaacaccatcattaccttgtttaagctcttgaatcttatttatgatctcaaacacttgggctgaattctccatatctgaatatgtctccactatagcatccaacacctgttcagattttggcaaaaacatatatatttgattctctggttccgtcgagttaattagtcatgagatgatgaaattctcataatcccatgtttggaacttgggatcatcttctaagggagcctttgtcaatctggtcaaatacctgatcttccctttccctcaaatatatagttttacagattgagaccaatgaagaaaattttgcccattgagtttatgggttgtgatcgattaggtcaagttgtcaaaactgtttgttggaggctgaagcattgattacaatgtcttctccatttgcagcttgggtgtctctctagacatggctttatagacttctcagaaggacagagcaggaatacgtctcaacctggaaataatataacaaaggaagttcagcaatgaaggctgaacacttagtgattccagtggggaaccgtgagctttgataccatgaaaaatggtacctttgagaaaacctaacttttctcatatatatatatctcaatatatagatgaaccctttttatagactagttgcaaatggtaaaaaatgtaaacaactgaaacctagaaaatagacagatagacatataaaatcctaataaatttttcattctcatcccataaaatctagatctaaaatataggaaaaagatttttcaatgataggattttccacataaagctttcaccactaagttatcttttgagtttattccaaaaaatgtacaagaggctataaagatttaaactagaaggaaagcaatattcgtggagataagagctttacataaagatgaagcatggaaagtagttaaattacaaggggaaagaaacacgtggattataagtgggtgttcgctataaaatataggattgatggatctattaagagacataaggctaggttagtagctaaggacgttgactattaagaaacatttgcctctgttgtgaaaattaacttagtagggtccatttacagaatgaaattccgttgagaaaagatgtaccggacgctggtgggaaaaccgatttacttatcccatacaaggctagacatagcctatgcagtatgttaagccaatttatgcactgaacattggaatgtcaaatgaaagcacttcaaagaatctttaagtatttaaaggctacttaaaatgaccatcttcaaatagaagcatatataaacatagattgggctgactcttttgtgaatagaagatcgacaacaagatatggcacctttgtaggaggcaatcttgctatatggagaagcaagaaacaaatggttatgacaagatctagtgttgaagctaaattttgggctatggctcaaggaatatgtgaaatcttgtggattaaaggactactcaaagagtttaaattggagcccaaagaactgatgatgatttattatgatgacaaagttgcaaataatattgcacattattcaattcaacatgactataccaaacatgttgaggtggatagacatttaatcaaagaaaaaattgagagtggacgaatttctacaccttttgtgacaaccaagcaatagtttgcagatatcttcacaaaataattctcaataatcacatttgaatctatggttagcagctgagaatgcatgacatctatacactagcttgaggggaagtgtttgggagagctacattagaattgtctagatttatagaatatggtttagtcaatgtcttgtgtatatttggtagggagtagatcatggagtaattctagggattgaataactgtatattaaactttttttcctctaataattgaaaagattatgtatttataccttgtagaacttttatggtctaattaagtgagtaatcattgccttctctcttcctttctccccctcacagattacatgaagctctattttatgtctattgatcctttctttgtgaaatcatctagagcgataggatgtggtgaatgtattgtagtgtacagttattacttattaaatgtggctttgctttcttctctattacttaactaggatctatcatcctttgttgtaattttatattcttgtttacatcaatggtttctataagtattgtgtatagtttagtttaggctctataattcagttaattactgctttctttctgtttcagg

SEQ ID NO: 13143 - DNA, 8033 bp, Vitis vinifera
  Intron number 5 from transcript GSVIVT01022990001 (locus G SVIVG01022990001) derived from phytozome v7.0 (chr-ID chr1 2; pos 17250202 to 17258234)
cctcaaaaggctcatagtggaacaacactgcaagagtcttcaatcattgccagagcctccatcaagtattcaagatttatgggccacacatccctggaaaccttttcatatccatcaagtgcatatgcattgaacgagcagagcgacactgtggaagctattctacggggaattcggcttgttgcatcaatacagaaatccagagctccaaatgagcattctgcctttccctggatgttctattattaaatgttcgcgtgtgctaagaattcttaaaacatattttaatatggtgttaaataattgacgcaatcccacaaaataatcttggaatactaatcctagaatattatttctcgacatgcctccaaccttttcatgattcctggtaaccctggtctatctacttagtataacattgttgcttatggaagtaccattccagagtggttcatccatcagggggtggggtgttcagtgactgtagagctgcccccacattggtataataccaagttgatgggattggctgtttgagctattttcaacgcaaacattaccatgggtgagttggccgagtttttatgttttagtgtgaatgaatctggcagcttctatatcgacgacggggcttccatgcatttttcaaaagctgcccacatctggtttggttatcgaccgcttgctgacctcttttggggttctggtggtccgtttagaaaccagagcaacactttgaaggtttcattttctcttgagaaagtggggttcgtgtagtatctgagcaagacgataaatatggggaatggatctttccttttggcaccctgtggccgggagaaggagatgaaccatctttttcaataggcctcgatatcctgtactccccatataagcttcaggaaatctggtcctgattttttcattcctcaatttgttaaaataaatatactataatattaaagcaatattttttctaatagctcatatgtaatgatacttatttttaaccattgaatatcatggtaaagttgttttaagtgaataccttcttctataatcaatgattctaatgaatatataaaaacttattatttaattttataaactactcttaaatgttatgttttaattatctttagttaaatatgtacaaattctaatagaaacatgttttttttttttaatgtagaaaagataacaattttttttgtttactttattgaagagtcaaccaaaagtttttagtgagcaaaaaaaaaaaaaaaaaatcaattcaagttcgatcatttcattcaatttagtgaaaagtactttaatttctccggattcgaattaaaagttcaaatagagttgattgtaagatcagtaagcacatgagatcgaattgttgaatagtttcacattgtaattaaatatttggtattgctagtcttccaatgttaacacttctataaaattagattttgattataaaggtcatatttaatagtagagataaggatggtttcacaaaagttttctcatacctcatggttgatttaccggtagaagtacgtgtttcaagttaaaagctttatttataactttttattccttttttctttcataaatctatatctttttttggatgaatagtgtttttatggtagattttattttttaaaattcaattggagtgtcttctaagaactgtaaatagtaaaatatgagatttttcatttataaatccaaatgcgaaataaatggaggattgttatatataatatggaatgtgtttaatttattcaacattgataattaaattggtttcaacttttaggaaattttattatgagataaataaataatatttagaagtatttacattaatgctatgatatattttttagataataaattcatattagcattggttttaactacttttggtgggttataaacttgtacaaagttgtgcatgttgatggttgatgtatatggtgcaaattatgtgtttatatattttatgttaagagctcatgttgaatgaaaggagcaagagtaccctaagaaaactccaaatgatgattatagtattgactaaacccacgtaatagtgacattcactccaagcatagggtggttggttggttgcaagtaataatttaacccaataagtcatgtgtcaaattatagggactaacttcaaggattggagaatgtgtaatagaagtttgggtacaatgtgtataataatatgattcaagcttcaaaattctaatatagagatatgatatgtataatgtcaatgcacctttaaaattatatgtataataaattttgggaatctcacaaggactcttatgatttgctagtttttctggaacgtgtaaagaatgtcattgggcagctaaccttaatttgtaaaccagtttggttatttacattatactatgattttttgacttaaaaaactatacaaggcgaggaggttcatgctcacaaagaggccccatgtatgggacactagcattattctttttaaacataatattttttacatttccaattaattattaacatatcgagagcctacatgtactttttaaagataatatggttttgattccattacttaagcaagcgtacttatgtaggtaaaatttgacttaaattcatggaatatttataacttcgtattttgactcattaatatcttcctttttttcttctttccttttcttttgaagccttaagcatatacttaagacattctaaaagaagaactcacaagagaacaagatcccattgtctataagtgcatatctttatgtcccattgctaaatcatcataaggaaccactaatgttgctagaacaattactacgtgagattttattttattttttaaaaaacatttattattatttaaatggtatgcattgcacctacaactgagttaacccataattttttcaatttgatttattaagctttttcattgatatactcaatgctaaaacatgcaatttttctcaaaatcaataatatttattttcaagtcttatttgaaagtttatttcttttttgaacaattaatatgcaatcatccaatattaatatattgagtgaaacaagtttatttaaaagttggttttagcaattgattcatttctagaaatatcaaaaggttgccttcttacttttgttttgctcataccgaggaagaaacaaattcaaaaacaaactcattttaagaacttaaaacataatattatataaaagaaaatgcaaccttaggaataaaccaacatgaagccatgaggtataggctaagtttggtcttggcttggattggttaccacatgcatggatggtagctaaatagctatacaaatctaatattccaatagtaagatagtcctagtgtccaaattaaaagaggtgtttctccttgaaaatacatccatttattaaggcatttaagtcttcatttttttttaactatgaagataatgaaatttggatagtaagtcacaattgaaagttgggagaaacttccttagtagaaagtccgtcaaacatggacacttgcatgagaagccctttatattctttccttcttctagctaggttagctaacatctagaaataaatatttaaatttatatttccattagataatgcttccaatacttttctagcaaaagcttcactatccatctctatggtgctttagtttgaataaccatccaaacatttgtgaataaccaactttagagaagatgaaatgatccattctacggacacttaattgaaagtatttacatattaatttatttagttataaaaattaagaaacttactattaaattctttggagctaaacaacttaagaaaatgctatgatattcccatcattaattaaaatttagacaaatgtgcaaagaaaactaccatataaaatttttaacatgatgttaaaataaattctaggatatggtggaagccaaatttataaatcctacactagcaaacatttaatgaattatttactaaagtaacataaaatattaaattagataaaaatattaaaaatttgaataaagtaattgatttcacaggaagaaacaatcatgagttattcagccaaattatttttcattaatgaaaaacaaatcaagatttcatttttttactatagggatttaatttgttacaccatatttgttgaattaggttgaaaaaatatcataaaataaaaagaaaaaaggagtgagaaatattttcaatgttgataccttattgttcaccaatcttataatattttgaatgtataatttctaaaaactaacatgaaaatgaaagatttaaaaagtaatagtaattgggatgtttttgtgtaaaaatgctaccctaaatatataaataccttttttctcattcctctctctctctctctctcccctagtttcctttttctttttgacttttcaatcttgcttttatcttttttctttgtggtgtgagaaaagacaagaaaattttagtatttatttatttatttatttatttttgtttcaaagtagttttcatatggagtcatatatatccctcttttatttgaccttcatctaaaccaaaattggtaaaacaaacaccaaaatttttcttaattaaaatacatcaaaatacttggaacattaaattcaaccataatttttttcttgacagataaaccattgcatcttattcaacatcatcattatttgcattactcatcctcgaacttaagagtgacattattgagttattgtaccccaacaatttctttcataagaacttaaacttgttatccttattttttaatcgaattcttaaatctaattttgaccatctcatttaaaaatcaatccttgtatagcgtgggttagttaagccttttaaaaaaggagacaacttagcatataactaagagttaaaatctaatttgttatgcaagatggatagattagaatgagatggtcaagaatgaaacttcctatgaaattcgatgttaccattcttttgatgattacacatcacaatacgtagaagtagtattattgcactcaatggtatgtaggcatcacctgcttggatgtaagccatatatttacttttttaactctattatagcttttccttataaattgtaaattttaaataaatttctcttgcaattcattgttagaaaattgtccttataaatagtacatttagaattttaattaaatatgtcaaaataacataaaatattaaattttttatttttttagtaataaaattaattttatactggaaaattaaatttgaaaaatatttttattaaaacatctaatttcactatttaaaaaaaataaaataaatgttagcatgtttgagtgcattatgtttcaaggaaatggaattaaggaagaagttgaaaaagggatatattcaaattaaagcccaaaaaagggaaaatgggaggaaaaagtgagagagaaaaggagggacaagtgggaaatagggtagagccactttcaataacactttttggattgtgtaaacttccactttgtggaccaccttggatgataatttttagccgtgtggacctagtttcaacaacattctttcaatcttgtgaactccattttttggacccaccttagacaacttttttcagtcatgtggactccaatttcaagtttcaataacactttttcagtcatatggctcattgacacgcatcaactccacacttatctcataagtgtacttggtttttggaaatgtttttgctagtgatagttcaatttgaaccaaatcagtataatgtataatttaatatggttaatacaagcataattcaatcttatttttctaaatttaaattaagctcgagttaatcaatttagcattagaagactaggttaataagtgaattaaatttgagtagaataaaatcatgtatgatataataaataaataaatttctttaatgaattcaaagatagtataaaataaatatggatataaattataaatattataaaagtattaaatcaagtttatgttaggctagcttagatcattcaaatcttgacttaaattaaacttgaattaaattcggagagaaaaatttgaacttaagcctaattcatatactaaaaatgattggttgatcctactttaaaattggattgaattcaatttaggttatactaatccgtccaaattgtaaccttatcacatatcaatatggtgaaaataataaaagaaaaattatagtggtgcaaacaccttttttcttaccagaattaattatcaccatagcataatgtaatataattatttttatagaatttaaaatatttattttagattttcatttcagttaatatctaaaccctattttctaaaaactgtgataaaaacaaaaataatgttattccacaacttttgcaactcgccttttaacttcatatataattttatgtaacaattatatatcttcttcaaagtattgacacattaatatgaaaaattagaaaaaaaataatttatttacaataaatactttggggctaagcaactaagtaaggcaatctaacatcctattggtgaattttcattgagattaaatgctaagaaaaggaaatggattgttggtaggtggacctagcttagactatgcttgttatataagagttatattatacatagaaatttttttatactatatatgcttgtacaattgaattgaaaagaatccatttttcacttacataacataacctcaaaaaaaaaaaaaaaaaaaaaaaaaaaaaaaaaaaaaaaaaaaaaaaaaaaaagaaaaaaggcaacaacaacaactaaaggaaaatggagaaaaaagtgaaagaaaatggaaaatgccagtgggaaatgaaggttcccaagtggactcagtttggacaactcttttcgatcgtgtgatccccttagcctttttaatcatgtggaccctattttaaatatcaatttttaacaatgtgaaccctactttcaacttttcctttcatatgtgcagacaccacgttcaaccttcatttccatctatgtggaccccacattctaatagaaaaaaaatgatattattccacaattttaatttgaaacttgccttaaatttagtgataaattcatgtaaaaaatctaacatcctaatagtaagttaggtggtcctagtgttcaaattaaatgaggtgcttcttcttatgggaaatacatccatttattgagatagtgaccctcttctcttttcctttttaaaattgtgaaggtaatgaaacttgggtgatgagtcacaattgaaagatgggagaaacatccctagtacaaagtgggtcaaacatggaacttgtatatgaagcctctatcctctttcattcctacttccagcttagctagtctttataaataaatttttaaatttatattttcatgatatagtcaagcttccatgaccatttctatggagcttttgtttgaagaagaatccaaacattcgtgaatgaccaacttaggagatgatttaacgactcattcgatcaatgaaccaaacttacctttttatttacaaatttatgtaaaacatctctcctcctagaattgacagtaatttgataagttacaacaacaaaaaaaagaagaaaaagaacttactattaaatgctttggagctaagcaacatgtattggattcctttttctttttgacttttttgccattcctaagtttctgacgtgtctccctgtggtttcctttttctttttgggtttgcaaccttgctcttgtcttcttttgtttatttttgccttgatttagtttggacttcagccacacctaccatcttgaagttacgattccctggattgatcattcaagttacccgtcttcaaaccattcttcttccaaattgcaaatggcttcttcttcaaccagtctctccgtagcttcttcctcttccacccatccatggaagt

SEQ ID NO: 13144 - DNA, 5133 bp, Vitis vinifera
  Intron number 3 from transcript GSVIVT01024686001 (locus G SVIVG01024686001) derived from phytozome v7.0 (chr-ID chr6 ; pos 7759741 to 7764873)
ccaatttgattggaccttgtcttgtatatctgtatataaagaagtataagctttggatcttaaaaacgatttgaataattcagaagaaaagctacgagattctgtgttccaaaatctgttttggaagcatgcactcatggttcagattttgtaccacaaaagtttattgtactggaaccttttttacgtgcgaatcctgtatagttttggatgctataagagagtaaatgatgctgatgaaccagtctaggagattgagtgcctgtgggaattagaaatacattttggttaatcttcctctcagactcgaatatgtgtaaataaggtgatcctgtaaacacagtcaagattcgagaaccttcgacatgatgtaacttgaaagactgcatatacgtactacaggtgtgttcttatggcattcttgttcctttcttgcttgagtgtcatacttatacaaagaacaaaattagaagataatttatgtatgttggacctctattatatattttatgttcatctgttatgatcattcgtaattctgatggcgcatgcttctctttctgtttatatcagctttaacttataggagaaaagtcactctttcgagtaccttgatatattgtctcgcctacaaacatctgacatgagaaatggaggattcttgaacaaggaacctagtataaaaccttgcataaaccctagcattaaaagataagaacagctatggcatgcccaaaaaagtctagatttatgtggctgctgactacaagtaagaatgatcttaaggctttcactacacaaaatattaccagttagcctaacaaaaaggccagaatctatgtacacaggattataatagggtccagctgcattaccgattcagtacatactggaaaatgggaccaatcaaatcgtgacatatatacattttagggtccatttctttacacctaagtctggtctctttgctttgtactttggagggcacttggtaaattttactacttaatgattaatgatttaaagtaattttaagttaaactatgcttaagttattaagtaatattaattcattaaattgatttattaaaattatttttaattttaaattataatattaagttactttgtcaaacatatttcatattgggtttattacaccttacccccaacttatagcgtgttttacatattgtcccttcaagttcaaaattaagcaatgtatcatctatcttttataattgcatgcaatatgcattttttgaaagactgagttatttttttggatggaaaggcataggttcttcatgtgattgagggcaaaatggtcaattttttttttctgaaaccctaaccggtccttcttccttcttcttcttctgcttctctcttcactctctctctcctacctctttccattgtggtcgatgctagataagcacttaggcatctttttttcttttgtcaaaagatacctatcaacgaaaagttttagttttgttaagatttttctcaaaaaatttgtagaattgctagaatgtcttgattcttgatttgggtttttttcaaaaagcttgattttttggatctttggttgtgaatcggaggtatttcaattccttatagccataaacctgattttgttgaattgtgggagctctcgattagaataaaataaaatttgggtttaaaatatgggttttttgttgttttcatcacatccttcctcaaagcccatctctgaatacttaccataattgaggtttcaagattgaaatttcaagagatgtagtcctcccaattggctttttcatcaaagagaggattgaggattggagaggagagagaaacaatgaagagagaagaagatgaacaaaggaagaggagggttagttagggttttttaaaaaaaattgaccattttgcccttagtaacgtgaagagcacatgcattttcatttaaaaaaaataatattgtctctcaaaaatgtacattatatacaattataaagaatgtagggtatatttttcaattttgaacttgaggaggtaatgtgcaaaacatgttataagttagaggaataaagtgtaataaactctttaatattcttaatcacttaaattaagtcatcaaatcctattaaatcattagattgatttatcaaacaccctcctaatctctttcttttatattttggtttcatttatttgtaccttggtttcatatatttatatcttcgttcaagcatctagatttcaaacatacactttcaattacccatattacattttcaacaagtaccttcagaatcttagaattttccttatacaactataccagcggcacattggaaatcaaaactacacaacatcccaagctaactaatccccctactttgctgagcaaactcacaatccttgcttgaaacataaaatagtgatgattttgcccatggctattctggtagatgcctgcacaatttatttcctgtcacataggtaacctaattggttagaaggttttttcagaatcaactcccttcacatgtaatgtgtgatgccctatgatgtcaactgtaacacttcataacagcgactgggcgacaatccaagtaggttgttttagttatcagcgtttacggggccaccaagtctgtaaagacgtgcactgcattaatgtcttgccttcaaaaccacataaatttacaagctttttaatgtgatttatctgctgtaccatggaattggtcataaaagtagtgcggaaggtagggcagacgctgccaatgtctatttgggttttatttgggtctggtaactacagctttcatgctccttgtctgtctccagtgtgtcctctccaaggatttgacattattttttttgcagttaaggccttgagattgtcatttaaaagtaaaacccggtgaagatattagagagagaagctggctggccacttagtttcatgagagcacaccttggattttgctcctagaggtccgtgtgttcatgaatttaagtagtactttcttggctgtttataccatgctttaattacatcaaaataaaaaaataaaaaataaataaaaagaaggaaagaaagagggatgaattaggcattctttttctggacccatgggcaccaaaaggctgcatctccatttttcctggcccgccctcatgcccccaaatcttgcaaggttggcaaaataggccatgtgtatggctaaaccattccatttcttactcctaccactttgccattttgcaatattggccttttaaaggttaaaaccaacgtttaaaaatttacacaaatttaccattttcttagggtgtgtttgcaatatagcatgggaaaagaggaatcaaattctttgtaataatgggttttatcttttaagacaatgagatgagtattttaagtatattaatattaacaaataaaaaactgaatgattttttacttcccattttctattactatgtaccaaacacccccttcaaaagcttcgaaaattagttacttttccttggagtatctaaccatctacttccctccctagtgagtctgaaacgcttgtcttttaacacacccagagatgatgattcgaccctacaaggaaccaaacactgattggtgtctcttcccatgtgcaccatctcctctcgatgcgcatgtcctactctgactcgccagcaacagactgctccacagcgcctcacatggagtccccaagccacgtgacacctccccccaatcctcttccctccctccaagcccctcccctatatattctcttgtcttcttttcaggatttgcttccacggttccacctcacccaccactgaaaaatgccctcaaatctttcggatatgtttgctgactctctctctctctctctctctctctcccagaataattagtttattagtaacccaataatgcctagagcccttgtcctggaggacatggtaccttaatttatttatttttaataaacattatgggaaggtgtgccctagatctaatggtcaccaaaccataaataattggggccatgagcctctctccctcaatgagtttagtgaataattggcgtaatgtattgtttggtgcatgcatactcacgtgttgggcacttgtcctacgaataaaaacgattaggatgtttggcttctacgattagcttgaatccccattttttttattttggggcggtgcgccaattaggtcttgattttgacatttcaactatgaatcaatcgcaaaattttgttaggaaatatcgacaaaccacaatgagtatatcgtgtgcaatgtgtttactcaaaaattttagtgttatcttttcatgctctatccgtaaatatatgtttgaaaattcctcaactggaattaacaccggaaggtgaaaggttgctctccaatcatatttcctccccgctttcataagttctttatctgatcttccatggtgtatgaggtttgtggatacagatcagaagcaacatcaatagtatttttcataaatgattgaagacaacaagactactgttctaccaatcatataccataaacggttggcaatgtaattctccagattttggtgtcaactcatcatgaattattggtcagggtttgctttacactgtagaaaaggcctcatggattgcagaatacgcttttgaattatgagacccatgagctaactaattccatagtttgtaagctactcaaccattttcctttttcttaacaaaccctcatttggctttgacctatgcttattacctaattaataagcctaattcatcccatatttgtatctattgagaaatttgatgacatcctgacaaattgttctcatatataacgacgaggatattcaagagtagtatcaagaatttcttctaatgattgatgtgagatatcacgaaaatccagatacaatatttttgttatgttgtatagaattatggaattataggaatattcaaaaactttcgagaacactttttaaataaacacaaatttactatttaaatcattgcacggttttaaatttttatgtataaattatatttatattaaaaataaataataaaggataatatgtgtgcaagacc

SEQ ID NO: 13145 - DNA, 2704 bp, Vitis vinifera
  Intron number 9 from transcript GSVIVT01014219001 (locus G SVIVG01014219001) derived from phytozome v7.0 (chr-ID chr1 9; pos 1597397 to 1600100 reverse strand)
tgttatacaaccgggggtaagtacttttctcttggaaaatttttcccattttgttcttctttatttttttgataggtaaatggttctagtattaataaaaagcgccaaaaggggggcaccatggtacacacggtgtatacattgactgccaaagagtgccaaaaggtatagggaaaacaaaaatactctctccctcaatctaaccttaaccaagcaatagaattgagtaaagatatagttgaattttctataaataaattagaccaagataataagctgcacaaaaacaagaatgttagcctttgaacagagagctccacattttcgaaatattttctatttctctctttccataatgtctagaaaaggcataaaggtgctactttccaaacttttttccgctttctaccaacaaaggagccatgccaccctaaaagggtctctctaattgtagtgtggatcacccaatgcaaccgtaatagagagaacaacatctcctacaacacccttgccttctcgcaatgcaagaggatatgatcaatcgactcctcatgtgcataacaaagggagcatctattggctaaaacccatcccctcctttgtagttggtctaaagtcaaaactttcccccatgatgcctcccaagcaaagaagcttaacttaggaggaacccacgcattccacactccattagaagggaaaggctctacctttcccacctcaagaatagaatagagggacttaatagagaaggatccactctttgttgctgcccacaacaacttgtcctcctcttccacaaccactgccttatcttgaagccttgacaaaaaacactccacagtctcaacctcccagccattgagggatctggagaaaattggaaaccaagtgcccccttcattagagtgcatccacaagtccgccacccaagcctctttagagttagataaggcaaataaggaggggaatgaacatagagcatgttattttttcttctttcatattataaaatataaccaatttgggttaagtactttgatttgatgccttttggattgcttttcttttttcctttgttttgattaggttgtataatcagggaaggatttctcatccttgtcttgtttactcttttggatatctctattgttttgattttgcacaactttattttgttgttttgatattctctgctaaaatttctattgctgttatgtttcagttgttgtgaatgtttcattttggattcatgcaggttacttcggtttaatcttattttatttttaatacaactggttgatgtttgatctgcccccttactagaatgttccttaatatttgccttaatggaggtgaggcatgcccctgatttcaatctgtttaagtcctgcttacataatataaattttccaattttgaattcatagaatttttcatgtctgttctagacttttggcataacatttgtgggttgtttatttactcatttatacaatgagagccatgttaaacagtggaggcttggtaactttgaactggttgttctgtgaaaggattcctttctaagcccatccgaggaaggagctgtggaggtgctttttcaatcatgtttagataagtatttattatcctagagagaagttaattggaagccacaccatttttccaataagaggttttaggagatatattttggtttagggagataaagccatatggacgtattatttatttgtgatagataaaatgagatatgagaggtgttttggactgtcatgaagggatttcttcatcaaatcagataacatagatacattctttttgtttcttcttggtagattgctttccctcttgatgagcaaacattatactgcagtttgcacatcaatgtttggtctgcagtagaattcagatatcacatgcagagtagatatggaaaaagcatatagtaatatgaaatggaattttgatgataaaggttaactggaatttccttgtgtatgtgccaagaggattggtttgaacttttgattgattttgttgattggctggggtcttctttagagtgagggtgcttttttgtatctactctcttgaggtctttcttttaggtgcctcatgtatatgtcctgtgtacttctgtgtgttttttctgttattatatatatatttttgtatgtaaataaggagaatatattaaaagcgcttgcagaaactttttctgttattatattaaatgtaccttttttgctaaccacaaaaaaaaaaaaaaaaaaaaaaacaaaaaaacaaaaaaacgagtgttagtgcaattgatgatctctcactcttcatacaaaatggaacttttaaatgttggaaacctagtaatgcaattggcttgttagtaatctgtggtaccattctattatagtgtgtaccaaatcttaagttattaggagaaggcattatacacttttacaggctcatatgtttattggtcaacatggatataaggtgtcattgacacagcaacctccaagaatttgagtggagtggcattgggttaggatttgaagttattattattgcctcttgctgtacaaaatatattacattaatctgttatgagtaatgaaaatgcttttcagttgaatcgctttatttgttttctttggtttctacttgatcctcaggtcagattttgcacgtctgaacttta

SEQ ID NO: 13146 - DNA, 6658 bp, Vitis vinifera
  Intron number 3 from transcript GSVIVT01000482001 (locus G SVIVG01000482001) derived from phytozome v7.0 (chr-ID chr1 9; pos 14645469 to 14652126)
gagagaaaccaggctacattgcctgcacaattgctgtgagtaaactttattgctcatttgattttaactttatggaagatgtttagtgcttacttttccacctgtgtcttctcgttcacctttaagttttgtaatggtcatgaacttttattgcttccttgtgttttttttattccaaatattgttgtcaaaaaacctgggcaattagtggcatgttaattgcctagaaattgcctcatacatggtgcacatcacatgtaagtgtcacactgcaaactagattctacgccttctttccccccttttctttccttgttcctcctaggacttgaacctatgaccccttacatccccactccaaccccttgccacttgaaccaggcttctaggactactacaaaatacattgtatgcattgcactatatgtgctaaaacagtttgtagttatacattgaaagtactaaagataactgtataataaaaaactagtttaattagatgttcacttactaagaatttattggatcaaggcaaagagcgttagttgaagatcaacagttaattgctgaaaatgctgttgattatgcatatgtaattgatacaatgtagatttggctaaatgagggtgttagaagcacaaagttctcctatgaaatggttaatgctcacagaaggaggaattttatgtcaagaattaaaattaatggggattggctatccgaagaggacaagataaggaaggggtggctatggaaatttgtaatctattatctaatataggggagtggagacctagcattaatggtttttcttttgaagcattagaggatcaggaagttgacaaattggaggaacgattttcagaggaagggctgtttagtgcattgtcggaattgaacaaggataaggctccaaggctggatgatttatcatggccttttggcaattcagttgggattttgtgaaggatgagatgatgggattcttcaaaaggtttcatgaaggagggagatttgagaaaagtctcaactctatgctttttgtattaaccccaaagaaagggggtccaaaggatttgaaaaactttaggtctatcagcttggtgggtgactgatatgagattctagctatagttttggcaaagagaatgaagaaggtgttgggaaaagtgaccttcaaatctcaaaaagcttttgtaaagggaagacaaatccttgatacatttcttatagccaatgaggccataaactttatgttgaagagcaatacttgtggtattatgtgtaagctagacactaaaaaggcatatgactatgtcaattggagtttcttgctttcaattcttgaaaagatcaattttggttagaaatggattggatagattaaatgggatatatcttctatgagaattttttatgattattaatgtcactctttgttttttttcaaagttctaggggattgaggtaaggggaccctctgtctccctatttatttgtagctatggacactaatagaagctttcctccaactactccttcagtccttgtcctctattatcagattccccatctcctattgtttgattttgtaatattagacctgtgtatgattctagtaatgtttgtaagtgttaaacagtgttatcaaatgtggtttggttctaagctgggttcaaaatctcggctgagtcatatccgccttggccatgactagtaccggaccgatacccgagtccaatatttgtttgactcgtgaataaacttgttgaatcacatagaaactttgagataaccccaagattatgtccaaactaagctctttgggtgataggtgatggaaaaaatggtaatattggaacggaaatggtggatgagagaagaagatcgaaacccatgaaagcgaaaaagtatggagagatcagagtcttcataccctttacgtcttcatccttgtatttgcattttcatccttttgcatctttgtcattttgtatcttcgtagggctattttttgagccttcaaaaatgggtattgtgtagagaagcagagagctcaaagctgtcgttttaaaggggaaatgggtactgtgcaaaaaagggaaatgtgtatttgctaggtgaatgggttatgggtatcttataggattacaaagttgggtgggtatttgttttttatgtagttaatgaatatgtggtgaatatttgtatttaaatggataatgcaaatttgatgggaattaggattatagtaaactaataatgaatatttacgtttacataaataaaatagaaaatgaatatgaatataaaaattcaaattaatgaatagatgcataggaaaaatattttatattcaaatatgctcgttcaaatcaaaattctccattttataattgttttatttataatatatttgataagaaaaatgatgtttatttttttgaaagatgattcctagatgtatttttttaatgattgaaaatatttaaaaaaaatcaatatattaatttaaaaaaaattataaacaataaattcactttttattattttcatcttcaataatacatatttaatattaagtgattaaattaatttttttagattttaatatttatataaatcattctaaaggtatgcttttatcacaattcgaataattttatatataataaaagtttatttgattaatttttaattctatttatttgtatttatctttatataattttcgtaatctttttaaattgttttgagcttttaaactataattttttgcgtatcacccaataccgatctgagacattgagaccaatgtgccttaggacttgtcaagttgatgaccaaaaccgcgactttgaaccatggttctaagtttgttccaaataaaaagttttgattctaaaaaaatggaaaagtattatgtcatactgctagagaatttaagattgaaagtagctctcttttttctcttaaaaaaagtttttttaatttttttttaatgattaataactaagaaagatcaaatgctgcaggggcccaacccaattatattgggaatatgagatcaaaaccaaagaaacataaaggaaagactggaacctagagcaggcgacattagcttccagaacaaaaaatgcaccagagtgcctgttgagcagtgagtacacccattgggatctaagaataaacctttttatcttcaatactttaatcccttgaaagattcttctatttcgtctctccaaacccaccaagccccacaaaggaagtagcctactaaacccaccaactcaacagaaaatccttcaactgggggagaaccaaatatacaccaaaaataataaaaatcaaagacctattcccaagcccatggacaatgcacaaaaggatgatcgacaaactcttgattcatttttcatataatgcaacaggtagcaagggatattcctctccatttgaaatgaaacaatccctaataatttcacacattactactcaggcaaaaaagggacaattacattgaaggggtaggtgagtgtaataatggctctaaagggcatatattttgcacaattgttgtcaagtccataaaaatttttggacaaaaatgtcctttatcattcacacatctctatttgcatgtttttcttgattctcatagtttgttttcaatatcaaactattgaaaatattatttacacatgcataattgtcaaatatatatatatatatatgtatttgcatatgtagaaggcatcactactaggtatacaaggcatgcacaagtctgcctattgtgaatatatttacgtgttttttttttcattttctttgtttgttttttatactagcggaaacattatttacacatgtgcatgaatgtcaaatacaatttttttattttatattttcacacatgtataagacacttgtactaaatatataagatatttgtactagttgtacaagatttgtacaaacctgcctattgtgaatatattttcatgtttttatggatgttaataaaaatgtgaaaattttctcattcaagttagaatttcctcatttcaacaaaagcaaagacctaactagttgaatcttccaaactgagcagttgtttgaatttcaacacacccctgtggaggggtaggttcctctggtaacttatcatttagaaggtgatccccaattatggtaccagtttttgaagaatttgttacatggaaagttcttgaggaggcttgcacacccaaaatggacccattggatatgaagacaacttggtaacctcttgaaacttaaacaagcaatgtctattcatgatcatcaaggccagttagtaggttactcaacaaagcaaggaagttgtgaccctcacaacaggttggttgttttattagtggccttaaagagattatttgggttgatgtccaagcctcccggccaaacaatctcacagctacagttgggttaactcaactctatgatgcaaaatgtcatactcaaaatcaaaaagcaacaaacgtggaggcaactcatttacctgataagcatcatgttccatatagcagtcaaaatctgtttcccggtaaaaggttgactttggatcaattaatggaaagaagagataaaggaatttccttccattgtaatgagaaattcatccctagcaacaggtgtaaagggttatttttctcattgaaggttgtttgttaaatgaagaagaaaatgaagatgaacatgatagactgagaatgtggtagaagtagttttaggttgagatttctctgaaatagctctcaaagataagggcaattttttgaggggggagagaaatgtaatgactttgtaggagggcttgatattactttttatttaattgtttttttttttttttgttagttagattagttgtctagttgatgtcttttagaaaagatagaagtgaattagttgtgatttttactttttcttcatggattagtgtgataattcactattttttaggaggtattatctatttgttagtaaaatttttttataaatatatcttcctaaatggaataaacatgaaaaaaaagtttattcctagttcttttatgaaggtaaccattatctttcttttctgtaattcttttttattaaattaacaaacaatgtggtattttttttcaagctgcatgcaacaggcaattacagttctctttaagggtataatcaaagtatatttgctttaataaaaacaaattacctgactaattataacattcacatcaaaagggagttgtgttcttattggacatgttggaaaaagactcaatttggtcttgtgttcaaattgtaaaaaaaaattggctggcacaaagcgatttgtggtaaattataacacattttttgattgaccaagtatttcatattatttatagtaagtgtgtaagttttgtaaaatcaattctgaaaagtcaggttccattgtgagctgtggttctcctccagaggtgtaaactagaaaaattcagatgcacctatatagttctagttacattttagttgttgttattgtatcatgtccatttttttttttctttcaaaatttactgcatatacatgtatattttgtgtcaaatccttctctttattctcaatgcaacagagaatcttggggcctcagtgaatcatatgttttcatggtgaacatggctgtagcatagtttggttgaaaggtatctgatattgtggaaagcattggtgtcaaacccatacatttgttgtcatgacttgtgtgtctacatgtgtcccacctttcaaaaggtgaataatttgcaaagtaggttttcaaaaggcatagtacactcattatggacaaataaggttctcagcttcatgtgtacaaaactatttcaaacacgtaggggtgtgcattgcatttcacatcaactagaagtgtcatgcataggcccataaagttggttttacgcatggttgcacatattgtttacttgtgttaaatttcatgattgttttaagaaatgatggctagaggactaggaatattcataaagtggagcattggtactcttaatttgaggtactagaaagctgatgctacctttagcttcatggactgcaatgggtttgacaggtcaatcttttggtggttctagtttaacaacgatgctgttataagaccagtgttttgactaaactatgtaatcttgcagtaccagaggatctattgcaaggattatctgttgcttattcatgtttcaagaattatttgtcttattcatcttgtgagatatagcagatgctgtggtaatactaacatgtgtcaccaactttgggctttccgatacctgtcttatatggaaacaaattcttccagcatctcttgctattatttgttttacccaaaactaagttgattgcctatacaagtggaatgagatgatactttgaaccatgccgcttcttgactcattcgttttctcctattcagtatattgatggaattgattcttaattgtcatattacctatcagaaaaataacaatagaaatcagaactcttaaaagtctattggcccattgctaaagtcttgaatctaatgtattgtgcaggctattctcgccacaattgctattatttttggagt

SEQ ID NO: 13147 - DNA, 14223 bp, Vitis vinifera
  Intron number 15 from transcript GSVIVT01037528001 (locus GSVIVG01037528001) derived from phytozome v7.0 (chr-ID chr 6; pos 12167325 to 12181547)
cctttcaactttttcaaggtaccatttcaacataggtttgcatcttgtttgaaagaatgttactggtcataatttttatttatttttttatgtgaattttcttcactgctcattcttgttggtgctatttaaactgttcattaatatagtttagttctcttcagagcctttcaagtagaaattgtaatgcttttttagactgaccatgtcttcatttagacatttattagagcaaagtctgcatttcttgtttgataagttcattatcatcagtccctatatctgatttctttggtgccacttggagaggactgtttggtaagtaagatcccacttgacgctatttgtcaagtaaatattgctatatcaagaatgatagagagcagaaactctatttttcttatttttcaccattagcaatattagtacataaataagaaagatggcaacaacctgccatagataattccttaattctaggactataaagccatccctataactaaaggataaacatgtaaaactgaaataaaaaaatgagatttggaattgatccttatctctttatttaaaaggagacaaacagatcaactaatccctattaattgatttatatctctttatttaaaaggagataaacaagtcaactaatccctatttaatagggattttattctttgaattcctacactccccctcaagctggggaatggatgtctatcattcccagcttggaaatcaattcctcgaacttcacccttggaagagcttttgtgaaaatattagctacttgcaaactagtcagagtatggatcaaatggagtatcccttcttcaatcatttctttgatgaagtgacgatctatttcaacatgtttggttctgtcatgatgaattggattttttgcaatgctgattgctgctaaattgtcacaaaaaaacactcattactccatcagcttcaattctcaattcttcaagtaatcttttcaggcatattccttcacaaataccttgagcaagagccctgaactctgccacaacactacttcttgctagcaccacttcttgctacaacagattgcttcttactccgccaagttacatgattccctcaaacataggtgcagtagccaataataaaccttctgttttgaatgaatcctgccaatcaacatcaaagtagacttcaattcctttgttgattccctttctaaagtagagaccttttcctggtgttatctttaaataccataaaattcgatagacaacttcaaggtgctcttcattaggattgttcatatattgacttacgacacttactgaaaaacaaatatcaggtcgtgtttgggaaagataaatgattttccctataagtcattggtaccttcctttgtcaattgggggctttttgtcattagtccttctttgtagtttgattctatggaagtatttgaaggcttacatctagcatccctatttcctttagtaaatccgaacatatttccactgagaaaccacaatacctttctttgagcgatccacttccatgcctaggaaatatttgagaggtcttaggtcttttatttcaaactcattggccaatacttccttcaacttgtccatttcatttatatgattctttgtcaagataatatcatcaacatagacgataagaatagtaatcttcccattcaaggaatgtttgatgaatagagtatgatctgtttgtccttgtatgtacccatgtttcttaaccgccttagtaaccctatcaaaccatgctctgggagattttttaagtccatataaggatttttgaagttttcaaaccttactaacattggctttattctcaaatagtagagggattttcatatagacttcattttctagatctccattgaggaaagcattcttgacatccaattgttgaagagtccaatctagattgactgctaaagacaacagtactctcatggtattaagtttggcaacatgggcaaatgtctcttggtagtctatgccataggcctgagtgaatcccttggccacaagtcttgccttataccgttctacccttccatctgacttgtacttaacagtgaagatccacttacatccaactggttgcttcccttttggcaagtctaataatttccaagtcccattctttttcaacaccctgatttcatcatctacagcctgcccccaatcagggttttctagagcttcacggatactccttggaatctctatatttgatagattagtaacaaatgcatgatattttgatgataatctatcataagaaataaaattagagattggatgttgggtacatgatcttacgccttttcttagagcaataggcatataaagatcattaggagtatcataaactttagtttcttgaattgagttacttggactttctgatcttggattggattcttggttttgctctagaatagtgtgatcctctaattcttctcgtggccttttcctccttgaataaacatgtaactcaatgttatttgcatgttgtgtagaagaagaggtaggaatagttggcttagattgagaggttgaagggacagcttgttcaggagcaattttaggaaggataggttgaggtatatcaggtataggttggttaactgaagcactaggttcaattttgggaacttcttgaaaccaaaaatcacattcatatatgttcccccttgaatgttatttttggtgaaaaatggttgattttcaaggaaggtgacatagaatttcttgatagcaggggaatagcacttctaccctttttgagtgggggaatatccaaagaaaagatatttgttggctttagggtcaagtttgctcatattgtgttgatggatgtggacaaaaaaatagagcagaattaaaaaaaaaaaaacagaaaaggctgaggaagggttataaggcagtgctggaacagaaaatctgattgtcaatgaaaaggctgtagcaattcaagccatagcaagaaatgctctgtttttggattaaaaaacagagtagaattttttttgttcaaaaaacaaatttctgcaggttcttaaacagccagcgatgaaggcttgagaaaaaattgaaaccctaagaagccaaatttgtctctgataccatcaagaatgatagagaggaaaaacccatttttcttatttttcaccatgagcaataatagtacacaaataggaaagatggaaacaacctgccatagataattccttaattctaggaccataaagctatctctaaaactaagggataaacacataaaaatgaaatacaaaaatgagatttggaattgatccttatctttttatttaaaaggagataaacaagttaactaatccctatttaatggggattttattctctgaattcctacactatattttttttttttgataagcaagcgcaattcattaaaagaaggctaaagagccccaaagtatacagggcgtatacaaggcagcaaaggccttacaagcaaaaaggccaaaaaacaaaccaccccttaactggaggcaagccactccaggaaacctaaaagggaatgtggctcctcttccatatacaatttagcccaaccccaaatattacatacaaaagaatacttaaacctcttaattgctaaatcccccccccaaatgctaatctattcctttccttccaaatcatccaaaaaaggaataacggaatggaattccaaaactttttcctttttttccccacaaaagcacccccctagctatataaaacctcctttatagtattagggaacacccacttgaccccaactaaacccaacactaagtcccatagcactctggccactgtacaatgaataagaatgtgattcacactttccgcttcgcaagcacacaaaaaacaccgattagggagctgccatcttctcttttggagtctatcaagagtcaaaatctttccccaagtcgcttcccacgcaaaaaacatgattttagttgggactctttccatccaaattttgtttttcgggaagatgacatccataggcctatccaaccagctatacgcatccttcactctaaattgcccacttccccctcccttccaagaaaccgagtcttcctcccaagtaatcctgaaacctctcaatgcttggagcagctcacctaccatctccacctcctagtcattaaaatccctaataaatctcaagttccagcctccttctccaacattctggtcccacatgtcttcaattaacgcgtttctatgggctgccaagatgtaaagatgcgggaacctttgggatagtgctgaatccccacaccacatgtcagtccagaacctgattttattgcctttccccacattgaacaccattttatcccagcaccagccagcttcctttaaaatctccttccacacccccaccccacacgcacccacagcctttttggtcctccagccgtgatcctcttgaccatactttgccaccagcacttgcttccaaagggcctccttatcagaagcgaatctccaagtccatttaccaagtaacgctttattcataagggtaaacttcctatttccaagccccccattctcgttatccccacacaccacttcccatttaacaagatgagctttcctctccatgtgaccccctccccacaagaagtctctttgcaatttttctaatcttcttgccacagaaatgggcattcggaataaagatatctgatacactagcatgctaaccattgtgctcttgattagtgtgattctcccgccctttgaaatatattgactcttccaaagggcaagcctccttctcattttctcttctaccccatcccacccatagacaaccttattaggcacccccagaggcaaccccaaatacacagtcggcagctgccccaccctacaccctaactctacagccagctcctctatcccttacacctcccctactggaatgatctcacttttagccaaattaattcttaaccctgaagcggcttcaaaccagaacaaaatccaactcaagttcgttaagtactcctttttagcctcacaaaagacaatagtgtcatcggcaaagagcagatgagcaacgtgggcagcccgccctctaccacgttgaattttacaccctgagataaagcccctcttcatagcctttctgataaggacgctcaacacttccatccccatgacaaaaaggtaaggggacagggggtccccttgccgcaacccttttgagcttgaaaagaaaccaactggtgttccattcaccataactgagaacttggttgtggaaatacaccaccacatccacctcagccacttagagctaaaccccattttttccatgaccttcaaaaggaattgccaattaatactatcataggccttctctatatctaacttgcagataaccccattatccctcctcttattccaggcgttgatcactttatttgctattagagaggcgtcaagaatctgccttcccatgacaaatgcgttctgataaggggagactacttttccaatcactttcttaagcctgttggccaggacctttgccaacagcttatagagaccctccaaaaggctgatgggtctaaagtcccctagatcctcaacccctcctttcttaggaatcagtaccagaaaagtattgttaatactcttgaggaacatattttggtcatgaaactccttaaacatctccaaaatttcctccttgacaaagtcccagcaacgttgccagaagaataaagagaacccattaggacctggggctttatccccattcatttccatcagggccgtttggacctcatcctcagtgaagggaagctccaacgtctccgcttcttgcaagcaaatttgattaaaaggaaggcttccaatgtccgccttccactccgaactttctgagaattgctgctgaaaagcattcgctaccccttctttaatttcacgctcctctgtcagcctaagcccattaattttagttctgtccatgtggttgactcttctatgggcagaagccatacggtggaaatatcccgtgttcctatcccctgcctttaaccatagttcccttgacacctgtctccggtgagtttcttccagatctacccacttggcataaccctccttggcttccttcttacaagctaattcctccattgtcaagcttctctcatcctccactctgtcccaatactccacttgatggagcgcaacctccttgttacattccagatttccaaactcctccctattccaagctttaagcttctgcttcaactccttcaatttcgcagacaatctaaaactggcgctgccactgacctctatcccccgccaccaattacggattaaatccttgaacctctcaactttgaaccacatgttttcgaatctgaaaggggcataccctctcctcaagctaccaccctcaagtaatactggaaagtgttccgaagtcggcctaggaagccttcgctgactcaccctactaaactgatcaagccagcagggagaaaccagaaatctatctagtctagcccttgaaagactattcaggcccccactccacgtgaaggcacccccttgcagctataagtccataagacctagctcgtctacaacttccgcaaacctcctcatagttgaggttattctcccttgcctacttctttcacattgagccagggtgatgttgaaatcacctcctagacaccaaggcccctcccaaattcctctgattgcccctacttcttcccacaaacactccctctcaattctagtgaacgggccatatacacccgtaaaagcccaaatcaccccattctccactatcctgaatctgtaggacaaagagaaatgaccctcctcccactccaacaaatccagagctcttttatcccaacaaatcaggataccaccagccgagccacacgaatttagggccttccaatctaaaaatctacccgaccctaaacttctcaccaccctgtcagtcataacctgaatttttgtctcctgaatgcaaaagagatcaaccttctgcttcctaattaccgatttaattactttccttttcgtgctttcgttcacccccctcacattccagcttaacaacttgagattcattaaacaatcatagtctacacccctctgccctggataggacatttctttctgccatccccctcataattaactgagcattccaacctctttaactccctttcaaacctcgatttttccaataatcctttgctatgaattttctccctcctttttctgattttgacccaaaaacttaaaatatccttttccagaccatcagttgaaaaacccaggaattggctgaaccttgctagactactttcttgccaatccaggtcaccttccctcctttcttcttgtagcttatactgtgatgatcccccctccagttcccttgccgttgctatggggcctttaaattcaaccaattcccagcatacattaccactctccctagtaccagctgaaccttgcccatttgactcattgccattctggcaagcctcccttatcaccccagaatggtcaaagaactccctctttggagtccgaccaagcgaaagcaaagaagaatgagaagaattccctgagtcccataaaccccctaaagatgagaaagcctcatacctcaaagcttcatcctctaaagcactgtttgccaacgcatagagaggattagccttctgatcactcttagtttccttctcccgcgctcttagaaactccagctcaaagttggcttcaccaaaaagcccaggttgagctaaagcctccatcgagcctattttaggctgatgcaccggcgggccttttctcttcttgactgaaggcccaccaggctgcgccccaaactcctgcaaacaactcgatgacggcccgctgcactttctttggtccaaaaatggcccaattcgcggcccaggctcctcctctaataccttctccttaccttttggatctttcgtcctgcccatcgacccaagcctaccaccttcagcctcttttgccattactacttcaaatgttgattgcggactaagccccccatccctccttaggcctaagttggattcattaagcccatccaaggacgacccatcttccgcctcacccactgaagcctggaacatcgacccgaattggatccggcccaccgacgagaccttacccatcccgtccaactgccgttccatcccatcgtctgaccgtagtagtacatcaagacctacgctgccccactcttccactcgccggccagcgcgtgagcctccgtcgcccctttcctctcctctaccacgatctgttgagcctcgacggtcctccggcttctgtctaatcgacaacaatacttcccaccatagcaggagatgatagatagtctcttcaattccaacttctatcgagcttggcagctcgcctctcttcgtcttcaccaggatcctcgcccatcggagattttccattttttccgttagagcgtccatggctacaaagtccccgcactcatctcccacccttcgcaaaatgttaggaacccaaagcgacagaggcaagcctttaatcctcacccaaacttccttttctatttccctttcttccagacacccataactcggactccacagctccagatcaacatgaatcccccccaccaaccttttcctgacagcgaatactttccttgcttctaccgccttttcaagctccaatagggcctgaccctcatccatccaggccaaccctagcttcccttttatcccccaaacactagccatcagccaccccatcctcgccaaatcctctcctcctgctaccttagggttccattttcccaccaagcattgtccccaatctatccacatttctgcaaatgtcctccccctttatctccatcctggtcgagatgctattcctattcccccatctctttcccatttcagctttcactcttttaggggtcggctcgtccttttttttctcccttctgtcaatcattgtatacaagttccgcaccgcttccgccataactgaccatccctctcttccccctctgcctctcgggatgcagatactgtactttttctcctccgcatctatgacccctaaccggataaagctccccgccttattaacttcacgcaccatggagtaccttctccccttttccttccagcccttctcccatttgtcgtctttcccatccttaacgcactggtccaacccttccagaaaaatcccaacgcttgccggccccagtctaacccatgaggacactcctcttttactttccacaatgaagagtagagttttacctcttctcttctccacctctacttcaaagattttcgattccaccccgaagctctgtcttttccgtttcaattccacctcgtcgtcatcgccctcaccctcgctctcacactctctcactctctctcttaacattgcactagcctctttgaattcctacactatataatcttcacatccatggattttacctttgtgaaaaaccgaccctttctaccctaaaacatatctttaaggggagcctttatttggagattaagtctcctattctgctggatctacaaaatcttgacttactcgtgaccttgtccttgcctcttcacccacctggtatctctaagacattggaagaaaaaagactaggtgatactatcactacatcgttgcaagtctattcaagaaggaagccgcttcaccttgggcactaacatgtctactcattggatttcatgataggtactaaactctttctctttcctaattcaccttgttcaccatacattgaccagcccatagaaaatcatgtggatgaacctgtctttaatgatctaaatttgccaattgccattagaaaaggcacctaaacatgcacccaacaccctattttcaattgtctcctttaagaaattgtcaccctcatacaaagccttccttagtcacctaagtcacttagaaatcctaaaagcagttcaagaggcacttagaaatgagaatttgagaaatgccatgagtgaggaaatgagagcacttgagaaaaatcaaacatgggaggttgtaaaacttcctttagggaaaagaccagttggattcaagtgggtcttcattgtgaaatataaatctgatgggactctagaaaggtacaaagctaaattagtagctaaagggtatagttagacttagcaccagtgtcaaagataaacactgtttctagtcttattatgtttggctactaaccttggttggtctttgctgcaatttgatgttaaaaatgtcttctcatgtggtgatttggaagaggaagtctacatgggggctccactaagatttggtgggaactttggtagtgattccgtgtgtattctaaagaaggcgtcagatgggcttaagcaatctctgaggcatggtttgggagatttgctaaagttatgtcgaggatgaagtatcgacgaagttagggagatcatactctctttactaagtgctcaacatttggaaaggtcacatctttaattgtttatgtggatgatataattgtgattgaggatgactaagaagagattgaatggcttaaaaaatatcttgttgtagaattggacatcaaagatctagggaggtcaaggtacttcttagaatttgaagttgctgattcgaacaagcacaccttcatttcacaacaaaaatatgtccttgatctaaccaatggtcccattgaacaaaatcatagacttatggatgataaggatgaagcagtagtgggttgaggtattaccgcagactagtgggaaaactaatttacttatcacacactaggcttgatattagcctatgctatgtgtatggttagttcatgcattcaccaaagaatagtcatctagaggtagtctataggattctcaaatatttgaaactcacttctggaaaaggtattctagttaagaggaatatgaagttgaatttggaagcatacactaatgcagactagacaaggtcaattgtagaccaaagatataccttaagttattgcacattccttggaggaaatttagttacttggaaaagcaaaaagcaatgtgttgtgtccaaattaagcacaaaggtagaattcattgtaatggcacaaggagtatgtgaacttctttggttaagaatcattcttgatgatctcaaaattaaatgggagggaacaataaagttatattgtgacaacaagtcaaatattagcattgcccataatctatttaagatgatcggacaaagcatgtagaaattgatagacacttcatcaaatggaagttggatagtaaccttatttgtactccctatttttcaacagaaagacagttggtagatattttgattaagggactttcaagtcaaatttggacaatggattagttgagagcctgagagaacacaagatcaattaaagttggtgaagagaatttttatccccttaattgcggtgcttgaacatttattcactcctatttgcttttatgtcataataatcatttagatattctttatgcacattgattcttttaaagaccgcacatcctttaatgttcccattctctttattcatttattaatcaccaaaaaaaaattggaaaaaggagaaaagaacatctagtcagggttaactcgactcaaaaacattgtgcccaaaagttggaaatgcaaattaattgtccatatccttatttggttcctttcgaactctttaaaatcaatttctctcctttcaacattatgtgggagaaaatccaagaagtagaccagctgatcaaaagggagttgtcttttttctagttgatttggtccttaaaagaggataagtaattggctaagcagattgtcattcattgtgggttagcaatgaatttctggattttttaattctctctatttgggttttttttagtgttccctcagtttttgagggagttgcttcaagggtttggttaaccagtttgggcttaaggcttattagataaatgtttattttcaaattttgggtttttaattttttatttatttatttatttatttttatttttatttttaattttgaaaaccatttcaagtgttagattttccaactttctaaatgttatcttaaatactgcttcatctgcccatatttctttcttatcacaacaaatcagcaaatctaactttttgagccccaaaatcatgagcctattaaaaacttttgataaattgtttgatatatgaaaaataaaaatacataactaccctaacatagtaacctaaatgacataccaatatagtgaaaaaaaatattttatggagggatcaagtttggtcaagttaaagaaaaactccccgctaaaactgaactgaactgaatcgcttaggtaaacattctaactgaactaaggggctctacccaaactaacttgcaccaacctgtgtaggtttgtttagattggtgaggatggtctgtgtgtgttttatttatttatttatttggtgcatttggaaagagtagaatataagaagttttgagagtgagggaatttggaagttataatgaagagcacctgttaagatctttgtttttttggtatattgtgcctcaggattttcatattagttccttgttagatttcattcacattttaggtaggaagtagtctttctgcgcttttccttttttttttgcttgggaggcttcttgggcaaaggtgttactttggatcatttaaataggagagggtgatctttggcaaataaatgtttcctttgtcttgaagaggaagagaccattgaccacattcttatccaccatgtcaagataagagtgttatggaatcctttgttctccctgtttggtgtgctttgggtacttccttgtttggttagagacacattcttatgatagcatggttctttgtggtaaaaggtgtggcaaacagctcttgtatgcttattttggaccatttggaaggaaagaaacagaacttttgagaatgtgtgacagtccattcaaggactaaaatatgctttcctttgtaatctatgggattggtctaggttgtttttaatttctggtccttcttcggctgtagatttggtggattgggtgggttcattttgaggggagtgtagttttctgttggtccctctccgtttgcttgcgcttttaagtgtttgttgtatactttgtacttaagagcgatgttttggtgctttttgtttataatacacttttgctttactcattaaaaaaaaagaaaaaaaagaaatgtgacctgtgtagttgggttgtgtgctcctcttttaggcactttaataaaactattttattttcttgccaaaataaattagtaattcatgtcaatgaatttgttattctgatttaaaaaggggttcctctctctctctctctttagaatttttttcttactgttcttttaattctaatttaatttttttttatattcatcatttttatttttattttttttctgtgttccaaatattatcttgcccttccttgtatcttctttcatgtaatttttatttttcacagaagaaaatacttttgtttaaatacgtatttgttataagtaggtcaaataattgattatattttgtcacccatacaccacctcactcaaggaagtctttgctttgttgattgaacaacttggtgaaatggttataccaacataaacattattagaatttataatgccgtaaattttgttgccaaacataaagtattcttgtctgggaatagtattaaaataatacaacatattcaaattgagaagtttggaaatagtgatgatactgatttttcttcttaaaagtgatccatgattcattgtttattcctatttcttaatgtgacatatttatttgaagttattttgatagcctaatttggaaacagtatttgtatggccatatttgctctatattattggctcttaatatgtggtcataaaattcatgtcacagttcttttatcagtttatgttggctaatcataaagctacatgcaggaggaggtagctaaagagtttggtataccaattca

SEQ ID NO: 13148 - DNA, 6556 bp, Vitis vinifera
  Intron number 1 from transcript GSVIVT01034336001 (locus G SVIVG01034336001) derived from phytozome v7.0 (chr-ID chr1 0; pos 17891377 to 17897932)
agccatttgattaattgtttttttaatcagcattggtagttttaggcatccccagccacaaaacaataagcagcagcagcagccagttccttatccccagctcaatcgcttatttttaggcatccccttttccattgttcttttcaattaagtagttttttaaatatgtaaaatcatgagtatcttaatctgatgtctatttgaaaatttaatgataatttataaaatattttaagccattttttaaatacatcatttcaaaattttatgaattaaaaaaataataattatttatcctattgaagcagtcctagagcaatcctaaccaaagccgattcattaagccatgacatcctaatggtcataggatgctcagtttagatcggccctttagaaaccaaaaatccactttttaagtttaataaaaactcttatttttattccgttaatttttatttttatttttatttaaaaaaaaaagagaattcaatatgacacattaaaaaaatattacttttatattatatgttcacttatataagaatttttgtcatatttaattaaagttttataatattaatattacttttaaaaattatgtctttgatttagagttgcaatttgaatgagttagttgggttaacggctaagtcaagtctagcttgatttaagaaacaatcaacccaagtttaatctaatttgacttgtaactcaagttaggtttaatctaatttgacttgtaacttaagcgtaacttaacctcatttttgtaaatttgagttgaattcgaagagttaaactaagttggtcaagttaaatttagattgatcgagttaaactagtttaaattagtcaggttaaacttaaatcgatcaagttaaactcaggttaatcaagttaaactcaagttgatcaggttaaacttaagtaaattaaattaaattcgagttagtcaagttggttcagttacatgattcaaaatccaattcataatggtttttaaaaaactttatttttctatatatttatatcaaaaatagtaaataggacaaaacttagattgatcaagttaaattcaggttaatcaagttaaactcagattaatcaagttaaactcaggttaatcaagctaaactcgggttgataaaattaaacttggattgatcaggttaaacttgggtagatcaaattaaattcgagttagtcaagttgattgagttacatgattcaaaatccaattcataatggtttttaaaaaactttatttttctatatatttatatcaaaaatagtaaataggacaaaacttagattaatcaagttaaattcaggttaatcaagctaaactcaggttaatcaagctaaactcgggttgataaaattaattttggattaatcaggttaaacttgggtagatgaaattaaattcgagttagtcaagttgattgagttacatgattcaaaatccaattcataatggtttttaaaaaactttatttttctatatatttatatcaaaaatggtaaatatgacaaaactttaaaataacataaacttatatatttttctaacaaaatgaaaaaaatttatgatataattataatttaactttattctttaaaatctaaaaaaaaaaattatcctacaagataataaataccataaatattataagaatattaaatacaatggtttgagttcttcaaaccttaacctgaactcaaccttaagttggggttaagaaaacttaacacaaccttaatttgaattttaaaaatatttgtcaaaactcgctcaaacataatgtgggcttaattggattgggtgcatcctagattttgggcatctctagatttcaccttaaataaaatagaaaatagggaagtaatcccccatatcttcttccaatttaaaacgattttcttaaaaaaaaattaaaaaaaagataaaatttaggattagttgattaaaagagatgaaaatatcctaaatttataaaactaatttcttttattttttaacctgaagaataactcttttatatatatatatatatatatcaatacccttaaaaatttgtattatttacatgtacattaaaaaaaattatttttataagaaaaaaaatgaggaaactcttgtccaaaataaatatttttttattaaaaaaaaatgaaagattagacttataatttgatatttcttttctcctttaagcatattatcgtaaacttcatgtctatttttatcctagatgccaaaagcgacttctataacttttttgttttttatcatcatcatatttgggtggagcacctttgtatctgagaagaaaaacttccacagttgaaaaggactgagaaccacatcaatcgcatacttttttgttttttatcatcatcatatttgggtggagcacctttaataataaaaaatataatatttttacataacatatttttaattatttttatctgatttcttataaatgttttaaaaaataatcatctagtgtgaaataattaaaaataaaatactaaacataaaaattatttttaaaatattaaaaactaaccaatttttattttataaaatattataaaataatttttaaaaataattatccaataagatattaatttattattttttttctacgctttcctcttggtctcggccaaacaatgacccggaaatgctgcaaaattttccaatagaaaatttaaaggtatcaagtggccaatataattcatcggatacaaaattcaaattgttatatcgataaataaagatataaaaaaaataaaattatggtataaaaaagaaagataaagatacaaaataataaaactattactaaaatataaataataagatttttgtactatgtgcgtcttcttcgaaccaccgactttgaagtggcctcaaaagactcatgtaatttgttccatacaaaatatgtcattcttggtcacgtgacgagaatgactaatattttatatgataataaattttttatttgatttgattttattttattttattatatgtttgaaataagactatttgattaaaagggtcatgaacctaattttgaaaaattagccttttatcatttttttgtcctagttttgataaaaatgctctcacttaaaaaataacatttaaaaaaaaaaaaaatctatatgtaaatatttgaaatgataaaaaatatttatgtaaaaaataagttacttttcaaataaaaacattgaaagaggtaagtttggggattattttagggagaattatgttttgggggtagatgggcccccaaattaacaaaaggtccatgtaactcttcaaattgagcccaagacccattgaaagtatggaaattgagttgaaggatatcatccttcagtattttcaaaaatacccttcgttgattttgagaaaaaaactaatattttttaaaaatacttttatttaatttaatattttttaaaaatacttttatgtaatttaatattttttaaaataaatttatttaatttaatattttttaaaataaatttatttaatttaatatttttttaaaataaatttatttaatttaatattttaaaaaatatttaatttaatatttttttaaatactttaatttaatgtaatatttttgaaaaataatttaatttaatatttttgaaaaaaaattaatttaatttaatatttaaaaaaatatttaatttaatatttttgaaaactactttttatttaatttagtatttttgaaaaaaaaaattattgaaaaaaaattatttaacttaattttataatatattttatatatgttcttaaagggtatatttgtcaattactatttcatatcctttaactcaatttgaagagttatatggaccttttgttaatttgggggcccatctacccccaaaagataattctcccattattttatgggagtttatatatacatccacctaaactctctttgcatccaccctcttaatgaatttttttaagacataaacgccccttggtgaaattcccagagtactcttcagtagaaaatttcattttctttatttcattctctttctaatctctcaataataactctaaccaaatttaataagagagttatgtttctcaccaatagatagtcaaataatcatatctaataatgttgcaagtccataagtattgtttttatacaatttttatcctattttttggattaagaggagaaggaatcacgaatatcatttgaatttctagggctaaacattttatagttgtctaaccttatacctttggacacccttaagggtattcgattatatatttccaaatacccttaagggtgttcaatcgtatactttttagacattattaaggtcaggtatagtataaatgtccaacattagagggctgaacataactaaaatgtccaatgctagagggttgaatagctcagctatatccgactttccagtggacacaatggttccaatttttttttcccctcagttgaaattgcaattattcaccatttctcatttctaaatcatatctatgttctttctaattgtttttctcacttctaaactttaagtaagatgatttatagttgaagtttgtggctaggaataaatagagtgagaaaaaggaagaagaagaagagtttaaggtgagaataatgaggtgagtttttgatttttttttaaatggtaacgtgaatgtattaataagttttgaatttttgggtaaatgtgagtgtgtaaataggatagatgtaaataaagtttacatgtttattatattataaaatgatttataaataaaattaaataataaatattaaaaatactgaacttgtaaaaggatatataaaataaattatgggtattacggtctatccattatttatattttcctttatacatgcattttttattttttttatttttattttttaaaaagataaagtataaaaagagagcaaacgcgcagtattaaatatcaacctcatcaacttgagagtcaaaattggtagatcctctactcttaaccttctttatcagtaaccatggttttaaaaacaggaccggactggccagtccgaccggtttaatcgtcgaccgatcaccaatccagttcgattcaaccatttgagccggggaggctttaaaccggcgtcagattgtcggaaccaccgttggaccgatgaaccggatgacctagccggtttcggatgaactaaacaattctcctcccccatccaacacttcatcagctcgcctcagcgccatcgccgccctataaccatccttcttctcaggccctcgcaatgccccaacccagatttttttcccgtttttggtgccaaaacccttccttcttcctcactcttccccatccagattttttccctttccgcttccggtacccagcaacccttccttattcccaaccgcgacatccccacctaggttttttccatttttcggtgccccacaaaacccttccttcttcctcgcccttaggtgctaaaatcctttcttacctctacctctcccttccctacccagattttttccctttcctttccggtgctcccacctagatttttgacattttccggtagccccaaaaaccttcctttttggccgcccaaatttttgacatttttttattttcctttttgacattttcctacctttttggtcaccctttccaatttttatttttattttaaaaattttttactccatcaacgtattatttattttattttatatttattatttttttacttcatgatttttaaaacttgtgattttaatttaaatgaatgaaaataatagatattacaattttaaaataaatttatgattataaaataagtttttgatttaaaatttcaaaatttaaaattctgattttaattcaaatttctaatttgaaactaattttatgattttttaaataaaaatttaatttttaaataatatataaattattattattattattattattattattattattattaattttaataatatataaattatatatttatgatgtcatcggttcgaccgccagtccgaccagtgaaccgtgaactggtaacttttccgattcaatgtctagtccggttctgaaaacattgtcaataacaatgagaacacatgatttctttttcaatatcaattccacgattggggttatcagaatagcttcaaatcctcgtcattattaaataacaaaatttagaatgatttgttttgagatattggaaaagggtggagattgggccatagtcaactaaatgactccattatttatgggtataaagctagattcatagtggagtggaagagcacagtggggagtgaagtgaagagggtgtaggttgtgatcatttgcaaaaaatgagaaaggggttggcgttggtttcatagttcttggattgttagtgtcaatattgccaatagcagtggctgtgaggggtgggttctcctcattcctcataaaggaaggaatttg

SEQ ID NO: 13149 - DNA, 5262 bp, Vitis vinifera
  Intron number 1 from transcript GSVIVT01028897001 (locus G SVIVG01028897001) derived from phytozome v7.0 (chr-ID chr1 6; pos 17713851 to 17719112 reverse strand)
tcggtgattgtggctggaatcagtgctcagccagtgtaagttttaatttttagtttataattttagctaaatcaatacttatttatttgcttgtttaattgatttgtagatctgctttgaaacgtagtggttctcaggagttttttcagttgcgtaaggttttgtttggttgcagggaaaatgaaagaaagtgtgagaaaattttgaatctttatgttctgttttacaaaatgatgaaactgacctcaagtgagctaaatggttgtgttagtttcagttgagttgggatttttgatttcttgtctcgcttatgattagaatttttttttattaaaaacttggtttttgtcttttccctccattttatcggcaacagagtattacccgccgtttggtttgatgaggaaaccgggtgaaaggaaataaaattaatttggatttatgtttttgctggtcgggcctgaagaagaatgaaggacgtctgccttgtcaaagttaaatgttgtatcagtctcatttgagtggagagtggagagtggcgaatgctaaatgttttaagtacaaaattaaagtttcttttattttaatatttttatcttgttgcagggttgtggggtttgtgtagagaaccaaatatgaattcttttatgctattgagaattgttttcaaacttgaaattgtatttgttatgtttagagattaattggaatgatctataggatatctcatgcagggggcaaatagattgctgaatttgagtagtgaagaaatgctgccattttatggacatacatagcgatgggattgggaataccaagatcctgaagtttcaatcataatttcttctattttttctgtgttttctcaagaactgagcattgctctatttcagttaaaattgtggatagtaaagaaaaatgaattttgaatctcgttttttttttttgcatgttggtccggttccaaaggatgagaagctctcttcttttaattagtcttgatttgggtggtggtttttggtttctttgggtccaaaataattaataaacaatggttcaaaattttacttttttgttgttttgataggtatggttgaatatctttctttgatattcttttcctagattttcttggcaaccagacaagcacagatgtgaggttgtttaagagatgcatcaagactcatgtttgcttattgagaatgctatgggatcctccactgaggtggtggtgcatgtgtgtgtaaaaagaaattagaaaggtacgtgggaattgagagactttgaaagttgggagattgagggagacaggagaagagtttatagggagattttaagatggttgttgaaaacttgatatttactaacttggggttctaaaactatggttttctcccttcttaaaatcctcttattgttgtaagcttggggctgtaggagaggggagagaaactaggatgctttttcttgtggattgaatttaaaatctttctttagattagaatataaaagagaacggggttgaaacttttgttcccttatgactgtatgacatattctgttgatttggaatcttttgtaacagtgaaagctaaaattgagaatacattggaactttgtgcctccaattgagtagaaagttatacacatgtggatgatatttattgtagaatagagggaagatgataaatagatgcagtctctataaagataatgatgaataagtcatcacatttacattttgatccattgtggtaggacaaaaaagctatagaattttttattggcaatctttggtttgaagtggttgtttctagattcaatgaaaaatttctcctcaagatggaagcttaagaggttggataaaagagaagaaaggtctggccatggtccccttgtgcctattttgttgcatgtggaaagagcatgatcggagaattttcaatgaggaagagctgccagatgaaggagatcttcattaaatccacattggagtggtttgatggaattacacattgttggatttttttagttagctttaattgtggatagttaggtttgtatttatttgtttgtttgtttgataaacacaaggtatatttataataagggcacaccaaagtctacaggggtatacagagggtgccaagcaaaaagaacaaaacaggaaagatgcaaaaccttcccacaggccatgcctacttcaaacctgatcaatcaacaaaatccaacataggcataggtgtctctcctatacaatgcataacataaacccaaaaattacaaataaaaaatgatttaagcaattgttccaaattttccacacattcaaatgctcttagatttctctcctaccaaattgtccaaaaaaggtgtaaagcggtagtcaaccacattttcttgtgcctcttcccaaagtaatgttagttcctacttaacaacaccagtttttatcaaagagtggatcacataatttattctaaataaagattattattattgttattattttattttatttttttatttttgttgatttgcaatggaaaagaatgtgatcaatgattcctcttcccttttacacatataacatttgttccttaaagacacgcctctcctcctcaagtccaaagtcaatatcctctcatgcaaaaaatctctctattttcggaatccatgggttccaaacaactctagttgggaatgactccccctagcataaaaaaatgagtagaatgctttaactaagaactttccactcttaaaatctaagcaggttgtcctatcctttgtgttccaattcacaatttgctttagaagtttgtgcaaaaatgcctttaccatctttaactcccaatcatgtaattgtctaagaaagcatgagctccaatgatgcttttccctctcctgcatcttttgagctcactacaacgaataaggtggggaaagattctcttggcaatgacttaccacaccacctattcaaccaaaaccctactctcccatcccccacaataaagtgaaccatactttttaaaacctcccaatttctcttaatggtcttccatagtctcacttaaaaaccttccgttatttcccaaaacaccaacctccttcttcttcttcaaattttctaataataacccactttcatagtgaatctctttttgaaactccacttggtcataagagtggtattgagaatagaaagatccttcatgccaagactcccttctttcctaaccatacacaccattgaccacttgaccaagtgaggcttttgctctagagctccaccctccccaaaagaagttttattggatcttttctagctttaagttttcccttcttggaatcaccaacaaggacatgtaatagattcacaagttggaaagagtacttctaattagtgtgacttccactacatcccacattgccaacaatttgaacgaggtgcccaatggaagtcccagatatgtataaggaagcctttccacctgacaacccaattcaaacacttgtacttcaaatcatctacctttccaaccggaataagttcactcttctctaaattgatttttagcttggagattgcctcacaccacatgagagtccaattcaaatgcaacaattgttcttggcatgcctcacaaaaaatatgttatcattagcatatgatagatgagtcaccttgagtctctctttgcctctccctcctaccttgagacctgaaataaaacctccttcctttgcttttataatagttgattgaactccttcatagccaaaacaaataaataaaggaaaagtggatcttcttgccttagtctgctggaactttagaagaaaaatttgtaggggttctgtaaaataagattgaaaaaattgactaaagatatgcaccacttcatccatcccacccacctctaaccaaaactgattttctccatgacaactggtaagaaaccctgttaggtcttgtgtagttgcattttgctttgctttattttgtcttttgtataccacctgtgtatatggggtgtgcccctttttgttaggagctgtttaatatatcctttgtttgcctataaaacaaaaaaagcattcctcccaaaataaacctaagccatgcttttcaaaatccttgcttagaaatatcgaaaatggctgtttgtgttgtaaaagaaatatcagaaatgtgaatcaggaattatgaaagtcaatatgcttttggctagacacatggacataagtgagagatttactgaaaaaggatccttttctttttgctaggtaagattcttgttgttgtcttaaacttcatgaaaatactcccttctgccaccatctgcccctcaacccacacatacacaaaaataaaggtagaaaaatgaaaaccaaacagtgcacataaaaaacatactggcccaaatctgaggtgaacaatgcatgaaaatcgtgaaatacctattctctgtgatgaaggttggcaaaagttttaagaacttgcttgagctgttcctggaagtttttgtggtatgtggcaatctcggtgtccactgtggccattgaaagataaaatagtggcagtgaggaggtgggtctttgttgaaataattctcttctccaatccaagaagggaaaactgatagaggagggtggatgaatacctttagtttctctttcaaagacaaactttgaaacttctatgggatggatgattggaaaacggttggaaggaaagcaaaattcagagcaagagaaagtgattacagtttatccaactgggaacagaaagcttcagtataatacctgcattttacacttcagggcacttctctagttgttaaggtgggtagatgacaatacaaagaaatggataataacatgtcattttgttctctctgcatttgtgaatatagtattttatatgaaaaaaataatggagctgtaaaatatgacacattaagcaatttgataataagcaatgtgaaatttcatgaaatagagcatttgtggatcttaataacgcctgttcatgtatgtcaggagcatatgctagtcttttggtggtatcatttacataaatgtttatcatttatgtatatgctgattttttttattgatatcatgttcataaaatacacagtcagcattgttttggtgatcattaaatttgctatatcaacttgttcaggaaaaactaagaagccagcttctttgacaggtttttatttggttccttcatctgaagcacactca

SEQ ID NO: 13150 - DNA, 6401 bp, Vitis vinifera
  Intron number 2 from transcript GSVIVT01027342001 (locus G SVIVG01027342001) derived from phytozome v7.0 (chr-ID chr1 3; pos 16257019 to 16263419)
aagtatgattgttattttgtatatatttatgaaatatttgatgttgattaaattatttaattaagtttcattctctcatgggtcttatgttttgtatttatttatttatttttatatcatattgtttttattcttcttgctagaatgtactttttttggaagtttaatattaattacttaagatttcttttcttttcctatatcaattgattacttgctcaagtacataatgaaatgcctttttgtacttaatgatatcattcctcttcttgattgtgacaaataattaattaagcttttttattaatacgttttctttttttggctatggttttagtctcttgatgttacaaagtaaacttgattagttggaattcatccattaacaagaagagaaaatgggcaagggattaaaaacaaatgaattgggttggaggggtgaaatgatgtaatatgaatccggaaggaaattgctaaatgtaacttatccatctataataataataataataataataataataataataatatgaatttggaagaaaattgctaaatgtaacttatccatctataataataataataatagttgtagttgttgtactactatatgaataaataaataaaaagtaaaatcatgtaagataagcttaattaaataaataaaaagtaaaattatacgggataagcttaattagaccaagtttaacaaaatttttattaaaattataagaaaggcacgatcaattaggtggtgtcgtgtatataattcaaatctcattgttttatatttaagttccattgctttatacctattctgttgttttgtccattatccatttctttgtatttagaacaatatgtttataacccccattcaatggacaaaattttaccttatatattaggtgttattatttttaaaggtaaaaaagcataaatgattttgtaattatgcttttaatttttgtaaatattaaatctttataaaatcacaaaagttcaggttttactgcttttagaagaaaataaataattttacaattatgttttaattttgggagaattacccaatagggtaggctagaaagaataattactagtaagacttactcatctcaaggatttttagaggacaattttatctttaaatatgttttctatattatttataaataaatttgagattgtcaatgatatagggcccatacatgatggtaagtacaggttgataggtaatcaacaatacattcctcagcccggaaaaattgttgttcacttttgaataatcaagtggctgtttaaaaatttgttattttttttttcaaaaaaattgagattttttaaagaaagtaaaaaaaataattttcaaaatctcataaataaaaaccatatcctaaagttattatatcgttttatatatggaacatacaattaaaaactttgttaccataatataatgaataattattttttacgagcactcatcaattgaataatatataaatattctattgactagcacacacctattaaatggaataactcacaattattcatttggtaatatagcacatgaaaaaattaaataaaaataaattaaattatgttgtaatatattgtaatgatagtgtatttatattgtaagtataatacatttatgtcgtacctatattttattacaaaagtaataattctaacaatgtttatttataccccattggtattaacacatcgtatcaatatattaacaatatttatctagtgtattgaaattatttaataatatttatatatatatatatatataaaactacgagtctcttgaattcaaattagtatttcatttggtttcagaaattatttataatataggtatattgtgaaatatgatatgatcatacaaaattatcatttttataaaaaatttcaaaaattttctaattaggttttattgtaatgtaagtgtatttatattataattataacatatttttgttgtacttgtattttataataaaagtaataatcttgaggatcgctttttataccttattaatatttaacatatcaaatatattaacatcatccactcgatgcattgagaaaaaaaaattatatatgaaaatttgaaaaaaaatcaccatgcaaaggaaaaaaaatcatataaatttttaaaaattattttattataaaaataaaaaatgattaaaccttctccatcattttcttattctttttagataatttgagtaaaaaattaaacattttatcttccttgaatttaatacaaaaacataatttaccaattttaaattataatatatatatatatatatatatatatgaaaaaatcatcatttttattatgtaattacaaaacttatttttttttcttaataaaattaaaatttagaataaaaataaaaaatgtaaaaagaaaaacaataaatgatattttgaaaatatttttcaaaagtatttttgttttaaatagtaaatttaaattacaaattatatataattgtaagggttaaacccaaaattttgatttaaaatttgaatatcaataattacaataaatgtggacccacgcaccataaatgtcttgacaaatcaagtaaagtgctttaaatgctttgaattttaaaagttttagttgaagggcagttttggtatttaagcttattaaagtcctccccaagaattattagaagagaccaccctttctagtaattgttcgggtccagcacatcctattgcgtaattctccctttaatttttataattattaaatatttatataaatcattttacatttatgcttttcatttgtataaatattaaatatttttatttactctaatttttatttttgtttttgaaacaaaaaataagaagtagaaatttattttaatgattttttatgattttgtgtgcatttaaatttttttccatggtcatatgtaaaatatgttgtttgataagaatagaataagatgtttgtctttccattttgaaacttgttttaaaaattttgaagttaaaattaaaagcttgatacctctattgcttttattttttgtcatgaaatttaaaagtaaaaagttaagaaaattatgattttcataattataatatttaagtgcaattaaaaagtgatttactctttaaaacgttgttccaattcctttacattgcttgaaataagacatttcttcgaatgttctatttaacacagaaagcacatatcaaacactatacatggtattttcctcaagttgcccacttatgatattggttctagcattacgtgatacttgtttaaatctttatttattgaggtggattttagacttcttttgaatttggaaaacaacatggaaaaggaaagagggtaggatgaatctcaatttttcttctttaaaaatgatgaaaaatgaaaatgataagaaataaaatagaaaattggaattctaggagaaatttaatattgtgaaactctcaagtctttataaaaggtaaatgatacaatttattcatttaatttcctttcccatctttcttttctattatctttttcttgcgcttcatataattaagatttaggtttgagttatcggtgatatatcgatatcacacatatcgagaggggaacccattccctcttgtttgctatggatgttagggttgaactccagcttcattattattaagaatgtatatgaaaatatacatatatacatcctatacatatcttttaaacattataacatcatttataaattataaatatcttttataaattataaatacaaatatattttatattctatattataacttaattaaaataaaatcattataaataagttaatttaaattatcttattatatattttgtatattaattaaatataagacaaatataattttataaataaaaattattaatatttttaaataaaaaacttatccaaatattaatgtattttttttatatatatatcgtcaataaaaaattcaatacatgtgttattactattttattatttgttaaatttttttaatattttcatctttccaatattttatgtcaaaatatctatcaatatttctcaatatatcctaatatattcataaaatcaagttactgatatatctatcgaaatcgatattttcatccttgattgcaaaccactttgtttatctctagctgggtaggttaggtaaggaagactctaattaatctatcttgactacaatctctagtccaattaggcttttctaaatctaccacgtacatgcacaactatttccccaccaaggagcaataaatgccaagtccaaaaagtaacaatctatatgcaattaaattaaaattactaataatctacaaaactaaaaacgaaatgagagtagaatgaatttacatagttgtaattgatatcacaaccaaataaatcatcacaaaatttctctatcacacctttttgaatgctcttttttcttatgatgccaaaagatttaccctttgctagaattcctatgtgatatccccaagtacagggttgtgattgtagttttaaaacccatgagtcaagtgttgaatcttaggaagtggtgaaggtataggggagtcgtacaattttaaaaagtgaattaagtgtgaagtgagggaaaaactatttgactgaatttttaaggtgacatttggaagaaatagagaaggttagcattttcatttagaataattttggaaaaattttagaataaggcatgcaaaagttaattaggccaaatagattgaggattggtgttcatttagactttccctagggtacaaatacacactcttctattactacacttggtaacaccaaaagatgctctacttggatgattttcaataaaaaaactaaatacttctctttgtaaaagccttaacattgcaaaatttgtcattttttcatattaagattctctcatatttcctttttaccaaaacttagatttataggtccaatagggggaatattaatctgaaatgatccaaaaccactaagaacttaaaatcccacaaaagcaacccttaaaccttaatttctaaggcaagtgactttgaattttcttgtttgaaaataggaacccaagttacaaaagaatgttttacaatcaacctaacacaagaggtgtgttcaataccctaggaaagtgtccatggactctttctcattggctcataaaactacttactaactattatcataaatgtagaaactcataaataaaagatttgaaaccaatagtgccattaataaccttgaaaattgtaccaaagatgtataaatttgtacaaggtaaattagagtacttagagccaacaaaaacacatttaagttaataaaagataaacaaatgctaatagaattgatagaatataaggaaattaatagttggaagcttgaagaagaagtttaactccttagggcatgaaaaaaaaatctcttcttagttgcaaaataggcctatattagtcctcaattgttgccgtaagtatttggctaggtggaggtagaatgaaatagcttattggatccaagaatagaagagaaaaagcaaaaggatgtgaactcaagcaaaatcaggagagataatagctaggacaacatgtcactttgattgccacctaacatggaagtgtctaaggtagggtgccacctactgagtgacatggaccatacatgttgccttactatgtcacccaaaatgctagtgttgacttccttatatgttttaataaatctccttgcttgccttacttgtttgatataccttaaggtattcctttgagcttttttattcacaactataaattcacaatggaaaagtgagagaactaactaggcaaaattaattggtgttgggaagtatgtttgatatgaaaaaggagctaaggacatgatttagacaaaaaaattatgcaaatatgatttcaattagcatgttgagaaaatgactcctatgcacataaaatgtggtgaatgaatcctcaattcataatgatgagaaactattgacctatggagttgattttcgactattttgtaagattttgaagaagtttttgctttcattgcatcataattttcattttatgtataaagataaaaggtattaatttttttttttcatattgaggatgtatattctttggaacatcttgatctttctaccgctctctttttgcacatgcatgtacattcgttttctcatgcatttatgcatattatgtggacaaatgggatgttgaattaccaatgatactattaacggatggttttattgaatattattttatgcgcagatttctcaaattttaaggaatttggaagtgt

SEQ ID NO: 13151 - DNA, 8319 bp, Vitis vinifera
  Intron number 10 from transcript GSVIVT01024856001 (locus GSVIVG01024856001) derived from phytozome v7.0 (chr-ID chr 6; pos 6438987 to 6447305)
ggagaaaaatcgtggagagaaaaaggaaggattctgttaggtcccgatcaggtagcaacaataactcatagaaatactcactttctttgggtgaaagataaaccacaactgtttatagaataaatatgctgccgtttattcattactaatgttccaataaatagagtaaaacttaacaaatcagcttcaactctggaaactaactagcctaaactcaagggaataccttgtaacaaatttgaatgtgcaaaattacaaaacataagcagaaaataaattaaacggttgacaactctttggttagacttggtctaactcaagctaaaaaattgggattcttcttagagattctttctgaccttttcgtcctatcaatacttcccctgccaagtggatccttgttctcaaggtctagtgaaggaaacggattatgcagcagtgttgttgcctcccatgtagcatcttcagtaggcaatcgtttccacttcaccaaatgcttttcaataaatttcttgccttatttaatctagcatgtatctaggattttctctggttccactgaagctaccctttcatcagtaataagtggcagctctaagttaacttgtggaggatccctaacatattttttttcaagagagatacatgaaaaacagggtggatctttgctcctgctggtaattggagttggtaagcaacatttctgaccttcttttcgattaaataagggtcgtagaacttgttggcaagttttttatgaactcttttgaatgcagtttgttggtgataaggatgtagctttaggagtaccatattacctgcttgaaactccacatcatgccttttttttgtttgccatttgcttcattcgattgactgccatgtccaaatttttcttcaagtgctggagtaattcatctcggtgtaagaggctttgatcgacttcatgaactcgagataacccatcaaaatgcagtagaattgggggagaaagcagaccatacaaagcttggaaatgtgtcatcctcgttgagctatggtaggtggtgttataccagaattctgcccaaggtaaataactataccattttcgtggccattgatggacgaaacaacgtaggtattgtttaacacaacggttcacaactttagtttgttcgtcggtctgcaggtggtatgcggaacttaatctcaacttggtgcttaacatagtgaagaactcttgccagaatttgctgataaagacagggtcgcggtcattaatgattgattttggcatgccatggagtttgatgacgtgctttacaaaatgtttagctacaatctttgtagaaaacggatgagataaagcaaaaataaaataaaaaatgagcatacttattgagtctatcaaagaccaccaaaagactatctttgccatgggaaaatggaagaccttcaataaaatccaaagtgagatcatcccacacttaacagggaatgggaagtggttgaagtaatcctaccagagatagggtttcagttttgtttttttggcaaacttcacactgcgtgaaatatttttggacagaccggtacatggatgaccaataaaattgttgagctaaccttttgaatgtcctcaacactccagaatgccctgccattttactatcatgaaattcttttagaagttggttgtagatagcttgtggaacatccactctctttttgtagaaacagagaccattttgcatcaagtatggtccggtagggtctgtagatgattaacggctcaattgctgcatatatgggtcatcttgtgctgtttttctcatatcatcccaaagagtaacctgtgagacaaacaatggattaagaagagggttgtcagggcagcgagagagggcatcaacagctgaattttcacgtcttggccggtagagatttcgtagtcatagcccaagagctttgctacccacttttgttactcggaaactgctacacgttgatcttaaaaatatttgagactcttgtgatcggttcgaatgaaaaatctcctgcctaaaagataaggccgccatgtcataattgcttccacaatcactagcatttccttggcataaatggaccatgttcatttattaatccccaaagcgcgactcacaaaagcgattggcctgccttgctaagtaaggactgtaccgattccgtcacttgaagcatcagtttcaacaatgaaagagtcattaaaatttgacatggctaacatcggggtagttgtcatggattacttgagtagcttgaatgcatccgttgcttcttcattccacctaaagtttcattttttgaggagattggtaagagggcgaaccaaaagtccatagttctagaaaaatttcctatagtaacttgtcaagcctaaaaattcgtgtaattcagtgatattagtaggttgtggccaaactaccatggcctcaatttttttttttcgtctacctttactccttgatgcatcacaatatggcccaaatattccaattcttgttttccaaaatcacacttgcttgctttgatgaaaaactaatgttgtctcaggatttctaatattgttcttacatgttctatatgtaactcccatgtgggactataaacaagaatatcgtcaaagaaaactagtatgaacttgcgaagatgaaagtgaaatatagaattcataatggcttgaaaggcggaaggggcattgcataaaccaaaaggcataactaggtactcaaaatgaccattatgggttctaaaggcagtttttggaatatcaggagcatgtacttgtacatgatgaaatccaactcgtaagtctagtttggtgaaataggctgcctcatacaactcatctagcatattgtttatcgtaggaatgggaaatcggtctttgatggtggctgcgtttagtgcccgatagtctatgcaaaatcgccaagtgccatttttctttaccaacaaaacgggaaatgagaatgaactggtgctaggtcgaatgactcccatgttgagcatcttcttgacttatttttcgatctttgctttttaaaaatatgcatatctatagtgtcaaacatttatgggttgagtactttttttgagaggaatgtgatggtcgatatttctcaatggtggtagtgtggttggttctttgaacatgtctgcataatcctccaatgtttgctgcatggtaagactggtgtttgtcccagtggacttcttgacagtttgtaggtagacaacaaacaacatttggccttggtgcatcttttttgcaatcgatgccaatgatgttgctttaatggtttggttagttaattccttacaatcttcgtgcttgattaccccagtgaaagtccatggtcaattgtttccaattgcagaccacggagcctagcttctccagtcattggatgtctaataccatatcaagtcttgttaggggtagagaataaagggtgaatgaaaaagtaatgccttgcaaattcatttgcactttctcaaagtgaccctggcagagcagtcgctcgctacttgctacgtggatagcaaatgatttcgttggcaccattagaagtcgaagaaatctggctactttttcgctcaaaaaattgtgagtgaatccattgtcgatcaacgctatcatgtgttgagatccaatggcggctgctactcgcatggttcgtggagatgcccagcttgttagtgcatgtattgagacttccagtttgacttgatctcctagagtatctttcatctgcaacttttcatccactacatcatattctttggtttgattgctgctttggcacttaagaaggagtagttgaggtccctagtacttgtgacctggggtgaatctgtcgttgcagttgaaacaaagcccttgtgctctccgtttctgcatttcatcccaactcaatcgcttggttgtcattgttagggtagtccgattctttagagtgatggtggtagatacacggttctgcagtgggggctgtatgaacctttttgttcttgcgatctattcatccttcattctcgctaggctgatggattccttcaatattttaggctcgaacattcgaattccatcggcgatttcggatttcaatcttcccatgaaagtgccaacgagagccttctgtgtccaaccttgaacccgattgcctagcctttcgaactctttttggtactcacaaagggatctaacttgttgaactctggatagagtttcatcgaaattttcacactttgtcggtccaaaactagcccatagttcctcctcaaagaactcccatgtcaccaaaggactttcctcttggtaagctcgacgcaaccattgctaccattggttagcttctctttcaaggtggaaagatgctagagttaccttttggttgtctgttgtgtcttgaaattcaaagaattgagctactcggctaagccattccatcggatcttctccaaagtattttggaaattccaatcttgccatcttggaagagaaaacctgtctgccaccatcgttctcctctcgatgtgaatggaaggatccttcccgcccattgttgttgttgctagaggcttctttagttggaagcaaagcttcagataacttgttgacaatttcctctaatcgttgtattctatcttgaactctaccaagcccaacctccaaagcctcaatcctttctttgttggatgtcattgtaacgatgctctgataccaatgttaggtcccgatcaggtagcaacaataactcatagaaacactcactttctttgggtgaaatataaaccacaactgtttataggataaatatgatgttgtttattcattgctaatgttccaataaattaagtaaagcttaacatatcagcttcaactccggaaactaactagcctaaactcaagggaataccttgtaacaaatttgaatgtgtagaaatacaaaacagaagtaggaaataaattaaacgactgacaactctttggttagacttgatctaactcaaactaaaaacttgggattcttcttagggatttttttttaccttctcggcttatcagattcctaaaatcaaagtttctaaactcaagggtttcctaatacttccccttgagttggagtatggaggttatgaacacctaacgtgtgaatgagagaaggaaaaacagtagctcctaaagccttcgtaaagacatcagtcaattggtccttagtatgaatatatgcaatttgaaccaaactagcttgaactctttcgcaaatcacatgacaatcaattttgatgtgcttggtgagttcatgaaatactggatttgcggcaatatggagagcaacgttattgtcacaaaacatggtggcaggttgtgaatgggtaacctgtagatcatggagcaaagaaatgagacattgaatttcatatgaagttgtagccatgactcgatattcaacttcaacggagaaatgagaaatcgtgtgttgctttttgtatttccaagatataggagaagaacccaacaatatatagtacctagtaatggaacaataggtttctggacaagttgcccagtcagagtcacaaaaagcatgaatctaaagtgtattagatgaagacagaagaatgccttgactgagggattgtttaatataccgaaacaaccgataagcagtatccaaatgtggttgtctaggattaaccatgaattgactaagaatctaaactgaaaaaacaatgtctagcatagtgatagtgacataaatgagacatccaacaagctgacgatataaagaagtattaggcaaaagatctccattagtgaaagtaagttggaggttgggctccatgggtgtcttgacaagtcaagaactaaggaatccagtatccttcaaaatatcaagaccatatttccactaggaaaaatatatatgcttggaacatttcactttaagtccaaggaaatatttaagtggaccaagatctttcaaggcaaatcaatcatggagataattctttagagatgaaatggcaaaaagatcattaatatagaccaagatatcatctacataaacaaccagagcaatgaagaaattgccagaagtttttgtgaaaatagagtaatcagccttggattgaagatatcctatggtaagtaaaacattaaataatttagcaaaccattgttaagatgttttcttaaggccataaagagatttatgaagtttgaaaactcgagtctcccattttcaatgaaactaggtggaatttgcatataaaaatcttcatccaagtcatcatgaagaaaagtattatcaacatccaagtgatgaagatgctaattttggatggaagcaacaaccaagagggctttgatagtaactaacttggaaacaaaagcaaaggtctcatggaaattaagtcatttttgttggctataacctttcacaaagagttgggctttatagtgctcaattgcaccattaaatttatactttatcttataaacccacttacaatcaattgcatttttttttacaagaaggtcaactaaactccaagtcttatccacctagtgttatctctatatcaacagggtcgttcatttaattatttcatgatgaatggatccatgtacctatcgcatacggaaatgttactagtcgtagagatgtttgcattgaattcctctcaaagttctactaaaggtcacatttaccttgagtttcttcaagaaaaataaataaatcatacgaaaaaatggatttattgttgaatatcaggaattgcttgagggactgtttaaatagtagtgcaatgggaggaaaaaaaattctactatgtgatagcacttatggagatgacaacgctcactgggccggtgccgctggaacaatcaaattggatagcactggtgttgcttctatcgtctccttacctacaatagctctaaatcagaatgacttggaaatcctccaatcctactacaattccacaaagtgaggattctgataattagcaactaagccatagctaattattcgatttttttttttgttttaatgataacaataccgttattggattcttccttacaacaaggctgaagcaaagatactgaagagtgaagcgatcaaagattcttctgctcctatagtggcttcacccagtcatacctgaaattatgaaggtatatctagccagtccatggtatatatctttctcttatggctttgtttacattatttttcaatttcttgagttcccttaaatgttgtagccggatataacagcccatggagtagatatattggtagcatactccgatattcctaaacttgcagataaacagtcagttgaatatattatattatcaggaacctccatgtcttgcccccatgttgctggaattgctgcttatgttaaaagtgttcaccctgcctggtctacatcaaccatccaatttgctcttatgactactggtaccctttatcactacataaaactctaattcaagaaatccgagaggatgtttgataaattaatttaatgacttaataacttaatttaaatcattagataggttaagcatgtttagtaaaataaattaaaatcacaacttaaaagtgaagaccaaaatggtttacttattcttgatctcaagtaacttttatatcatttgcctatgtttaataagagtatattttacaattatgactttacattcacaactcatcttttataaaaaaaatgtttttgtaattattttatgcatctataatactttaaatatgggtgtttaacaaataaaattattatttaagattaatgaaatggtaaatattagttaaaataaatgaggataaatatgtcaatttgatgtttagaataaatttgaagttaactttattaaacaatgttaatacttagagtaaaaattaaatattaagttttagctcaataatttaaaaataatttaacttaatttgacttaacaataagtaataagtatcaagtacttttaccaaacattctctaactttttttttttctaaatttcttatgtacatagctcggcccatggaagtttccacaaatctactaggtgtactcggttttgggtttgggcatgtcgatccagttaaagctacaagtcctggtttagcatatgaaacctcaacagacgactacacacaaatgttgtgcaacatgggttacaatacaacattggtgagatgcattttaggagacaacgtagagcagttgtcctgaggacaaaaaaggtttcccaaa

SEQ ID NO: 13152 - DNA, 10020 bp, Vitis vinifera
  Intron number 1 from transcript GSVIVT01037017001 (locus G SVIVG01037017001) derived from phytozome v7.0 (chr-ID chr3 ; pos 8864786 to 8874805)
gttcctctgcgtattgattgatatctcagttcaaggtactgttccaatttcttttcccagttcaattaatcgacttctacgttagatacaatcgtttggatgctgagaaaataatgagaaacttaaaagggaattttaaatcgtaaatttttcaccgtctagggttcgggaatgcataaaacttcacttcacttaaaacacataagacacttaggctcgcttgatttgagatttttattttttttgtttctgatttttggtagccaaaaggagtgagagataacatagtaatcaaaatatggttttcttttgtatttctatattttcctggtaaccaaacagatggtggattgcactaaaagtgctttataagttggatatgctattgctggaagtttgtaattttagagtttctcattgaacacccgtggaactaaagtatgaaaaaaggcaattaaaattttgaatcgtgtaattttctccaacgatgattcggcaataccagctttttttttctttttctttctcgaagcaaaagatgagaaataagtttttgttgttgtttttttattgctccattttcttggaaacaaaatagaggggctagggtttccttttgaatgcttttaacctgtcaattctgttgaaaattttgaattttaggatttcttttctgggcaatttaagttagaattttttagaaaattaattgtctgggaatattagcttatgcaattatatataaaaatgatttgacttgaataaatattctctggttttaccatcccaatgtaaatggaagccgtcagatgaaaagagagggcaattaaaatataaaaaaaaaagtacacttttttttttatagaaatacgagagtgtttttggaagtagttttagaaaatatttataatctttttaacactataatcataaaaaattttaagtattaaaaatattagaaatattttctaaaatttttgtcaaattgacttttaatctttttatttagttggagttttaattacttgattaacgaaaatcatttctaaacttatcattacaaatttaaaagataatttaaaatttaatatttttaatactactagtcaacttaaataggaatttaaagaattatgttttggggtagatgggggctcaaattaacaaaaggtccatataactcttcaaattgagttgaaggatatgaaatagtaatggacaaatatatcctttaaaaacacatataaaatattttataaaattaagttaaataaaaatttttcaataattttttttcaaaaatactaaattaaataaaagtaggtttcaaaaatataaaattaaataattttttttttcaaaaatattaaattaaataaaattatttttcagaaatattaaattaaataaaattattttttagaaatattaaattaaataaaattattttttaaaaatattaaattacataaaagtattttttttaaatattaaattaaataaaaatatttaaaaaaatatttaatttaatatattttaaaatattaaattaaataaaagtatttttaaaaaatattaaattaaataaaagtatttttaaaaaatattaaattatataaaagtatttttttaaaatatttaaattaaattagatatttcaaaaatatttttttttctcaaaattagcaaaggacatttttggaaatgctgaacgataatatccttcaactcaattttcatactttcattgggtcttgggctcaatttagagagttatatgaaccttttgttaatttgggggtccatctacccccaaaacataattctcccaatttaaaattgaatcttttccatactcataatcaattttaatgagaatttaatctttttatttcgttagggttaatggaagtcggtcctgaaattgttatcataaacctaaaatataatgaagtgacattcaatttaaggttttaattacttgacttaatggaaatatgaatgttcataacttcattttgatttatatccaaattcaatactttattttaattttatattcaaattcaatcctaaaaccgctctcaagattctataaagaaaaaggttaatatttgtgggaaacttctcaaactggacattcatctttggcacaacaatctgacatccctctctagcactactgatctatccttcatcctatttgatgaactaccctatgatttattattctcaataattaattttggtttatttataatatgtatttaatacttatatttattattaattttttctttttatcctgacttatctttcatttcttcaatgaaataaattgatattttttataaaaaaaattacatgaagaatagtgaatatagataattattgaataaaaagtttcacaattcatttatattatttatttaaacaaatttaaattttattaagaaaattacaacattattttaaatatattaaaattttgatataaaatttgccaaaataatgaattttttttttattattgagattttaattcttttgatttttctaaatatttttaaaataaaacttatatttttttgattaattgaataatttgatatattatacatttttctttgatatgaaattatttaatttaatttggattctactttttatctttagaaacaaaaaataataataagttttacaaaaatatataatggtttttaaaagcgaattaaaaatataattttgaacaatataatacaagttaatattttttccataagaattttaaaatttaatataaattttttataatttttttattttttatttttaaaaaagtgtataaaaaccaattattcatatttttatttactcttcatttttttcattctaaaaatgtcttgttataaattttattttctttaaaaccatactattagtataattaacggtataaaaatttatcattaaaattttgaaaactttataaatttctcattcattataaattttttttttttaaagtttaaaatttttaatctttcttttgtcattttatattattttcaaaattttcactttagctcttctcatgagttttgtttgacaatctattagtttgagaattttattttttttaaagattttttttaatccacaatttttttgctcaaattaattcatttttgcttttattaaaatgcacttatatgaaaagaaaaaaattatttaaacatatataaaataattaacacaatttcttttttattttttattttttatttttataaatttagtgtaaaagatatatatgttatgagactgtatttatttttttaatctaagaaaattggttaacaaaataattttattatcataagagttgatacccaaatttggtatcatgtttaagtgtttaacataattatttgattttgaatatttatttgatttttatataagtcttaaaagaataacttcaattcacaagtactaattcttttttgggacctttttcatattctttctcgggctttgacatgtgtacatttattagtaaaaatgaaattaaagacacctaaaataatttttttttatgtatttaacacctatggtaaaaaatagggtgaaataaatgagtaggcgcttgtttggtgaaacaaagccctaggccacctgccagaaacaaagccctaggacgaagaagatcaacgggctcaccttcaggtaaggatgaaaatatcggtaacttgattttacggatatcggaaaaatattaacggatattttgaaaaaaattttgatagacaaaaaatggattaaaattcataaaaatataaaaaatacttcataacaatgtaattaaaagtacaatagataatttaaaattattttattgaataatttgatatatgtattatatgatttataatattagatgtaattatattacgtaggtcgataaaaaatgtaaattttgtaattatacatttattatcaaattttatgaaaaaattgatttcattaaatatcaataatttatatatattaacttgatttcattaaataccaataatttatacatattatcaccatggattgaaaaatcggaaaatgtcgccgatatttcgtcgaaatatcggttatcgggcggcatggaaacgataaacggcaccgattatcgatcgacggaaaaatcggccaaaaatcgacaaaatcgccgatatatcggcgaaatatcggtgaagcaccgaaaaatcggagaaaaatcgcgatatttcctaccagtccagcccgcgcagttgtgtttttcagcctggctcaaaaatcgtggatttagggttcgtgaaatttaaatccaatggcacaacagcaaagagacccctaaaacagatccagaaaacacagggagcaaaagaaaagcaatttttttggttttctttgggagttttgaatggattttctcggaaatcaaacgaggatgaattttcccagaaatcgaatggggatggattttcttgggaatcaaacgggggttgcaaaaaaaaaattaataataacatgattagattagtacctgcgaggattgagatttgagagtagcagaggaaaatagggctttttagggattctctcgctggaagacaccttcagaaaagggttcttgatgcccgagagagaagtgggtgccttttttattttttatttatttttagatttaggggagataaaaaaataaaaaataaaaaataaaaaaaacatgagaacaattttctataaataattattaattttcaacttttatttggattattaaataaatttatattaataaaaaaagttgttatcacattttttaataaattttaaaaattaaatctcaaataagatattttatataaattaatttaatttatcatttaaaatataataaaatatgtaaaaaaatcatgagaacaattttccactctctatataaataattattaattatcaacctttatttttattattaaataaattaatattaatagaaaaagttattatcacatatttttaataaaattttaaaaattaaatctcaaataagatattttatataaattaatttaatttttcatttaaaatataataaaatatgttttaataaaaatattttaaaaattttaaaataaatactgtcttcaacaagatgaactcccttcatctaataatatattgaaactacatcgatatctttcttagtataaggactattgcaatctcatatttcttaactcaattttaactttatacactttcaaaattcatatatattatttttaaaattcaaatatcgaatctaccaatatatctctatttacgatatttttcttcttaattatatatatatcaattacacttacaagataactttaaaatgtgtattcttacttatgttatcattttttgaagttttttcaagcattcctattaattttaaataattttcactccatcgatatttatgaaaaaatatccaccgatatttctccgatatttccgatatatccgtaaaattgaagtaccgatatatccgtaaaaaccgatatttcaatccttgattatcacatagcttttgtttcaatttgaatagttggatgacatccgagttcaatttggaccattacacgggagtcatgatttgtttccattttttttttttttatctctattaaatctaaaaaatcaaaaggccaccaacttctctcactcgggcatcaaaaagccctttgctgaagacccacttctctcactcggccatcaaaaagccctggctgaagctgccctccggacgagagaatcggccccactttcctctttcactctcaatcctcgtaggttctaatctaatcttttattacttttttttttgcaacgcccgtttgattcccaagaaaatccatcccccattcgatttccgggaaaattcattctcgtttgatttccgagaaaatccatgcaaaacccccaaggaaaaccaaaaaaattgcttttttttttgctccctgtgttttctggatctgttctagggtcgcttttgtgccattggatttaaatttcacgaaccccaaatccacgatttttgagccaggctgaaaaacacaacctttgcctgcaaatcatgatcagattaccaaggaacatctcatgtttttttagaaaaaagaaaaaaaatttggacagattttgtatcctgtgcgcgggctggactggtaggaaatagcgggaaatttcccgaaaaatcggcgatacaaaccgaaatttcgccgataaaattgcagcggccggcatatttttgaagatttcgccgatttttcgcttgcagccgtttttcggcgattttaaccgaaatttggcgaaatttatcccgtcgacatttcgcccccctctttcgtatcgccggccaacgaaacccgaaatttcggtgaaaaaaatggaaactttcatccatgcgctcgggtatttttcctttgcgttctctatcagatcttttttttttttttcctctttgctcttctgtttggttggagagaaattgaaggaaaaaggtgaagaagaaaattacaagttatgggttctgcttcttatagttttctaggatgtggaattccgttacaagttatggtttctgcatcttatagttttctaggatatggagttccacttacttcgacgtttcgccccacatttctgagcaagaacacggtggctatatcccgttttgttgctaagaaagtgtgaggaaagaaattgatttcagaaactatagaaaagaagtcaagaacattcttacgagatttgggggttgtagtttggtagaagaactaacttccaaatcatggttatgtgttgttgtcatttctgtatgttgagatggtgctttattgtctgatgtttattttatcctattttatttttcttgtgtgtctgtttttgtttttggaaatgagcgtctctgttttagaattgtttgctttgaaattttaaggtcaaaagactataactcatctggttttgctaaggttgtagaagttaggtatagaggttggagaatttggaagttatggagaacagattagagaaagaagaaaatcaaggtaacttctagggttttagggaattacttctaagagaaaattttgggcgaagatcctgtggagaagattgaagaatgactaactatgtactgttggtagcaagaaaagctaaggtggtgtttgtttttttactaaaatttaaatagaacttaatttaactctaattataacttaatagtattaagtattaagttgtttgtttttttcgagtgtggggtgtgagggttgggggttagaagtatgaattagctaactctttagattaagaaaaaaactacatatttaactttttctagtcaattaaaaatattggtaaaaatgttaaaagtttaattttttttttctttttttaaaacaaacagttggaatctaaaagtaaattgcattcaacattaacttaaaaaagacaaacaccacctaagacttggaccaactagatcaattaaaaactattggacatgggtgaacccgaccaaccttcaggcaagtctggaactggatatgaaaaatgtacccctgaaacaaaaactttaaagactattgaaactaatgacaaggctcaaaatgctttgaattcctcaagtaagttataggtaacattcatgcgaaataactgtttttgttgtagaatcggttttcctcctcttggagtattcctccaagtatactgatctacccacatcaagcttctgataattgccttttgatttctcaaacaatagcctcttctagcagggtcgtctctattgtctctcttgaatgtgcttactcaggcactcaatttgaacttgtaaaatgaaaagtttaaagtggaaaataaataaaatgaatttaattttataggttataactcgaacctcataaataataaataggtgaatttatcatgaaggtgaatttattaatgattgttatagataaataataaaggtgaaatatatgggaaagtaggcgatgtatatgcatagaagaacaaagtctataaacttttactacttataatatgtatcttaggataattagatttgtgttattttaggttgcttgaatagccaagtcaactcaaatttattttggctagtatttttctgcagaagctctatttaaattacaaattggtataaattgggttgagttgggtccatatgtataacacaacccattcttgggccaacatcctaaactcttgacccacttgttcatcttatgggatacagaaagaaatgaaagatggctagggtttatctgtctccgaaattcctcttgtgagctaacttactccacctatgctagtgccatctcctccccttcaactctggtgccagtgcttgttcactgctgtagattttcttgcaatcggactcattgaattattcaaagttctgagtgtgggtttccggaggaagattggtttctcttcttcttttcctctcctttcttttcagaactgatctattgggcatattctaagcttggtagttagttattgttcttaatgaggaggtagccttttggaacccaagtttgtgtgaggtttggaaatatgagagaggtggttagagttggaatgttgttctatggtgggattgttgtaatgttgtttacctcttacttagattcactatttatgtattgatagttaaacaacattgaatatgaggacttttggccttcaaaatcttaataagtgggtttacgtagtggtcatgcctctattctacacatatatctgattcccatttatcaagcttaagataccatgctcccatggatttatttgatttggaaccaaagagaaaatcggtcataacatggttgacacaaaagcataagacactttaacttgagtttatgtttctcctcctatctttttacaattagcctaggagtttgtttggatcttgactatggaaaaaggttttagaaggaaaatcaaattcttttgttggaaatgagaaacgaaaaaaaatgtgatggaaattagggggaagcttgtaccaaatttaagaactttcaatttcctgtttaaataagtgaggaaaattgaggatataggtgaagaaaatttattcggctaaaagttgagtcttatttctttggcctttttctttcgtttccttttatgattgcccttggtatctttcagagttgttgaaatcaatcatagcccaactataatatgggtcatcatcatttaatgtttcttatcacattccactctatatccgtagttatgatgtactagatcataaataattaatacaattggccattcttcctgtcctatactatttagcatattgtatatctattcttatgatgtctaagaagtaagaactaatattttggtatcttttatgtcacttcaaacatactgattaaaaagctatagctcaagataatttcatcaattggttggggactttgcgaaaggcttttgttttttaagccccttgctcttttcctttgccacttggcatactttgtatacaacctatgtacattgttatgtgtttttttaggcaattattatatatttttgcttgcctataaaaaaaaaaaaggcagctagagctggttcttttcatggctcttcctatcatttgtttagttttaaaaatattgataggcattattgagttcggggataaactaaccatattcaggccatcctttaaataaaagggatgcatgtcactgaactttctccttttatcaagtattttgcttgtattgttcaaattaatgataccctctgaaggaaatggatgcttctaccaaaaaacaaaattaaagtctggttgttccctagaaaataattcaatttcctctctctcctgtagttctgagaaaagagaaatatttcttagaagtcaga

SEQ ID NO: 13153 - DNA, 5299 bp, Vitis vinifera
  Intron number 4 from transcript GSVIVT01001789001 (locus G SVIVG01001789001) derived from phytozome v7.0 (chr-ID chr1 8_random; pos 3170133 to 3175431)
cattttggatccagccaacctttttcctatcttaggtgtttgtaataatgtctctaagaaagaacatgaagtttggcattcccgtttgggacatccctcttatgttagacttaatgttctgaaaaatgtattacattttaaacaactccttaatgaaacacctcattgttcaatttgtcatttagcaatacaaaaatgtttaccatttcctaattctaattctgtgtcaatttctgcttttgatttgttgcatttggatatttggggtgctttccatttaccaactcatgatggatttcgttatttcttcaccattgtggatgattttactcattttacttgggtgtatttgttgagagctaaatctgatgttgctaacatttttcctgcattttataatattgtctacacacaatatggtgttaaaatcaaatttgtccgtagtgataatgcacttgaagtagctttcacagatttctttcatgacaaaggaatattgtctttccattcttgtgttgacactcctcaacaaaactctgttgtggaacgaaagcacctacaccttttgaatgtagccggagctctatcgtttcaatctcatatcccattagcatattggggtggttgcattttaactgccgcatgtctcataaataggataccttcccttgtcttgtctaataaaaccccttttgaagtcttatatcataaggttccttcttataatcatcttcgtacttttgattgcctatgctatggatctacactcactcgtcatcatgacaagttctctcctagggcaattcagtctgtgttccttggttatcctccaagttataaaggctgtaaactgttaaatcttgatactaatgcaatttacattagtaaggatgtagtctttcacgaagctttgtttcattttcagacgaataactaggaaccttttgtttctgagttgtttgctgacaatgttcttccttctgcacataggagcactttttcttcaccttttcctttggttaatgatctagctcctacttctcctaagcaaaatcctatcactgctcattctcacccttctcgagtcacaaaaccaccctcctatctccgagattatcactgctatgccactgtttcacaacccactcacgttccgtattctctttccagtgtgcttagttatgataaactttcctcttctcatcgtgccttggttcatgctatctcttcacatgttgaacccacttctttcactcaagctgttgcaattccaaagtggcagcaagctatgcaggtagaactacaagctcttgaggtgaacggtacatggtccttaaccacccttcctcctggtaaacaagttgtggtatgtaaatgggtttacaaattaaaatttcgagctgatggaaatttttgttacacttgagcgtcataaagcacgcttagttgcaaaaggatatactcaaaaagaaggtgtggattatgtagatacattttccgcagtggctaaattggtaacaatgaaacttttgttggctttagtagctattcatgggtggcatctcatccaattggatgttaacaatgcatttcttcacggtgatttaaccaaggaggtctacatgtgctagcctaaaggatatcaccgtgaggggaagactccttctcctaacactgcttgcaggttgcacaagtcaatttatggcctcaaacaagcttcaagacaatggtttgccaagctttcaagtgtgctattgaggaaaggtttcactcagtcatccttagatcattcattgtttataaaaaataatgttgaatctttcgttgcagttcttgtgtatgttgatgatatcattattgccagcaatgattctaacaatattgcagatctcaaatgctttattgatagtcaattcaagcttaaggacctaggacagctcaaatactttcttggtcttaaagtggccaggtcaaagatgggaatctctattagccaaagacactctgcccttcaactactcttagaagtaggatttctgggttgtaaacctgcaactacacccatggaaactaacattgagcttatttaagaagacggagagccactcaaagatcctgaattgtacaagtgcttaattgggaagcttttatatttgacaattacagggccagacttgtcataagcagtgaattggcttagttagtatcttgcaaatccaatgacaactcatctacaagcagtacattgtgttttacagtatatcaaaggaactgtggggcagggtctctatttctcttcatcttcaacagttaagctaagtgcttttgcaaattcagattgggctgcttgcaaagaaacgaggagatcaagtagtggtttttgtgtatttcttggagagtcactgatttcgtggaaatcaaagaagcaaagcactatatctcattcatctgcaaaagcagagtatcgtgcaatggctaatgttacttgtgaactggtttggttaatctctcttcttcgagattttcgaattgaacacaagcagccagcaatggttagatacaatataactttatttttcattatcttatgcattatttttgaaagaacagatttctttatcaaaattgtgaggaaaatgattttttttttccttttaaataatttattttacatatgagaattcaatgcagccaacattttatgacaatctacaacttaaaaaataattagaaaaagttaaattaattgatttttaagataaaatctaaaattaattgagccacaatttttttttaaaatttttttattgaaatttataataaaaaataatatatattgttatagtaaaatttaactttttattgtttaattatgtaaatatataatttaatactgtataaatgttttatagcaaagaattgacgtgacctatactaaataaggttgcaatatattaataaactcaaaattaacacaaaggtttttttcattttcttttgttttttcttttttttttcatttttaagtttattaaaaaataatttaatggactccgaattaacgaaaattcctttttcttttttaatgttttgttgttcaaataaaaatttaaaacttgaatgaaataaaatctataatgatttaatttttaaaaaaaaaaattaaaaattttccctgacaagttatatacaatataatatactttaaaaaattaacataatttctttttaaagttatgaattttgcaatctgtaggtccttgtaacaaaattagaattttatttattctgaaaatcctaaatcatcctaatgaaaatatattaacaagtaatataaaagtgaaatggattagggttttacagcttttgattgtgtttaagtaaaataattgttgcataacttcttattataatttgtaaatagtttcagataataagaataatttttacatagctttggactacataagaatttgcacattgcatctaccaatgatagtattaaatgagaattgaatgtaatttttggccataaccaaacaagatattgaattcatttattattaatgcatttataacataaatgatttatttatgctaaaattccctaatatgttccatagattctttttaaaccttctaatttcatattcctctcattctttcttctttcttttgccatatttcttgactctttaatatataacatatcttttttttttttcttttttataatttttcataaaaatttaaataattacttattaaaaattccaaatatatctcattctctcaactttcttcttctaaatttctttactcattagtccatattattatttttacaaagaattttaaataatttatttactaaacactgttttctatgtttctttattctttaatagattaataattatatatatatatattttcaaaatttttaaaaatattataattttctatactgaaaattcctaatatatttcttgcattatttttaaaccttatattttcatttttctctcaatattttttatttattttttattcttcaatatatatatatatatatatatatatatataaacttaaatattttattgctaagaatttcgagtatatttcatgcatctttatatattttttagagacttaatatatatgattcttttttatgaagttccaacaatggaggactctcccatagattacataaaatttagtacgaattcaacaaaatatacaaatgcagactcttgttcaaggtaacattatattagacttagttgtattttgtatttaactcttgttcaaggtaacattatattagacttagttgtattctgtatttattagaactgataactttcttcttactacagtcaataaaattaacataggtgagtgctcaaacttcttgctatgcaactcagcaagcaactattactttatttgatgcggctaaaaaagttattgaatgtttcttgctttaaaaaaagtttgaagaaaaattatttataaacaagctttctcttgtattacttcttgtgggaggatttttccggtctaaaaatttgatggtccttgtgttgatttatttttgtctgctcatattgggatgttgtctacttatttcaatagttgggggtatgaataatgcacaaattaacaattttttaaataaaataatgtatgcatgaaacaagaaattggataattggaaacatggaaaatcaaacaatattaaaaaacagagatctctggaagaagagttcatccctatggttatccctatggatgggtattacaattactttttaatgacctgaggcgtagataagctgaataccacactttatcgacaacgcatcagtcacaccagacagttcaaaggaagcccgaatactactccatgtctcagggtggcaaatatcgactccagagcgtggttgatatgccaaccacatgtggggatcatttgatgaatgctcaccactccacttgtcccagtagggatagaaaaatgaaaaattattcaactgacataatatgtcgtcgtggatctgaggcatttgatccttgaaagcaaagacaaagcacacacaaaatcccaggaagttgtcacggtcgtaccaatctggaggcagctccattgttagtgaagatcccatttcctgatgttcaaaccattcaggaattccatctccaggaatgagaatacagaactcactctttggagcgtggtcctgccatggaaaatcattagagagagagagagagagagagagacctgaat

SEQ ID NO: 13154 - DNA, 1653 bp, Vitis vinifera
  Intron number 7 from transcript GSVIVT01026721001 (locus G SVIVG01026721001) derived from phytozome v7.0 (chr-ID chr1 5; pos 5567422 to 5569074)
tggtaagcttattttcattacatttttttattattattacattgttttctacaccagaagattcttcgaaattctggaactaaaaattttaaaactcgtgtgtgtgtgtgcttgtgcaaaacatttatatctatttgtttttaggtaaacagctaaaattggtcgcaaggggttagcttggggttgtgggggtttctaggttcatgtctcaatagggaccaaaaagaggagaaaaaagcaatgttacctgttcaagagaaaaaaaaaaaaagaactgtatgttttttttaatttataaagaagatatttgaaaatcgaaaggaagttatgctaaaaaagtttgaaatttgaaggttatccaaatgaagtaaacctttttgaatttagttgcacaggtgcatgggaacatagattcataatggttgtaaattggttggattagatgaaggtttcatcggtaatagatcaaaaagtattagtcgcctggagtttggcaaaaatcctgatctattttagctgtgttatggctactgcaaagaaaataaaaaataaatcctgtgatttgctcaaagtcgtggtttctaaggagaatgacctatttctttatgaaaaattctaagatttttcttcttgtcaattccttttttctttctttccttttccttttttgtttttttttttttgaaaaataaaactagtatgaattggtgtctggatgagaactgtcagtaaggaaagcaagaggaagggatttttagtaaatcctaaattttatttccacctgaatatttaaattgtcactgaagtgggaggtttttgttaaattagtttagggaaatcgttatcttacccacgaaggtggggagattatatcttttctcttacatagacaaattatatttataaatcttgtttttttctttttcttttttttgatgagaaacaacagtatagtatattaaggtaagtaaaataagtacaaaaaatgatgagagatcctccaaacagtacacaaaaagaaagcaaaaacctgcaacttcaagaatctatacaactatgatgttccacaaattatgtcccatgtgggaatgtataaaaataatctatccttactagcccttacacttggaactgcacaccaacatccaatcaatttggttgaaattaaagggaaacacccttaaaagttgtggtgcaagaggcccaaaaggagactaagaaatgaattgtgtcccaaagatcctctgaagttgaagttctcgccttgtcctagaaaatccttacatttctttcttgccacacaacccttatcagagcaagataagcaaactgccacaattatatttataaattcatgtgtagtagatgtatctattaaaatccttctttcagaagaaagtcacttttatttggtatctgagctataatcttgtctttacatgctgaaattttgaaaatattgagttaattttttcttcaatactatgtctttaatcttttcaatggtctaatgtcctgattcttttttattgattctttcagccattcttaaaatcaggcacaatatggtgttctgacttttgttgctcaattacctttttttctattttcccaacattctgatgggtgcttctgtttattgtagacccagaa

SEQ ID NO: 13155 - DNA, 1537 bp, Vitis vinifera
  Intron number 9 from transcript GSVIVT01012939001 (locus G SVIVG01012939001) derived from phytozome v7.0 (chr-ID chr1 7; pos 13895660 to 13897196 reverse strand)
cctgtccgtaagagttgttctctagttgaggttgtgctttataaatgcacttataaagctgtattttatctaattatttgcttgtaaatgccttttgtttatagattttgcatttagagtccatttgagagtgattcttggagggttaaaagtgcttcctaatccttggaagagcttttcttacaaaagttaggcatttaataaagttacaagaatcacgtctaaaaatatagagaatcacttggaagtaatttttggattagcacttggtagataattttttcccccctcagattatgtttttgttatcctaccagcaaaaacattttcaaaatatttctttgtttataaacaatgctccataaaagtgtttctgatggaagtgttacatggaaaaggtacgataggttaaaaacgttttcatggaaatcacttcaaaacatgtcatgctttgtagggttgtagttcatggaaaaataataaatatccttgcaccagtagtatctatttgtaggccttccttctcccaatgttatcattctaaattatctttctagtcacttgagacctggcttggatggcaaaggggttcaggtggggatgaggaggttctagcctcaattccatgttgttcccaaaagtaaagtttacccatcaaataatttatcactcttagcatttgcatatgaattctctactagataacacaaagaataggaatgttgcccaatgtttcccttttaacagcagcattgacggtgtttgccaacttcaactcttcatagatgaagcagatttgagaaagggttgtagctgctgtttgtggcccaaatatgccactctcatatgccacctctgatcccaaaaagtgaacctctttgtaggtagactcctggccatgtttggaaccttggaatggggaatgggaaggggaatgggaatgggaatgagaaatcgattcctttgttaaggagtatgatatgcatattgaatccttatcttgcaagcttaagcttttaggaaaattggttgttcaacatgatatcagagcgtggtttgacggaaggtctaatgctcgagctgtctctctacaatttgcatttccccatttgtcttgttatccatgaatccaaatttatagttatttgcttatgtatctttcccctttgtttatttggtatcttttcccctaatttgtaattctatggtatcttttcacgtatgggaaggagaccgcatgtgagggagggtgttaaggagtatgatatgcatattgaatccaaatccagcatcctttcctatttattaatgtttttgaattgttttttagagtcagaacaagaataaaaaattcattattttggaatccaagtccccattctcattctccgacttggtggcactttttagtattggtgccaaggaaaaggcattttgggtatcatagaaaaacacaaatataggaatgttaaagagttgggtatgtttgtgaagtaattatgagtaatgtaaatgaaattcgcaggtccaagaagct

SEQ ID NO: 13156 - DNA, 10047 bp, Vitis vinifera
  Intron number 3 from transcript GSVIVT01038121001 (locus G SVIVG01038121001) derived from phytozome v7.0 (chr-ID chr5 ; pos 23639201 to 23649247)
tccggccaccaagaagcattcgaagttctatataagttttttttaggccatcttttccctttctgtatttttctcacggccttctctctctcccacccattttttctttggtttcctttctcttcatccaaacactctttttcttccttcttcttcatcttcttttcctttctccatttctttcccattttcttacttcttcctcacttgaggttgttctgttgtcacaactcctctaatgccaccatgggctagctagtaacgtccacatcgtgctgccttgatgtcgaagtttctcaccacaacaactcttcatcgacatcaaagtcactcctctcaatgtatcgctctttcatccttaatcttaccatgggccctcatcatgctcctttgtcgtcaacaaccatcttctatgtcggggatgccactgtttctcttaccactgccatgagaatcatgtcatagtgatttatgatcatagatctcagatctcctcgatctattttggtatttttcatgttttatgattttggcatgtttgataggtgagaaaatttgttttgtaattattttgggttttttttttttgttcaaaatcccttagtgatagtgagcaaaaaaggtaaaattcctcaaagttacttggatcattcacattctttaagcctaagtagttactggtgtttgcttgttcaagataatgagtttcacattgtaatttgagattccttactcttagtttgtttgtacatcgaatgcatggaaatgggttttgattgagaatgaaaaaaatggaacatttcatgggtaataacatgtaaggtaactagatagtttataatattctaatatattctcaaataacatgttccaaattttactattgttctttctttactatttttaattcttaatgatttgtgaatgtaattacatgaaagttgtatattctacagatgacaagaatcaagacaatgttctgtatattctatttctgattcacatgggaggtattttaaacattgcatttcatttaatttgttggattttattccctacaatcatttatgtcttttatgaaactataggataaacaattcaattaattaatgtctgattttctcaagcagagtgtgtgtgctcttgatttagacttttgccaaaagtttagtttggttggggaattcttaaaaatgatatcttgaatatagatattttaatttaagaacgaaagcagaaactagtgaagggtcgacttgaatgaaactactcttgataaaaacatgggagaatgagtccattcatcataaagtggaccttgtttatagtgttgtaaattctgatcaaatttctatttgagatgtctttgggacatcatgatctttgtcatcctacatcaacgaacatggagcaagtcttgcttgaaattacgtttcatgttagtttgttttgttttgtcttgctccatgcaagttctacttttaattggagaagcttctaatttatctctccaatcacttttacccaccagttaggacactatcaagtttttccttaattttatattaaatcctccaaatgaaaatggttaactgttcttttgatgactgtaaattatttagttttactgctttaagaaaagtagttctttgctatatcattcttctaactttgcagcaaatttaggtggttggttccaccttttattttgttgtagtttgaatttaggatggttccatatgttgaatattatggacaatagaatctccattaaagcaattgtaaagcatatatttgaaaatctttatataatggatgtgaattgtctatgctttatcatgattactaactgatattctaatcttatatcattatctttttttttttcaagtcatcaacaattttcttgatcttgacaaggtagaacttaagaacatgagagcatggtcaggtgcttattttgattggggaaagttaatatcaagattgtcaattcaatgctctctatttttttttttttttttatcacttttaatgaataacataatctatgtttttagggaacccaaatttatatcaaatctgcttatgtaaacatattaactatcaaaaagatgtatttatacgcaatgattctattagaatataagaattataaaaaataaaaaatagaaaaaggattaagaaaattaacaagctatcaagagggttgcattttaatatttttaactattttttcataaatttcatgtctataatattattaaaattagatggttaattatgtagtaatgaatttcttcaatgaatataaactaagagtggaaatacctataaaataaataaataaactaagagtggaaataggtaagacaatgaagaaaaatatggatttttgaaaccaaaaacaagttttgaactaaattataatctacttgtggaaacaaaaaatgatctaccatgaaaacaattaacaaaacattaaaagttagtttaaactttaaagagttagcattaaaagcataggtctttaacactatagttttttttttcatgtgtcatatgcaatgtttttagaaccggaccagtcattgaataggaaaagttaccgattcacggttcactggccggaccgacggtcaaaccgcggtcgaactggtgacatcataaatatataatttataaattattaaaatttaaaaataattataaaaataaaaataataatttatatattatttaaaaattaaaattttatttaaaaatcataaatttatttaaaattgtaatgtttttattaatttaaattaaaatcataagttttaaatctgaagtaaaataataataaatataaaaaataaaaataaataaataataatgagatcactaagatgtggtaaaaaataattaacatatatatatatatatatatagaagaaatggagaagaggggggttgcagtggggtcgttgggaggaagggtttcagtagcacggcgtgggagaggggggttggcttttccggcactagggtgggttccgacgagcaaatcttccctcccgcctttctgaaatgtcgtcgtatctaccagaatcattggttgagccccaacttcttcgcattcttcctcgcgattgtgagctccacggctttcgtgggagagatgctctgcaactcagttgggttcgactagttggcgtgttcggcggctacggagctcgaaatgggttctggtgggcaaaaagagaaggttttccagcgcgagggttatagcaggaagaggaaagtgcaggggctggggggttctagcagggtcacgaggtcttgccggcgaggacgatgatagtgggaggaaaaaaaataaaagaagttgaaccggacgatttggagaaaaccatctggttcatccggtttagccggtccaattccggcctaaccacttttcggtccaattggtcggaccgaacaggaatcgtggtcgggtggcagttggaccagtaggaccggctagtccggtccagtttttaaaaccatggtcatatgtgtgaattctttgctatgttgctcttacttcctcttttgataaacttaataattgtaaatcaggatgtcttccatggagtttaaatattcattgttttttacattgaatttaaagttacaaagtcaattcaattacaattagtgatatggaaggtcaataggtgtattcattgtatttatcttttctgatattaaagataaataggtgtattctcctatgatttttttttttttttttggtatttgttgcttatgtttctattaatgttgtgtttatcctactaggtatccaagaaatataccaagaagaagacaatggtgaagaaataaagaccacatcttacgaagataacgttgtacttttcaattgaagtttgtatattatcttaattgaatgtttttaactaggttttgtttgtatataaaattaaatagagagtaacttaaaaaagatttacgaaattgtctttttaatattcaaatgtatatgtaataattttttttttttttttgccttgaatagtagtttcttaacattattctaggacttgattgtaatgatcataattaaaaggtaccaaatttaatttagagatatgtttcatatggtaataggttcattttccattaaaaaactaaaattataataaaataatattaaaattttcataatcaaccttggctaatgggtcatgcccaatgttgccatgtgtagtagcaattataagatgtgatatcaaacattgacatatataagtcaattatgatatgtataaaatctaacattgacatatgtatctataaaccttgatatatgtggggttaatcatgacatatatgatacctaaccttgacatttgttagactaatcttaacataaaagtgagttaaccttgacataagattaagtaatcttgacataattgaatccaatcttaacagatatgaaagaaacattaacatatcacatactaataagatttcatcatttgtaaaaatagagaaaattttaacatatgtatatgtcaaagttacctttaaacttttcttgacattggcatagaggacatatatgacaataacccaccttgacagatataccttatattaatagtgaaaaactatcaatgaaggcttcttttcttttgtagtgatcgtatctaaacactaaccactatttgtgactaattttagtagtaaggaattgactaaattttatgattcccataactgtattaataaaagctcatctcgtccactagatgccttcatggttaggatgttaatctatggtttgaacttttggaaggaacatttgatagaagtagtttagctcataacttaacactatcagcttttccatctagacttatcccaacacaacaaaatggtgaatgtgtgtgtaaaagagagagacggagagagagagagagaccatagaagttttggaagaaacatttgattgaagtagtttagctgataacctaacactatcaacttttccatctagacttatcccaacacaacaaaatggtgtatgtgtgtgtaaaagagagagagatagagagagagagagatggacataggacattatcgtaaacctatatagaaatgtgtgtgaattacgttaacaaaaaaggggccaaaaaaaaaaaaaggaaacacactgaaggggaaaaaatctgtgtattacattaacaacaaacctttccattcctcccaaaaaaggaaacatgcatagagagagagagaatcaaaacaaaaaaataaagtacagagtgcagttagaaaaacaatataaaaatggattataatttgttagagaaatggatagtaaagatgtcatttgttatacctctgacacaggtcattctttaattgaatcatagactatctagtgaacatagtttcagatatttaagtcaaatgaaacaatttagtggtatctcaatttcttaaaatcattatgggaggtggtgatgatggtggtggtggaggtaagggtctccaacgggccgggccagaggagtaaggcccatggcccagccctgggctggccacttagcctgttgactggtcaacgggctggccaggccaggcccttagtaaatctaaggcccgtggcctaacctgtgggccctcaagctgggcgggcttggcgagcgggctgggcgggcttgggtgggtattgggtaaaaattaaaatacttttgagttttgaaaggaaagggattcgaaccctttcccttatggatccataagcattcaaggagagctagccaccaactgagctgaccctcttttgtgtaactattttgcattagttatatatatattagaaatgttgtatgatttttgaaaaaaaataaaagtgagttggttgttcaacggtcacatgaccgttgaacatgctactcataattcataaatatccaatatatgaccgttgaacagtcttgacatttaaaaaaaaataaattaaatcctaatatttaaatccctataaatattaaataccctcaatttttttctattctctcaactcttaagctctctcccattccacaatatttccaattattgcattttgtctcaaattattcaatattattggtggtgaaaaacaagtattagtggttcaaagagttcaaatttgaagaaatttctgcttcggttctccaatttagtaacatacttcaccttttcttttattcatttgttacatttttattttacatttattatttttagcataatattttatcaataattataattatggcaagtggttcttgttcttcatctaatgcatgtgatagcaaaaaatttacttcaaatatatggaattttttttatacaatagaaataaatttagaaaataataaaaaagaaataaaagcaaaatgtaaaatttgtaacaaacttcttagtggtggctcaaatgtaggtacaagtcatttaaaaaggcatcatgaaaattgtaaaactaaaaataatgtacatattagaaattatatgcaattaggtaaagatgaaagcggaaatttaaaaacattttcttatgatgaatcttattgtcatgaagaaatgattggttatataataagagcagaacaacctttcaatttcatggaaactcatgattatacgggaacaatgcaacgagctgttaatcctcagtttcaaggttgctctggaaatacagttaaaagaattcttataaaaaattttgaaacacaaaaagaaaatttaaaaattttttttgcaaattttgaaggaaaaaattgtttaacatctgatatttggacatctttaactcacagtggttttttatgtataactgctcattttattgataatgaatggaaattaaataaaggaattatttcatttaaaataataaatgctccacataatggtaaaaatatagcatctttaataaatgatgaaattatagattttggcattcgtgataaaatatttacaataacattagataatgcttctaataatgacgcagcagtatctagattaaaacgatattggcaaataaaagaaaatcaatgtaaaatatttcatgtgtgttgttgtgcatatattttaaatttaattgtaaaagatggattaaaacacgttgatgatacattataaaaaattagaggcattgttgcgggtcttaatagttctcaagcaaaacatgaattatttttttattgttgcaaaatgttaaatatgaaaaaaagaaatataaatttggatatgcccactagatggaattccacttacaaacttttacaaactattacaaaatatagaaaagtagtagaactatatgaaatacaattaattaacaatgattgtgaagcagatattgatgtattaaatgattatgattggcatattgcagatcttttaagagatctttttgaagtatttgatacttcaacaaaaaaattttgtggtgtatattatccatcttcaaaccgatttgtcatgcaaataactaatatttttattgtacttcaaaaatatttaaatttggatatatttaatgatgcaatatttgcaatgatagaaaaatttagaaaatattggggagaaatacctttaattttttatcttggtttaattgtggaccctagattgaaatttgaaacttttgatgaatggttaacaattatttattttaatgaccaaataaaaattgaagaaattaaaaatgaaataaattcattattatataatttatataactattataaagaaaaatatggtgatgatattagttctattaaattaccacctacatctacaagttcttcatctttttataaaggagctctagaaatgttaaaaagtcgaaagaaggcaacaaatagttctctaaacaacacaactgatttaaatagatatcttaatattgatttaatttcatttgaagatgatgaagattttgatattttaatatggtgaaaatcacaacaacacaaatatcttgtgctttctatcattgctcgtgatgtactaacaattcctgtgagtacagttgcatcagaaactgcttttagtgcaggtagaagagtagttagtgataaacgatgcagcttagtgccggattctattgaagcaaatatgtgtgaaagactgggcaatagcagataaaaggatatttaattctattcaagaagaaaatatgattgtcgatatggaaaaactaaaatcatcaagatcttcatggatttgcgatagtttgtcatcaccgccaagagataatgattaaaatattttactaaatgtatgtcatatttttatttttatttttgtggttaaaaagtacaaataattgacaaataagtaggtgccaacctggttgggatgtatttattttgtagtgatgtaaacttttcccacattttcaaatgtaatgtatacattcaatgaataaaatagttagtaatgaatatttttattaatatagcattttctatttcttgaatatttatatatatatatatatatattttaagtggcgggccagcccgcttggcctaaattggggcccatggcccggcccatccaaaaatgggctcagaccaggctcgggcctatcgagcttgggccgggctttagcccactaggccgggccgggccgtgggccgcgggctttttggagacccttaggtggaggtgatggtaatggtgaatatgatgggttggtgatgataggagcagtatgtaggcagtgatcgaggcggcttccagttgtagcattcatggtgggtgggtggtgcagtggtggcaaccacaacgcttgtgttgtgttagtctaagggaatgtccattttcttactaaagtaattacccaagatctcactcatatatcactcacatattaattatcaatctagacactagtttgatcgcttcttaagattgagaacatgtgtgacataatagcttggagatatggtatatctacttgttatattcaatgtagttaactttagttatagtaattaaatacaaaaataaataaatttaaaaaaaaatattaatattttaaaataaaaattattgttatatataaacatgtattttatattctttaacatatcggaactaaatatattatatccttttatctatatcaatattttgttaaaataactttattaatgtatgtattattgttttttctatcattttttgagttttttctaatatttctatgagtttttttattaattttcacccgttgatattttgtattaaaatattcacctatatttcccgatatattatatctataaaatcaagttactaatatatctatcaaaactgttattttcatccttgatccaaaccatgtataatgttcgtgattaggctaaatactcataaagacaatgttgaattgaatcatacatacataaaatgtacactaaataaattgaataatcaattttatttatttgtctcaaaattaaataaatttcatcaaaacttctcttatcctttttaatagttaatttcattcatctcccctttgactcaaagtaaggaaggtttttgacaaaatttcaaactaatgaaggttagatgtgtataaccaaaccttagaagaggttaatgaaattaacccactaatcaatttttcttatttgacttaatgtatatcataaccatctaatatagatctgcaatatgctagttttgtttttgtttaagctattagcttaagtattagtggtcttgatatatattaattagtacatgttttacttccttacacttacatgttgaaaacaagtacttaaataaagagcttgagttgcctaacaagtgagatcattacaagtacaaacaccaagttgatgacaatatacatggaaaccaatgaggtgggcaatatattgagttctagagctagtgatttattgaataattgctaaaaaaaaccttaaccaacaatatcatggacatttttcttctaaaatccttagt

SEQ ID NO: 13157 - DNA, 4074 bp, Vitis vinifera
  Intron number 18 from transcript GSVIVT01021163001 (locus GSVIVG01021163001) derived from phytozome v7.0 (chr-ID chr 10; pos 2076993 to 2081066)
agatttgctgctgctgaggttgtttatttcattctgaatttaattattgatttattacaaggtttatgtttatagtgtatttttgtaacttctgccctttgattataccatagtaaattcagcacactgtacttgagttgtattttgtgaatcagaatatgatatgttatatcaatgttagcttggatagatgcatccaaatagaaacagcctgaagttgaggcaatatttcatatctatgtatgattttcattttgatattgtgaaaacccactagccctggttcacaggaccagggaaaaccacagatacaaccattctccccctagatatatagtggataaacttgggactcgaacctgtcccagtttgcatggccaaggaaaaccgcagatgcacaaaccttccccttagaaccatgtaaaggtaagccggtggcttgaacctgagacttaccatttagtggtgaatgcatctatcagtgtggaatgtcaaggtcaggatgatcttgtgttcaattctttactactgtggacacttatctgagaaaaaaaaaaatctttacttctgtagatcttgcaaggaagtgaaaaagattggtcaactttagaatgagaatattctttgaacctgagctctttgcattgcttttatattattacatgttttaatcaatcttgtagcattatgtttaatcttaaaaggacagatttttccatgaagtagttatgcttctcaaaggaccgagtttaacctgaatttgaagttccaaattcttatttgcattcctgtgaacttgtactttcatcagtttagatgaattagttagacttatggactactgatagtgtatccttaaggtttaggacatttctctttgagtaagatgctttaacatttacttgaaacttcctatttaactttaccatcctcatatttttctgatgacaaaattctctttgttgcattcacagtatggcaattttttcatacagataagatggggcagaaatctgcacagcaagtattttcattcaaaaaggttttggctgggccatttcttaggtcccatcaatctgtatttgcatcagttttactttagacatcttttacatctctagttcccttgaagttgtgatttatagtatggaagcctatcaaaaccaactgctcaatggagcagcattttgtgcaagaaatgtccttgtccaaatggcaagagtgaatgaggtgatgattgttcaaggtggacaagtagagagataagaaaatgtagggtaaaagtgcaatgtaaaacttgggagcaattcgacatgtgataaggaagcacaaattgagttgtcttgtcacacctggatctatgattacccagtggagcaaggttggtgagttgaagttcgtagagtgaggaaagttaggaacaagagatactggatagaactagtgatcatgcttaattagagatattgcataggaaccacttggcaatctaaaataattagaagggagttgttttttgaagagacaagatgatgtataagggatcgatgaaaggttttgaagatgttgagaaggaatccaagcctcatttggtggagtgaggagcaaaattccattttggcatggggaatgtcccttgagcatgtggtctctgactttgtgaagtatagccctatggaaaaatgtgtgagccctccactggaagggtgagatatgcactagaatctgagtctttatttggaaggtcacttgggagaaaatcctaacaatggatcagctgaggaaaagtggatggttgaccatgacattgacctttttatttttcagcttaataggcaagaaaaatattactaacagcaagcattgaccagtcaaattctgattcactgtggttggttttctagtttggagtgtcttggatggtaccctgtttgtttaagatttgttgctaggatagcatggtggttttgtggacaggaatcacaaggaagcatggaatttatctcctctttgtttctattgaataatttgggagggcagaaatataagagtttttgaaggggtacagcaactgaagcaatgatgatagttttttcccttaagacgcagcttctatgggatggtgactaggaggaaactaatggattttgtagatagcttggccttgagttagtctaggtttttactttctttaaaaattttagggtctatttggtaactgatcgaaaacaattctaaaaaatagttttttacaacagttttgaaaaactattatatgatttttgtagaataaaagtttgtttggaaacctaaactgctcttaacctatttttaatatttttaaatatgttttaaaaataatttttaactagtgttttatttttagttattttacatgtttgtataattattttttaaaatagtcctaaaaaaacaagtgaaaataactaaaagatgttatctaaaaacatcatattttatgtttttaagaatagaaaatagaaaacagtttttaattgtcaaatatgttttgtcttttttgttctagagaatagaaaactgttctaaaaaataatttccaaacagacccttattttctctttttaattttgttttgtttgtggtatgctttgtctactatgggtgtattgggctgcaccccctttcttattacatgccttgttaatgaaattttattcgccaattaaacaaaaatgatgctttaatgagaatcttttccttgtgcgagctaagatggtgagttgttttggtgaaggcagtgtagtgtctattgtaccatcagaggtcaccttttatactctctaatgaataggatatttccaatgcatcattattgtatgggtgttgggtatgatacatgtcttggtgtcaaatcctttggatcccaaaatcctaggatacaagaatttagttaaaaagagatcttaactatgagtgtaggtacttggatattgcattaatgaaaaataattaacactaaacataagtacagtaaaacaagtataagttatttagtgtttattacaatttattttgtactattatatgatataattaaaaaataaaaataaagagtgaatagtgtattcaatgtgatataaggataactaccaaaaaaagaaaaaaaaaaaagaaagataaagaagtcagtagctaaatagttgtatctgatgtagtataagcctatccaacttggatttaacattcctacttgtggcgtttcgtatcaacatgggtattttggctaaaattgatgtgttcgtgtatcacacgagtgaagagtcatttcttgagtgtgcctttttcttttttcttatttgttttttctatatgtcatttttctccttatggggcaggagttggtggttgcctggctcagaacaacttttttctctactacctttttattttttattttttatttggtgttgcaccactataaatcatcctttcctcaagtgaagtatttgccctagttctattactccaaatgcctttcactggcttatggtgaaccaactaaactgaagggttgtccaattgatcaacagccatgttatgtgcattgcttttgagaagtgggacctttctagaaggctaactgtcctactttcctcctgtgagattatatatatgcttttggtttggctgtcttttgttttttcagcaccttcactaagtgcttgctagctgttgaactaaagttcttggtggtaccgattctatgtaatttctttttactgctttgttgttttctctgaaaggaaatgaatgcccaaattttttaccattgaatgtggaggaaagttgagggcatgtgattttctagtttttcctcttccaacctttggttttctcagaaggaaaatttgaataacaaccgagcagtgttattttctcctaatggatgtttcttttccatctttcttgtttctagccagtttctatgacacttctgtttcttttttgaatctatttgtttatttatctatttttggcacaagttgttgagttttatgcttactcagattttatgaactatgcagggtgacc

SEQ ID NO: 13158 - DNA, 2591 bp, Vitis vinifera
  Intron number 17 from transcript GSVIVT01038555001 (locus GSVIVG01038555001) derived from phytozome v7.0 (chr-ID chr 16; pos 21883943 to 21886533)
ggagactcggtcgtttacttccagacgctcgttgggtaagttagtacaattttcctttatgagttaatgaatgagagttattctttgtagtttgtactaaaaaagaatgggaaccaccatttttccatttagtgcaaaatgtaattctagtcgcttataatgtgtgaactgtgaagttccataatcaacaataaggatgtaggtacaaacaacattgaaataagatgttctaattatcataagttacattgttctagaacataaactacacattgtgccaaagatatgtgcaacatgcttgttgtgataatttgaggttaataaatgtattaaataataattttataatcttaaattgtgaataaaggccttgtttggtagatgttttctagaacaaatgtttatttgatctgaaatatttctaatctgttttatatgttttttaaatatgttttaaaaataatttttatatatagtgttttatttttaataattctccatatttgtataattattgtttaaaataacctttagcaaagtagtgaaaacaattaaaagatgttctctaaaaacaccatgttttctattatcttgttgtcaaacatattttcttatttttttgttctggagattcgaaaattatctttaaaaatagttaccaaacttcttggaagtaagactaatcgattatttttttgttgtttatcacatcaaaacacaatatataacctaattcactattataaagtggtttgtacttgatcaaaaatggttttaatacaaaccacccaagtattgtggtttttaggtgtcgtccactaggatgtattattctcagtaattaaggcttgaatgagaggagaagaaataattgcgatcaagtgaaattgatttgacaatttatggtgaaacatcaaaataacaatggtttctaattgaggaaaacaataaaatgtaaaataaaagaaaattaataggaaataaaattctcggagttaggattttctagaaaacaatctctatgatgaatagatgttgagatatatttttcataaagttagattgaaaatctacattctcatctaaaccgatttttgatttagctttaggtcttgatctaatttatcttcaaattaggttatttaatccaagagattaatttgaatcatatattcaattcatcttaaattatcttctaatgattcacacaatgcaactattcaatctcatcaaatctagctttaagaatttaatgaatctatgttgtttgcattgtagtagccatcaaagacaatttgaagagaaaaatccccaaaattcaattaatcaatcaattggatcaaattacctttgcagttaaagctcatttctctaatttaccatagattttgcctctagatcctcatttcttcgagaacaacgagatttagacactcatgcttggagatttgatctcacaaggcatgtttggctagtgagaaagtgaaggaaaatgaaagaaaatagaaaattctattaagagagaaaatctagaaaattctacaatttgaagtgtccaaaggctgacatgagaaatttaagtttctatttatagaccaaggtaaagtggacacttggcaatctctcattggtcttctagaattttccaaattcacaaatttggaatttagcatcaaactcatgatttcacatgagcttcaaccatttcgcatgaaaactgtcatttttgcacggtcatgtgaaattcagtggaacaacaacaacattagagagctttttggaccatttcgcatgactatgcaaaatttttgcatattcatgtgaaatcaacttacgcatcttccttggcttgcagtcgattttcctcctctggtccatttcgtacaatcatgcgaaattttcgtatgattatacgaatctgcaacatattggtttttgagctcctcttggtcattttttcaattttcttattttgactacaagttagccacctccaataagcccaaatctcagtccaaaccaattgcattacttcttttattatgcatttggataatcatcaacattatttgttctcttcaatttgattcatctcttttgtcatcaatttatcaaaatcataccttgaaatgactccataacttcataaaacttgttagtaacttttgcaagggtaacaacatgttaattgagtgttttaggcataattactactcaaaatatgtgaaactcatgagaattattatctaaaatatgctatttttgagttgtaatcaaagactttgttggatcaaagaatttctcattttagggatgcattgaggaagacagtatgactttgttgtggacatgaaaatgcaattgctttgtgattggcctgcctttaagaatgtgcttaaacataatgatttctccttaggttaccacaaagaaagaaacataaaaatcaatatattcagtataatttggaattcaatttacatttttctgcatctagtttttgtatgcttttactacatcaatgtgctaggtgattaacaactacgagtaatgttgtcattcctattttactacagtcactacttcctttc

SEQ ID NO: 13159 - DNA, 5951 bp, Vitis vinifera
  Intron number 3 from transcript GSVIVT01023189001 (locus G SVIVG01023189001) derived from phytozome v7.0 (chr-ID chr1 2; pos 21365166 to 21371116 reverse strand)
aaactgtaagtgttctcatttactgatattcgatatattttacatctaaccaaagctagaacaatcaaacgagaaaaaaaaattattataaattttccttaactctttcattatattttgttctctatcttctttccctcaaacattctgggaatcaaacattacttgcagattccattataggctttttgttcttaccaattcacccgatttggtcaatttgcaacctttttatagaatccaaacataaaaaggataattttttttcaatatttcttttccttttctcaatgctttctagaaatcaaacataacttaaaaaaaaaaaacacccttaaatacaactgaagccactatatcaattgtaaatagtagaaaatactaagcaaaagatggactagaaaaaaaaaatttgttctagcagtagttgacacattgattagccagagccttgaactgacatgcttattgtctttttaagttgactacaaaacctctccatttaaggtcttttaatccaacatcttcatctaaaaaaattaaaataataggtaaacataaaacagtcaacaaatatatcataaatggatgtggaatcataatttatgtggaatcatattaactatatatctaaaaatatgtttgtgtgactatcatcattataaaagcagtaacaaattatatgaatctaataataagaaaacaagtaggtaatatttaacaaatgttgatagattaatccaagcctatatattgggttccctcacaacaaacaatctatggaaaattagtattctgaaataaaaaatcagcagaaaatcaacatccaatagagtaggtgtctccacttgcaataggtgaatttggaagagaaactggataatactttattaaaaaattgagtttacatccagagcttaaataaatgaagcaatccctaaatttatcaactaaccaacctacaaaatatcatccgataatctctctaattcaaaccagaaataaaatcaaatttaaacacattaagacttatctaaactagacaacccagaataataggactcaatcaaaccttatcttctggttttgttttaaattcatactcctaaaaaacttagggtttcaacattcctcaaactaaggaattaatattgatcatttctagtttgcttataagaaaattgaaatgttatcttggtagagctcttgtaagaatgtttgcagtggtaagcatgtactacagtaaaaactctccattgtcaactttctccttaatggaatgttggtttatttccacatgcttggttttgtcatgatgaaccgaattatggatggctatttgattatcacaaaacaatttcatcgaaaactcatttgaaatcttcaactccttcatcacacattttagccatagtccttcacatacaccaagtgcaatagcctgaaacttagcttctccactacttcgagctactatggattgctttttacttctctaagtgaccaaattcccatacgtaggtatagtagtttgaggtggaacttctatcattcacggaatctactcaatttatgtcagaatatacttcgattccttttctagtactttagccaaaaaaaaaaacccctttccaagtgtcattttcaagtattgaagaattatgtgaactacactaagatgttcttcaatgggattgtgcatgaactgaataaccacacgaataggaaagtctatgtctggcctattatgggataaataaatcaacttcccaacaagtctctagtattgacctttgtcaataaaagggctttcttcttcatcattaagcttgccattctcctccataggtgtgtccactagtctacatccaaccatactagtttccttcagaagatcaaggacatgtttccattgagagactaatattccactttgaaattcgagccacctcactgccaaggaagtacctaagagctcccaagtccttgatttcaaattctcgagggaaggcgtttttcaaatctatcacttctgtttcatcatcaattgtaagaattatgttatcaacatagatgataagaatgatgatcttcctatctgatgaatgtttaaaaaacatcatctggtccgattgttcctaactgtacctaactttcttaacaattgcattaaaacattcaaaccagaccctaggtgattgttttaggccatatagagatttctttaacttgcacacttgattcttttttgagcgtctttgaatcctggtggaatatccatgtaaacttcttcattgagatcaccattaagaaatgcattttttatatctaattgatgaagaggtcaatcattgttgattgcaatggagagtagaacttggacaatgttaagtttcacaattggagcaaatgtttcctaataatctattccatacgtttgcgtaaatcccacgcaaaccccttagccaccaatcttgccttgacatatatttcacattgaaagccaccaatcttgccttgtatctgtcaatattcccatcaactttatatttcacattgaaaatccacttgcatcctacagtagattttcccaaaggcaattcggtctattcctaggttccatttttcctaagagctttaatctcatcgtgtgatgctgtcttccaatttagttcttgtaatgcctcatgaacatccttgggtatatcacttttagaaagattagtagtaaatgctcgaaattgtggagataatctttcagaggaaacaaaatcagcagtgggatgtgtggtacacaatctaacccctttccaaaatgcaataggaacatccaaatcatttaatatagtcagattagtatcaattagtgtgttacctaaattttggtatcaaagcctaagatctaaacttaaatatggtgaaaactgcaatggttggcgaacatccaacaagatctttggaggtgatctccgattctgctcttgtcaatttcggtagtaatggtggttttgagaattttgttcaccacaaattaaatggaaaaaattatctccaatggtctcaattagtaataatgtatatatgtgggagaggcaaagatgattacatcacaggcttgaagacaaccctgacaaagaacgatgcatcttataaaacttggttttttaagaacaatatgattttgtcttgacttactaattccatggagacgaaagtaggccagacattcctattctataagatagcaaaagaaatctaggatgcaaccaaggagattttttcgaatagcaaaaatgcagcaaagatgttcaaaatcaaacgccaacttctagagttatggaaaaggaactttagtgtgacctaatactctagcattctcttccaatattggcaaaaactgaacgtgttcaaataattggaatgagattgcactagtgatagcctcaattattagaaaattgtggcaaaataaaggatcttcacattcttggtggttggactcaacaagaatctcaatgaagtccgagaaagggttcttaacacctaaccacacccattactcgaagaagtgtgttttgaagtttggtaagaagagagacgaaagaatgtcatgataacggatcacacctcgtcattgtcctttctaagcaaggacggatcagcctagccaccaagggaccaaattctcaacactttgattcatgaagaagatccaataggtcatgatgtgatcattgtcattcagttggtaacacttgagaaacttgttggaaaattcatgggaagccgcccaattggaaaagtaacaaaacatatgaaaatggacctcgaggttatcgtgctaccaatgatgaaccaccacaatccaataacttagccaacaaaactcctttcaaccaagaacagatggagctactttagaaactcctcacatgtgatccttcaagtacctccactataggatcaggttccatggcctagaaaggtatatgttctagagccttgaatgctttctcaaagtcaaacccatggattatcgacttcggtgtatccgatctcacatgacctttgatataactctctttcactcttatcaaccttgttttgagagttataaaattaaaattgctgatggttttttctcaccagtggccggtaaagggagtgtcattcttccgaatagctttagattgctctttattcttcatgttcccgaatagctttagattgctttttattcttcatgttcccaagcctacgtgtaacctgctctctataggcaaagtcactaaagatctaataccatattgaatttggaagagaaactagataatactttattaaaaaatttggtttacatcaagaacttaaataaacaaagcaatccctgaatttagcaactaaccaatcgtactcgaatattctctctaattcaaattagaaataaaatcaaatttaaatacactaagactcatccaaaataaacaacctagaataatagaactcagtcaagccttatcttctgatgttattttaaattcaaactcctcaaaatctaggacttttccaaactaaacaacccagaataataagactcaatcaagtcttatcttctagttttattttatttgtttgactttataataattgaatttatatctagttcgttctactgctacattaaaaaggtttctggatattatatagttgagaaataggagattctggagcattgaaagactttgcaattcttagtctattttaactttacttgagtggttttatagaatataaaacttatgataacagataagaataagggaaagcctatcataaccaatagataaggatgaggatggagcttctcagagagagaaagagtccgagagagctctgatagagtttgagtttagagggactctctgtaactaattttgataagataggtcattttccacatacaaaaaagtcttcaacatgctccctcaagcgagaccgtggggattgaacaacagcaagcttgcctttacgaaagtggaattgagatatggataatgactttgtaaagatatcagcagtttgatcttctgttggcacatattttatccccagttcttttgcaattaccttatcttctcgataaaatgaacatcaatctcaatgtgttatgttcttgagtagaagattgggttagaagtaagttgtttaactccagtattgttacaccagagtgtagggcacctatttatctcaattcctaatttaaaaaatagagattgcaaccaaacaagttcagttatagcttaagtaagggcacaatattgtgattcagtgcttgagcgagatactgccttttattttctggagttccatgcaactaagtttccaccaagataaatagaataacctattgtagattttctatcatccaaggaactagcccaatttgcatcaacatacccttctagtgtcacttatgttgttggcgagaagagaggcccatagttaagagggtcatttaagtatctaaggatgcatttgcaagctttccagtgattaactgttggtgcctgcaaatattgactaagtttgtttacaacaaatgatatgtctagcctggttagagttaggtattgcaaagctccaatgatgctctaatatagagttggctgttcaaataaatcactatcagcaaggtgaatttttgttccttggcgcataggtgttgggttgcatttaacattcaacgtgttagccttgtacaatggatcaatcatatatttcttcagagatagattacatactttgttcgatgtgctttaaaacctaggacatagctcaatgatcccaaattcttcaaggcaatttcatcttcattgatcattccgagttatcaggacatcatcaacatataccaacaatacgagaattgcttttgtagaccggcgaat

SEQ ID NO: 13160 - DNA, 6266 bp, Vitis vinifera
  Intron number 6 from transcript GSVIVT01035575001 (locus G SVIVG01035575001) derived from phytozome v7.0 (chr-ID chr4 ; pos 2416095 to 2422360 reverse strand)
caaactcattagaaaggataaggtttgatacagtaatcagctttgctttttttgtatagtattgttggcttggttatcacatcacttgatctttagtttattaatgcactttattgtagtactaatgtttgttcattccttaacatcttttaaaagtttatttcattatagcggatatggctaatggctctagatagagctgaaatggaaataggattcatggagctacatcaaacaccaaactagaactttgtttaatctcattacttactggctaccaagatgcaattatgagattggaagtcattgtaacctcttctgatagctttctacaaacctgtctcaaatgcctctttgccagccttggaacactaaccgtcaaccaccaacaaccaactttctccacaaactttcctatagtgaccctcttctacaaattaacacaatcaactacacatatatacacccatcaccagtgaggtcttgcttagaatgaacattcttctcttatatatatatattttttgatagataaggaaaagttgtatataaagaaaagaggggacaccaaaaacagtgccctcaagagtatataggaagtattcaaaagaagccaaaagtcttaaaccagagagggagggatagaaacaaaaaacatcacctgcccttacttagagcctaaccaatcaatgaagcttacaagcgaaaaagggctcaaatctatagacaccctaacccaagaccataggttacatcatacatgaacattcttctcatatccaaaccacatttatcttttcggaacaccaattgcttaattaactaaattaatttttcctttttgaacccccattccactacaactaagctcactaaatcttttcaaacgtgttacaaacttgacatcccaaggatgatataaaatagattttcaatttggatagagtgctctttgaatgcatgactttgcctcccttaaaaaattattacattttccaagaggtaagcctcctcttgcaccatatctaaacagagtgctaatctactttgacctgaaagagggtgtttaaaggcaatcctagaaaatttggtggtggcttacctgccctagtaccaaggatagacactagaccttctagatcctctacttctccaactaagattagcttactttactccatcttaattttcaatttaaaaacagcctcaaaacaaaggaggatccacccaatatacaatgagtcgttattgtttggctcacaaaataagagggtgtaatcaataaataccacatatgaaatctctaaacccccgacctgaatcctagaaataaaataccccctccatttcttgaagctacaaagcaactcaaggccactatcaccaacctataagatagggagagaatggttcttcttgtttcctcttgaattttcaagaagtcctatcagcattccattaatcatcatagataatctaattgtggaaatatagaattttatccaattgaactacctctaaccaaatctcatcttgtccataacttataacaaaaattctctatttagatgattataagattttttatttattttttattttttttatatccaagttacacttgagctcagaagtttagagtttatagatttattagctattagaactgcatttagatcaacctccctttgaaattccaaaatcaccttatcaaaccctggatctctttctggcaagaatcgattgaagaagaataatgcacaccgttttgcttagtatgttgcccatttatgcacattcatgtttctagagctcaatgtggttggagatggtttgttctcctttattattatctttttcttgcaatttattattcttctggggtgagcttgacatatttttttgtgtgctaatgcttctctagccccttgagttgatagactaggagatagtaagaacaaatagagaagaaaaaggaaagagtaaaagattagacagattagagtttgtttctctctctcattattattaaattagtcatttgtgttggcagaagtacaagttacttcatagataaataggaagatgatattaatcataaacaccgtattcatccgatacttcccctatgagagtgttggatttagagtgtatgaacatgtattattaatatcattaaggaggaatatccttggtgattaaagcatctaaccaaagcaagtctttttcttcaaatcaaggtatgattttcaaaatacaatgatttatgaatgcattgaatatttactcataaaaaatgattgtattgaataataattattaataaattctaatcaccaagataagtcattacactatatggtaggtgatgcactacgacctttattgaatcgtctaaattatcgtgaacagcttatcgagttacaagaatcctatggtttgtgtcttttatataccctcatatacccaaaccaagttcaatgtaattgattaggtagaatgcttataaagacaatgctcaaataaattcaacattcataaaaaattttcaaaaataaattatattgatatagttaataacatttatttgtttcaaaagtcttactttctagggctgattctaacaggtggttcatagatatctgacatgctcaacttgcatagaataaacaaaaagaagagtttagtcatccaaatgaatttaacataaagaaagaatgtaatcatccaagggccaattagccatgtagtgttctcatggctgtgagaggagggaggtgctggttcgcaatggactcttaagtcttttgatctttctgtagaggtggtaggggaaaagctgagaggtgttattaaggaaagaggctgaggcttttctgcctggattaggtatggggatctgagcttacattgcttgttggaaggggtggaagcttgctatagagatgaagatttggtgaggtggagcaaaggacgggaggagggtgggaggaagttcaagttggaatgatgttcgaataagtcagggaggcttttattttgctttgttgtggctgaagtgatgaagagatttttgttgatctttccctaagggaagggtctacaaggggtattggcggagaagcttcatcatctaggagtcgtctcctcaatggaagttaggaaaatggtctaccctgcaaaggtaaggagtacatcaaaggagttgacagaagatgggactgttgcaaatctggtcaagaaagatttgggtgtgataggagaagcagtttggcttcagcctagggagagcgacgtgcaaattagggaggagcatttaagtcgatgcttggtcaggtggtttggaaaggtcttagacctgttactagggttaactttgatggaaaaactagggactaatttgtggtttttgcaaaagaggggggagggggggctttgggggagctttgcttttatttgattttgatgttagctctgaggcaaagatggttgcaagaggttcaagaaggcttagagagagagttttgcatatggtaaaatggacacccgaggttggttgtttgtgactaggggggtttgctaaggaagtgtgggtaagggttttgggtctcctttttcatttgtgaagtcggaggggtgtataagaaattaggagattgttatagtggttttgttgttgtggttgaagatatagctcttttgtctaatttacaataggttaaggatcttggtaaaatttgatgggagtgtcttgtctagttcgttgcaagagatgtggagggttctactcgtgccgacaaagggataggaattggtgtgcagcccttgcagtttgcaagcgttgaggtgttgttctttaacaggagagatatggtaattgaggttgcaaactgctatggtgcaactattggtagggggttgggttcccaaggtagaagcatgaggagtacaactggtgatggaagggtttgtttggacaagtccaaccttcaagttgaggacgtttgggctaagtttgaaacctaggccttgggctgccaggtattgggtgaggtccatgtcattggagggctgttttcttctaaggaccaggaacctagtagttctaaggctcttatggtttcaggtttcaatgtggaggctttaggccaggctcgagatttttgtgtgttgatgaggcccccttggctataactcttgaagtggggcgtgatttaagtttgggccaagcccaaggaaagtcaataagaagggagggccaacatttaaggttaattttgagaaagcaaaggacttgttagggcttcacaaagggagtggggttctcgctaggtctttagcgtatggtcgagggagttgcaaaggagtcggggttgagaggtgagagttctttctagggtcagtgatggtgagctctcgcattgcgatcaccgatgaagcacttgtggcggaggcgattaggcatccgcttcctctaccatttttattttttttggtagatgaagacaaattgaattgataaaacgccaaaatagggggcacaccctacgtatataggcagtgtacaaagaaagccaaaaacaagactgcaaaaagaaagaaaaaaactagagaggtaaaaagctagccatcatgccaatcacccaaaaattcagaaaatagggagagtctaaatccaaaaactgttgagaccactctagaagagtctaaaaaaagaggttcctcaagcagggtctgacatctcttcttcttagaatgttcttcgattttgctctccccagatacaccaaaaaggacaaataggcgccaatctccaaactgctctcctcttcttccctagccccttaactttccattacagaagcagatttctctttgaggctgggaacacccacaccagtccaaaagaagatagtagcaaagtccataactcccttgtcctgccacaatgaatcagaatgtggcccgccgattcctcattgtctttacaaaggttgcacctgttaatcatggaccaacccctcttcattaatatgtctactgttaaaatttttccccaaactgcttcccaagcaaaaaaaaaaagagttctaagaggggcatacaaaccccaaatctctttggctggaaataaaaggctattctcagcccttaaagacctctaagccgtagttgttggcctcttaggctgatgcttcatgatggcagcttactggagcttttgaagagtgttgtgaaggggcctcaaggaaggagttggtggtagagatgaggaaatggtttcccctttggacatggactccagatgtgttatggagggagaagatcgtggtagtcttccaagcgagtttgtcaagcttggtaacttcgtagggatgcttgtggtgggttttgaaagggagatcatttctcttctcaagaatttggaagcaagaaaaagtcgtggagttaagaatctaggggataagaggaaacctccttcatcctggtttgagagggagatatgaaaattagagagcacggtcaattataagaattatccgctcattgtaacgggaaaggagtggagaaatggggattaagggatgcaagttgtagatgggctcaagagcggcttttgtgcctggggcattttatgttgttgtttgttagggggtctttttctattgtgggttctcctgctagggtctatctggctcttctgggggtggatttctgttagggttgtgggtgtttggttttccttttcttttccttggcctaattgtatactttgtgtgtactttattgtgccattttgcaagtgcctttaatatattttcctgtttacctatcaaagaaaaaaaaaaaaaaaaaaaacaaaaacttaaacttgcctagaataacttgaaaaattttacttgtctgcccctagtggttgggacatcattttttggctctccctgataaaatgatggtccacctaatatttttcaatttgtcatgttaaaactggattatgagcaatgtcttggttgctcttcaaccaagtcaacctattacaccaaaatagggaaaagaaaacccgacgtgacctcccaatcataccagaaacttgaggagccttttagtgtctatattcattattgataacatgaaaacttttgtgtactgtaatttttatgcttaccttattcatttccagtcaaccaaagcttttgctagctatttctttaatttgcttggttttgatgcttagattattccattatttttgcagtcgtcat

SEQ ID NO: 13161 - DNA, 1919 bp, Vitis vinifera
  Intron number 2 from transcript GSVIVT01021392001 (locus G SVIVG01021392001) derived from phytozome v7.0 (chr-ID chr1 0; pos 4856083 to 4858001)
gacggtgcttcctcgcaatccccgtcttctttctttcttctattctcatttcattttcgtttcttcattcatgaaatccccatttcatattggattctaatattcactcttgccatcaatatgtgcttgcctttctctctctctcattatcaggttttcaaatgtttttcgtatgttgtatgtctgtgtttatgcctaaaccgagatttcaataactattctttggggtttgaattaatgataatggaaattagatcattccttcatgtttttttccactgtttgaatcaagttcatttttagtggagtttgccatccctctctcccagaggattggatcaatcccttgggctttatggtggcatatatatgagtctgtttgctattaataacattacccagaatgggaatagtattgtattctgagatgttgtatcatgggggtagctttatgttttttaattttttttttcataatttatttatttatttattttttattataggttctgtttatatatctggattggagtacaatagattagaagggttagaagatttttgcttatacagaatatttaaaatgtatttctttattttattaggttttagttcttaatttaaatagcttcttacaaaaggaaaattgaagtgatattaaactgtttggatctgagcaaatgtgagaagaagaataagagattggaaattgtggacacagagattggagattttaagaaggcataatttttaaataagtgtcattatgtttcagtttccttggtattttctactgcaaccaaattgctaatgaaagagagatattaaaatggattctgtttgagaattgaaatccaaacagagactaccaaataaaactttgcttctttatactcccctatgattaaatttagctttccagaaagaaatttatgccaaggagcttgaaccttttttttttttttccttttggtagtggctaaaatttgtcttcagatgctacgaaataaaaggaacctttagtttccatgggattttcgaagacaccatttctttgttcattgtcgccatagaagtatctctatttaaatgttgatggtcaatttaaagagttaccatgaactatatttattctattaatggctccctctcatggtatggtctaccttcaactcaacttctatttttataggattttcaaccatggcttctgtgaattttctgatccaaagatgttgcctgcttgaaatttctttgtcaaatgttctataaatgtgtgagcaaaatgggatcagttcatattgttcaatccaagctctggtttattcgacttctaaataagagggataactactatctagatgtttaagatagaaatttagatttaaattaaatcaatgacaacagaagttaattgaattgacaagttcttgctgtttgtgttgcttgtcaaagaagttttgttgtttgtgttgtcaagacatttttgattggtcttttttgtggcaacatggaatcaaagtccaaatgtgccaatttgaaggtttgttaattttttttttttaagatttaactctctacagtgtctccatgtgcggtactttgtgcctttctgtagagatatttttcaactaaggaactgcatattaatacacagcctattaatatttccttaatcatggtgtcatctttgcttcatactatacaccttttattgacacaaaacaactttagtttttcaagagctaatatggtgtgagtatttctacttcctctccctttcttgtaatttttttttccctattttgattctgtgcattaatccatctcctccaccttttgtgaaatttatttttgtgtaaagatgaacttttgtacttacagctccagtattcaagtaactaagatacttcacgacc

SEQ ID NO: 13162 - DNA, 10693 bp, Vitis vinifera
  Intron number 5 from transcript GSVIVT01000708001 (locus G SVIVG01000708001) derived from phytozome v7.0 (chr-ID chr7 ; pos 16450 to 27142 reverse strand)
tggcaaacatcaaaccgtacgtgccaaatgtcaagcgtgcagtggatcatttcttccctcatgtgggtgcaaagcccatactggacaaagtggcgaggagcttgagaatgagtgagggacaaatggaagcttctagaatgaccttgtataggtttgggaatacatcgagtagttcagtatggtatgagctagcttatgcagaggccaagggtaggatcaagaggggtgatcgtgtgtggcagattgcatatgggtctggctttaaatgtagtagtgcgttttggaaagccattaggaccattgatcgtgagaaaatgaatccttggagcgatgtgattgatgagtttccagtggtggacccgcatagcactgaaacatttccttatgcttttgagtcatcaaaatcaaagtgattatgatcatcagatctccatgggctgattactatttgcatgttgggcttcaggcccatgaataagaaataaagaatgagttattgcaattcatttaagtaattaacataatgttatatttgattatcaattttttaaaaaaatatttttaattcaaatttcatttttgtgggataagtccaacaaaattttacatggctaattctaaatcactctcaattttttgcaagataaaaagtaattttttttaaatgtaaaattgaaataggattgtttagaaaacaatagcatcgctattaattttttttttggatgttatagaaaatatatatttaattctatatttttataattccatttcatgataggttttaaaaatattttgattgaatttcttattttatttataatttttcttttttctactttctttctttctcatttccattctctttcttgaaaagctagtatacatatcatttattcaaacaccttcaataagatttgacttctaaatttagggcatgtcgagataggtgctaaacaatgtcatgatttttaactgtcgatattgatattataaaagcttaattaaaaataaaaggaacttatggtgtaagccaaagtatgatataacttctataaaaagaaacaaaattaatttctttgaacaaaattgcctaaataaattcataatttttcttgaattaaaaataaataaataaatttcttaaagatcaatctaagcaaggccttagttgcaaaagaagtaaaaataaacataccaattgaaagcggcttatggagaccgaccatgacatgcaattgccattagaggatcacttaatgcatggaaacatattagtaaagacatactaattgagagctgcttatgaagaccaatcattagaagactagtataccacaaatttttgtacaaattaatattcacgttaagagtgttcttttgccttattttcatgatttgggagggtggttgaatacacctatatcacacattgtgcactcttagattgttgtggttgaatgatggaaataagatgttcatgtagacctatatttttgggagggtggttgaatacacctatatcacacattgtgcactcttagattgttgtggttgaatgatggagataagatgttcatgtagacctatattttttaaaattataatatatcgagacactatcatttatgaacttggtacatcatttgtgaacttttttatttggctttaaatctaaaactcattatatatatatatatatatatatatatatatatatatatatatatattcttttatcaataaaaaattaaaggtgattttcttgttgatagtatttttagagtttgatcttaatcacctaatttataacattaagtttgaattgaaagctaattagaagtgttcacggatgtgatgtattggacccatataatattgttttattcacctcatttattctttgggattattgcccaaaaactttttagccacattcaaagtcatcctataatggacttgtttcaattattagaacctacattaatcttcatgtccataacgtggcacctctatattccttagcaaacttttcaacgacttgaaggatgtgattgacgactatgagccaaagtttaaaatattgcgaaatttagaggatgtattgtcaaaatatcatgtattgaaagtggccaatacgatactacgcctaaaatctcgaccatatgatgtatccttttatttatattttttcatcgaatttttgacaatttttatgccacatcacatatttttttgagttggattgtcaaatcaaaattttgcaatgggcttttatggcccaacccaacagctatctcccatactgtgactcctttgagacgaagcccagcttagcctactagacacatttgacttattcattaattagaacccatgacctcaggcatgtatgggcgatgccaccaagctaactttgttgtttgtttcaaatcatacatttacagattttatatataaaattcataaatataaatttcttatatatatatatatatatattatccattaattaaaataaaattattgtaaataaaataattttaaatattgtctattttgcataataattaaatatagatttataaaaaaaatacttatgtatatcatcatttgttttatgtcattaaatacatctaaattagataaatatttgcaatgtgtagttgtacacattagtgtgctcaccatgggaacctcatcttgatgatcaaaatcaattattcttccaatttagaagtattaaaatcttaaatggattgtctaagtccatgaaacgattgttaataaatcatctacttgcaaggaattcacgatttagatttttcatacaactcctaatgcatataagtcatctacaatataaaatatgtcaagtaagaatgctctcataaagtataatgtatgtaataatgatatataaaagtgaaactgaaacatcattaaatgaacgatgaattctaaatttattatataattttatgtttttgaaggctctatcctaatagtaaagttagtaaatgttatagataattacatgtggtggaccaccattcactattcaatgattgaggaatagatgaagctaagtctcatgtccaattctaagtcacaaaatatacaattttagcaatagtcaatcttatacactatcttaattttgcaattggtctcattccttaattttatggttgagagatggatggaaagaggtggagtcactaaatataacagataattgcatgcagtagaccctattcaccattcaaaaattaaataaagggaaaaagttgtatggtatatactagcttctatattattttcacttttaacctgaattatatcacacaaatattaatgtttgtcaaaattaatttttcctaccatacaaaattacaaattaacatgattctataatatctataatcttctttaaattcaagtttaacaattttcttactagtataacaccagaatggaaaattgggaataaaaaatcaatttcgtttattattacttattatgttttaatatttattaagcattaatttcaattacctttctttaggatttaacaaaatatattttgtcggtttgaaatttcattaaatacctaatttattttaaggaagtgggtgagtgaaaataaaatgtaaatcaaaactttggtttcaacttggacctatttcagtgatgttttaggctttttgcaacaaagcatcgtttttgtgctcttgaaaatcactattaaccctttagtacagaaaattgatgttttctcccaagcaccaaggaaaagtgcatggacctattatgctgctatctttggtcctctaaaatactaaaataaataattatttttttatgcttgatttatggtagaaaatagtaacaattcatatatttttaaattatttaatctttatattaaaaataaaaaatgagtataaagaattaagtaaaaatggttcattgatttaattctttttttttttttcattttttatctatctttatttttatttttttctttcccattttcctcaaaattttatatttacaaaaaaataagaaaaatatgtttaaagaaaaatatagaaataatttattaattttatttatttattaatttttaaatttttctttcacctttatttttgtttttggctttcctcctttcacattttcctcaaaaattctaataactaaacataacttagtattttatggtaatgaattgtaactaaaagttgtaataaaaaaaaaaatgataaatttcttgttctcattgtttattatgggttttcaaacaaataagaagcgttaatcacattgtttccaaaacataaaaaacgaaagaaaataaaaaactataactgtgcttatacaccttactaaaaaaaatttggtccactgctgacttttgtcacccacacatgaacagatggacatagcttacatcacccacgcatcacgtagcgtacaccatcttttatctaatttattaattttaagtctttatttttttcattttctgtcacgtttatttttcttttttgctttcatcctttcacatttttctccaaatttttaataactaaatataactttaatattttatggtaatgaattataacccgaatgttgtcataaataaaaaatatgaaaattttctttttcttgttctttattataaactttgaaacacattagaagggtttacgacgctttcaaaaaaataaaagaggaaaaaaaaccaacgactttacttatagtcattcttattagaaaattttggtccatggttgaattttgcaacccaaagatgaatagattgtgagaattgaaagaaagttaaatggaataaaattgaaaacaaagtgaaacaaaggtttcttaaacttttgaaaaactttattctctaagatttctacttctttttgagaagtgattctacatatttttatgtatttgaagttaactatatcttataactaattatctaacaataccataactaatcatctagatacaggtttctaactaatttggtttaattacaactgtacatggcttaacatcccctctcaaactcaaaggtttagctagaatagtgagtttgcttcgtagattgagaaattgttgaacatgtaaggctttgttaagaacattagcaatctggtcacaagaaggaatgtgttgaaccaccagtcttattgataaccttttcctgaacaaaatgacaatctagttccacatgcttaacttgagaatgaaaaataggattgatagcaagaaaagtggttaaaagattgtcatataacaaaataggagaagaatgagatgagataaagagctcctagagaagatgttgaatctactaaagtttaaaagcagcatttgttaaggccctatactcagcttcagtgctagaacaagacacaaccttctgcttacaagagctccaagagactagattatagccaaaaaagatacaatgaccacttgtacttcgacaatcatcaaggcaaccaacccaatcaacatcagcataagcagtaagttaatgatcaagagaagaatggaaagaaagaccaaaggaagtagtgcccttgagatatcacagcaactgtttaacaacttgccaatgaagatcagttggtgattgcatgaatagcaaagtttgttaacaaagaaaaatatatcaggtcttgtaatggtacaatattgtaaggctccaacaatgttgcaatattgagaaaggtcagccaatagagaaccatcagagacagataaagtgtgagaggtagtcattggtgtagcaataggtttacaatctgcaaaaccaacacgagttagcaagtcctgaatatatttggtttaggaaagatgaagagaagatccttgccaacatacttcaacacctaaaaagtaattcagaataccaaggtccttgaaagcaaactaagagtgtaaagaagaaactacttggtgtaccaacatggaattagaaccagtaacaataatgtcatcaacataaatgagaataatgatcatgtcagtccctttccgaaagagaaacatagaggaatcagataaagaacaagagaaaccccaagcaagtaatgagttctttaatttggtgaaccatgctcgatgagcttgcttaaaaccatataaggctttttgaagtttacagacgacatcgggtttagaatgatcaacaaaacctggaggttgaaccatgtaaacctcttcttctaactcaccattgagaaaaacattattaacatctaattgtttcactaaccaaccatgagaaataacaagagaaataacaagtcgtatagtagttagtttaacaatagggcaaaaggtttcaaaataatcaataccatatgtttgattaaaaccctttgcaactaagcgggctttaaaacgatcaactgagccatcaactttgagtttcaatttgtatatccatttacaaccaattatgcgtttattaataggtttaggaaccaatgaccctgtggaattggtgggaagagtagcatactcagtcttcatagcatcttgctagtcaagatgcaacatggcttctttgaaagaggagggttcatgagcagtagtttggacaacaaggctgaatatttttttttaggtttaaaaataccactttggctacgagtaacaatagttcggtttggaagtaaaggaggatcaacattggaggctagagaaaaggattgtggtaaagtaggagaataatgtggattagatgggactaatgggaaatcagacgaagtggaaatatgagtagaattggtaggaacggtaattggagaagaaaaattaggttgatgatgattaagattccttgaagattgtgtaagaatagagagaataccataatcaagaagtgttgaagaatagttggatgatgatactggttgagaggataaaaactttgttaaaaatggaaattgagtttcatcaaatacacatgacaggaagcatatatccgggaggaagccatatccaaacggagaaatctcttgtgcttagcactatagcccaaaaaatagcaagcaacatatctatttgccatcttgtgagaaacacaaggacaaagataagagaaacacaaacacccaaaacttcaaagagatgtataatcaggtaaacgattataaagaactccataaggagaattttgtgaaagaatagcataaggaagttgatttatgagaaatatggccgtttgaaatgcaaatgatcaatatttgagaggcataccaacttgtattaataaagaaataccaacttccacaacatgacgattcttcctttcaactcttccattttgctgaagagtataaggacaagagacttgatgaagaagaccatttgtagctaaataattctaaaaggcctaaaactcacctctctcccatcacattgaactttagtatcaaactatctttcaaccatggcttgaaaacgttagaacataagtaaagcttcatctttagtttccaaaagatacaaccatgagaatatgctaaaatcatcaactagcaagaggaaatatcgagcaccattaacagaaactataggagttgcaccccaaagatcaacatggatgagaccaaattgttttattgctctagaagtggacctttcaaatggcaaacgatggcttttagccaactggcaagactcacaaaaagagttattattgtcatgtttaatttcaaaggcattttacaaagagataaaattttggaaacaacatcaaaagagggatgaccaagtttattatgctagagcctaaaaaaaccaacatctgaaggactattggtagaataaaaggctagtagatgaccaacatctcttgttgcagcaagaagtttgtagaggctcttctcaatttttccttcaagaagagcaagtctcattttctaatccttcaccacaaaatgagaaggatgaaattcaataaaggtgtcattgtatgagcaaaatcgttgcacaataaccaagttggttctaatagaaggaacatgcgcacaagatgtcattgaaaaccaaaaaaccacttgaagagacaagagaaaatttaccaatatttgcaattgataaacccttaccatctccaacaattactttgtcaccattggtaaatggattatggatcattaaattgttaagatcggatgtgagatgatgtgtagttcttgtatcaagaaactaagaagtgtttcccattgttgtagaagttgcagtcatagcctgaggattattagaagtggaatgcttagaatcttttggctgatgatcagagttaaatcaataccagcattgtaaagcagtgtgcccgaacttagaacaaatttaacattgaggcttgaaagttccagatgagttaccactattgtttatggtatgtccagtagtagaattctttgttttaaaattctgattgttagaattatggaagataccaccagaaaattgaccatttctcgagatttgtctggtatttggacgaaaattagaattgtaggttttcttcctgttcttttgttgctgaaacagagcagtatttgcttagattagagtatgttcttctatagatctttatcgttcaagatgtcgttcaaaaaccatgaggtgactttgtaattcttcaacagagattggttcagctcgtgaagtaatggtcactacaaaaggattgtactcagggcctaatccacccagaattgccataatctgatcttgctctaacactagttctccaatagcaattagattgtcacaaatattacatattcgtagcatatagtcaagcatgctcaagccacctttgcgtatagtttgaagatgcaaacgaagctccattatatgagcttgagaagcagaagtgaaactacgtcgtaaagattcccagatttcatgagctgtattgtaactcatgatctgagtcatcatcggttcggtgagtgaggagtaaatccaactcatcaccaatcaattttgacgttgccaagtgatgtattttggatttacaaatagagatttgattgttgtgacagaggtagaatttggatcaggtagaaaatgtggtggacatggttgggttccatcaagaatatcatcaaacccatttgtaatgaccatattaagcatttgattgggccaaatgaggaagttattgtgatcgagtttgatcgtaagagattgaccgagtgaggaaaatgatttgattcatcatctgaaaagtattttgtcccgtaatcagaccagatccagtagttggaatttctccaaaatcttgcaatagagtcacattggttgagtgatcttccattgttacaggctctgataccatgtgagaattgaaagaaagttaaatggaataaaattaaaaacagagtgaaacagaagtttcttaaatttctgaaatttctacacaatgttttgaaaaccgaaccggactggctggtctaactggttcaacggttgatcggtcacatttccggtctgatttaccctattaaaccgtttgagcattgaaccaatcacgaactgcctaaaccagcggtcggactggtgaaccaatggaatcggacggtggaatcggacggttctaaacgaaccaaacggttcaagttgctcctcattttgtaggcatgaggaccccatttataaaaacttttgacaaaagcccatgttgggcaatgtcttaatatgacaaagcccatacccaccccaaccattaatgggctgagttttgagcccacaagatggaatgatgccttggccttcatgagaatagcttttataggcatgttttgcaccattattcctctatgtgggattgctaactaatatcaatgaaaaaaaaattaacaaatgcacccaagagaatttgaaccttagacctcaggttttgtaactaacccaggacaccactcggctacatgcgatttgttatctaatatgccaaacaaaacaatatatattagattttaaaattttttataatattaaataaaaataatataatatttttaaaaattataaaattagtttaaattttcatttttaatatattcacatttaaatattatacatatttcatttaataaaatttaaaatattaatatgatttaatttgataatatcaaatatataaaataatattattgatttttaatttttttatatttatttttaatttttttataattatttttaattttattaatatataaattacatattttttacgtcaccagttcgattgcagttcgaccatcggtccaatcagttaaccgtgaactagtaacttttctggttcaatgaccggttcggttatgaaaacattggttttacatattcatatgtatttgaagttagttatacctcataactaattacctaacaataccaaactaatcatttagatacaggtttctaattaatttggtttagttacaactgtacatggcctaacatagatagacataacgtaacaccatattatatgatgccacacatgttgcagaacactatattgtatgatgtcatacatgtagcgtaacaaataaataaatgttgtttttgctatttaaatgcatggtttttagccatttttgatccaaaaactacatacattcataac

SEQ ID NO: 13163 - DNA, 930 bp, Vitis vinifera
  Intron number 11 from transcript GSVIVT01019442001 (locus GSVIVG01019442001) derived from phytozome v7.0 (chr-ID chr 2; pos 711292 to 712221 reverse strand)
agggtgacaatccaatcccagcatcaaaagctccagtaatctcagttcctttaatgctatgcccttgatctgtttagtcgggttcactctgttgaaattattttaacttttagaatatctaagattgcctttctctctatctgaaagtgcgcatgtctattaaaggaaatctataggaaattctagtaacaattgctattactcttggttttaattataaactacacattgggtaaccttaagaagttctactgcatatttacctctgaattccaagtatgatgaaggaaatgtcatttcattaactgatggtacagtttgggagactgattgtatattaagttcaaagatttacaccatttgtgacctctaagaaaaatgaaactgaataaatttgttggttggggtggggaggtttgagggggttctttgcagttcgcttcacttgctccagattttcactcggctcttctgctcgtgtttcatgtgttgttaatgtgtaataaaaaattagaaattcttaccatgcctgtaaggagttcttgaggttcaattctgtcagtcttttatttttgctttgtatcatagcttaagtttagattagttataactcaaaattctgttttcataaaacttgccaaatgttagttcattctgagaatgtctttcttgtaaacaaacacttgcacacattactttatccggtgaccattaattttaagaaaattaaaaatctcaaataactttgataaaaacgaaaaagaagttgcaaagattgactttattgtattgtagctaacagatgaccattaattttgtttaatttacaaaaaataatctgtttcaatcgcatttgattttcttaccttttttgtagttttaacgttgaaaggcctgctatattttcctaacaggaagttcctcctgaca

SEQ ID NO: 13164 - DNA, 2654 bp, Vitis vinifera
  Intron number 17 from transcript GSVIVT01001043001 (locus GSVIVG01001043001) derived from phytozome v7.0 (chr-ID chr 11; pos 6875702 to 6878355)
ataagattgcattgcatcccaaatctcttgttcaggtaggggtcagatttcattttctttctgtttatattatatgatatatatttcatttttcttcttgtatatatatatatattgatcagaaacaaaagatgtattaattattaattatggataaaaagtatatgagaaggatgaggggtcctccacaatttacaaaaaaatgatcaaaggatgtctaaactgctccactatacaaggagacctatacaaaatagtttagtccatatgcaaaagtgtgaaacagttcctagtgcatcgctttacttaaacccccttatgtacattcgtttaaagtttctccagttgctaagcagaaccatagcattgataaattgtctgtgatacttcctgaagtttaagtttcacattacttatcaaggaaagtgattccaatacctttgttgagattccttcctaagctcataccggttgatcggttcaagctgatgatgccatgaattaggctgcactatctctcccaattccttgtttaggtagggaacagatttcagttttcttgccatttgtattatatgataagcaaatcgtgaaaaaatgcctattgcatcattttacttcaacaccctcacctagtggttcaaagttttctcccatttgcatagcagacctagaagagtactttatagtctttgatacttccaggagtttaatattcatactacctatcatgaaaggtgattttaaaatcttatgccaacataacataactccaaaaaaaaaatgaaggaagaagaaacaaggaaagtgattccaaaacctttgttgtatcatttaaagggaaaacatccttcttaacaaatggattcccaaacctttgttgatatcattgttagggaaaaatttctccttgacaattcattttctagttttgagttttgtagcttttagaaagaaaacagtgtatttgatgttttactggctaaagctttaatgtagacatgttagtttaagaacacaaagataaaatacatccatgaggttttaacgtggtttaaccaaccatacctacattcatgaatgatagagaatcattccactataccataaaaaatattataaagaacaaaaactaaatacaattattggatcctgaaacattccattttccccactccttgtgtttacaccatgaaccatgaactcccttactccaccatgtgtctcatatctctatctaccgcgtatagtcttcataaactcatcttatctcataaccttttcccctcatgacttaaaatatttatagagattcccaatatttttttttttttggtactttataagaaaatctaatattacaattgttaaagagcatgatatgcatattgaacccaaatcctgcaagcttaagcttttaggaaaattggtacttcaacatggtatgagagattggctttgcaagaggtcatgggtttgagccacctcttcacaatttgcattttctcatttgtttttgttggatatgaatccaaattttgtctatttgatgtgaatccaaatgttgtttatctctccatgcgtgggtatggggccgcacatgagggagggtgttaagaagcaagatatgcatattaaacccagatcctataagcttaagcttctaggaaaattggtacttcaacaacaatgacatgagtatagaaagtattttatacaatattctttacaaaaaagaatctacaccaattaggaatttgagacactttccaacatttgagtgtaccatttttttctacgaagtgagacagaagtaaatattattgcttagtgtggcttaaataatgcttttgttgtcccttttcaaacatttccttggatggtggaggtctttttatggtgtcctttctccttcttctatgtacttaattcttctattttaacaaaatggtggaggcaaattatccatgtaaaagtgatccaataaataaacaaacaattgcctcttaaagacttttaacttgaaagtttttgaagcttctctatagcttattagtctaactatcctgttttaattctatacctgcaactactaatcaaaaaaattctatgcctgcaacttctaataaaaaaaattctatgcctgcaacttctttataactacgcccattccaagaattcaaaaaataaccaaaggccttgttctttactgctttttgctcccctactaaaaaagagtttaacctacacttgtcttggtcagccatttgagaaagtttggagcatcccaactgccagaggcaaggtctgcctggtggctgctgaatctgtttggtatgatcctgttggctgctcgtgttaatggatgccacataattttttcataaagccactagtagcattagcatctcctttctaactttcatattcttactaattttccagtttattctagttatttaaagcaattatgaccttaggtgcatcttgcaagacattgctaaaacatctagtgtgatgtttccccaggcttgaaaatcatatattttacttgagaatacccttagattttcactatttaataatttctgcatctaattgttcctttctcaatttcagtgcgaagctggaaaaaagctcccatttattctcat

SEQ ID NO: 13165 - DNA, 1372 bp, Vitis vinifera
  Intron number 1 from transcript GSVIVT01010707001 (locus G SVIVG01010707001) derived from phytozome v7.0 (chr-ID chr1 3; pos 12177114 to 12178485 reverse strand)
ctctcgtatgtgtgttttgtggaattttctgtttggttgctgagaaagtgttggaaatgaatagaggggtggaaatgagaattattttgtgttgctggaaatgtaaaaaattaaacatggaatggaaaacatgtttgttaacttggaaaagattttctgaatgtataattttaagaaaatatggttcgtactgaataagttttcattatcttttgaaaatatttgttgaaaaccattttttgcatttttcaaaaagtagaagctatggagtgaacaatcagatggagcacatactcaattctttctgctttcaaaaatgacacccaaagcaaaaggttttttctttcttacctttgcccttattctttttcctgaaaaactacaactattttcaaaaagataatttgtttgtgtttagggcctagaattttggcttgacggatgatgtttccaccttgtggtaagcaagacaggatgaatgttaaaattcaaggtcttggtttctttttattaatattctcagtttgcttgcacttcattgatttggaattatcactccatttgttagggaagaagagaataaaagagtagataatatcatgcttcataaaatcttctcatttccaattgttgattcatccatactggatagaaaggtagagaactcgggttagtagaaaggaaagtaaattgctctctatgcaccaaaatacgtcttaaaaatgaggtggtttggagagagacttgatatagcagttgagaactaccattatgcttagaaggtacaagccctttatggaagtgctaggagggctattttcgtgtgtttgcttaaattgaagaaaatggtgaaaccttatttttcattctaaattatgtgcacactttcactgtcatggcaaatgcaattttgtttgcagttatccatgctaatatataaaacactgccaagcttctgtttttacaaaggtgctgctacacctgtgaaaatgggcacaccagtttcaccataatattccaaaaaaagctgtatattaacttcctgtatattaacttttagttgttagacaaaaagtttgaattatgtgaaagcaattccagaatttggataatggttgcaacacttgtgtgtagcatgagcaaccttctggcccacattatagatgcatgtgaggcttattttttcagaatctgaagttttctttttctcctatcggtcatgagtgaaattgccaagacagaattctggccagtactaaatctatcaattgagcttgtaatagtttttattgtgttctttactaaatttctttggtttagctagttttacgttttaaaaagcgcagtggttttacagagtaaggctaaagag

SEQ ID NO: 13166 - DNA, 3028 bp, Vitis vinifera
  Intron number 1 from transcript GSVIVT01031371001 (locus G SVIVG01031371001) derived from phytozome v7.0 (chr-ID chr6 ; pos 19454508 to 19457535 reverse strand)
ggattgtgggctttgtagtgtgttaatgattacaaacattcaagaaataagccattaacgtaacctaatcttctttttttaatatctaaggcatcatgacatgaagctctcttgcttgtaatttgtggaaaaagaagagacacaaagtcctattttctcccctctcccctttccctttttcctccacatgtttcaactttgatcaagttgtggggagtgagggactagggaggagggaggagggaggaggggggaaatgtgaaatttggttttgaatcttagtgtcaattcttcatgccatgccaacatccacattgatgtaaaatctttctttttattaaaggttaatttaaatggtgatatgatgattcccaaaccacattatcacacctaatattagtatctttttctcttaatatatataccatttttgaagaattttgtacacaatgattctactccagcttgggggagcctttatttgattaaatagtttgattattataactaaagttttgattgtcttatttagttttaatttacttaaattttttttttgattgaacaaccattttattttgtcgagtctttaatatcatttatataatcagatcttagtcataaacatgacattctctaaattttcattttatgtgttgattttttttttttacaataatttgttatattcttaatttttaaaggagcaacattctcatatgataaatgattaatgataattgatttcaatatacatacatacatatatatatatatatatatttatttatttatttatttatttattgcaattgtcttaaagaagatgtcaaacattctctaaaccttagaactactcaaaaatcattttaaggtaatttttaggaatccatttaaaataacctactagagatcctctcatgtctaataattcctattataatatctttttttttttttgttaagtagtttcttttaaattcaacaaaatttaattacatcaccatttacatgatttgaatccatctaacaagctttaaaattttgtgttttattttgtaaattctctatatcttgaattttgattatcataatacaattaagttgtttttgctgagcttttcttttcttttttttttctttttttaatttttcaaaaaccaaacatggtcttatggttaaggtaacaagaggaagtataaaatgaaattaaattttagaagaggatgaaaattacttgggctttgtttattgtctatttgagaacctatttataacatattttgaatattttaaaatatgttttaaaaataattttatatttagtgctttgtttttaattattttacatacttgtataattattttataaaacaatcctaaaaaataaataaaagatagtttttaaaaaacactatattttttattcttaataatagaaaataaaaaatagttctccattcaacatgttatttttgttctagagaacaaaaagttgttattgaaaacaattacccgatgaacccttaaattatgagaattttgatgaaaataaacaaacatttttaactttttgcaagtagcataaatttattgatagctttgcaatttagaggaaaattatataaaatttgattggaagaatggagatgagaaataaatattatttatttatttattattattttttattttgtgtatcaaccatacctggttggagaagtaatcaacatgattaaatactaacaaattattaaaaatgcaccatattttggtataatttctgaaatatttgtaaagtataatttctatttacaaaataaaactctcaaataatttcaactatttaacatatctcataaattaattattttaatttccaactatttaatatcttacataaactaaattattttgattttaagaaaaaaaagggaaaaatactacaagattttgctctcaattttattttttttaaaagtgggtaaattttggaaaagcattttgatattttttccctcaaatttgtctatataccatccaaaaaaaaattattattattattattctttccttctatattcccttttcatgctttttttttttcttttttttaaatattttctgcaaaaatttgaaaaaaaaatgttaaaaagtattagaaaatacaatcattttaacaattaaaataattgaaaggtaaataaatttatgatttttgaacttggagaaagaagtatagagatgagatcaggtgggatatggcttggccccttgggagggtagagatggagatgattggcaaaaattttggaaaagtgaagatgaattgaagagaaagacgggtcaaaaaagatgtgctgcaaagggggcagctagacatttataggttgaaaagaagtcacaccctcactctttagagtctttaaaatctcattcctaccctatctgcttaataaataaatgggttttctccattttattttatttttggaaaaatgattattgaaattaaaataattttttatacaaaaatattggtgatgggatgtgtctaattccaattgattagtgccaattgggttgtcaacctcatgttaatgttaacaccctacttgaaatacaacagaatccatgtaaatattgtttggacagacataatttttttttttttgaagtaaaaaatccaaatgaacaatggcaactattgaagtggattttcattcaaacaaattcagcaaggaagatctttgcaagtttagaatacatatacccaactaaaattgttgtagtgtttttctatctaattcaagaactgaaactcaatccaaatttgaagtatacatgcctgcctactagaattagaagaaatcacaaattgagagaagggtagggaaaaggaaaaggaaaaggaaaaagaaaatgaaaaagagtattgacaagaaaatgagtccaaaaatgcaggaagtgaccaaatgttttggcccctaaagaagagggagccacatatctgaagaaccaaaaatcc

SEQ ID NO: 13167 - DNA, 3992 bp, Vitis vinifera
  Intron number 7 from transcript GSVIVT01020583001 (locus G SVIVG01020583001) derived from phytozome v7.0 (chr-ID chr1 2; pos 4019644 to 4023635)
gagtgggtttgtggggttgctgtttatacaggcaagttctcttttaataaaaggtcatatggatgtatcatacttgtttatttactgtgtgcctttagaatctttgctttttctattttttgtctctttttttggcttgttgagagcagtcatttatctaaaggagttgagatagaggaagaattcaacaaaaatagaaaaagagagaaaaaatggttctcaatggatagttaagctacaaaacatattgtgcagttgggaaaaaaattgatcacattatatattgataatgggagggaaaacgttcaatcttgaagctaattagagatggcatcaatagcctgccttacttgccttattgggactaatttgggattttcatgtattcttttatatccaggcttggtgtaggaactttaaaatcagcttgggcttggactaggcatattccatcttatcattcttgggtggttataattatttagtggttgccctattatttatggatgtccatctcatcagcctacttgcactgccctgctccctgttggtgtgtagttaggatatataatcaggttctactggatgtggggtgggattttcataacctggtgcatgtttgattctaacctgtttgtttggggatcaggttggcattgatctgaatcaagttctccattttaatttctatactagattcatgggtatggttaatgttagataagaagcaaaattgagaaagaaacccaaaatgcaaagtttgtgcaagtggaaatctttaattactaaagaaattttggagaaatgttcctttatatgtcttgttgggcgatgtgggtatccttgaatcataattttatttatttagtttaaattttatttttttattaggagagagaggaaagcctttttattttgccataaggcaagacatatccctgaaaatgtaaggcataattatcattatttattatgcttttcacaattagaaaacatagaaaaacaattaacaaaatcacactagatgtccttaagttttaaaatttttttagtgccaaactgattttggtgcactgaattgcttcaatgtcgtccaatataagtgtgaaaagatattactcattgaagtttcaagaatttcaaagcaaaaggtcacaaagaaaattaatttcaattcccaatttttttataggtaataatatgactttgtaaacaatcacaaaaagatcgcggaccaagatacacatgatgtatatgattgtgccaaggtacaataaaaaaagagaagagtgtaaaaaacaatttcctcccttaaagaacccaactgatcaacaaacttacttaaagacattgaaacttttatgtacaactttactcataggaagaaattactaaggaaaaagcttttaaaaacatggtgaaactgcttcttattttcaaatgaccttcaattcatttctttccaaatccttcaaaaaaatgcacgaaggagctactatccaaaccttcttacattttcttcccatgaaggatccaatccaccttaaaagagcctctcagattgtgacaaacgacacctaagaaatgcgaaacaaggagaagagcaattggtaaagagcctttgtcttggcacaatgaagaagaatgtgatcaatagatttttctttgactttatgtgaaaatcatttgttaaccaacgaccactctcttctttgaagttgatctagagtcaataccttcccataaagctttccatgtgaagaaacttggtttagatggagtggatactaaacaacaactgtcaaaaaaggagtatcatttctcaaatccatccactccaccttgtcatcctcctttctattgaccaccttaccttacagtttacagaggaattgttgtacattatccagctcccaatcatttaattgtttagagaaataagagtcctaatgattagaacgggaggtggcaagattctattgtggaggtaaacctctttatattgttcgagtctagttatggcaaagttttgggtagcgattgaatcgaagacgtctgaagtgtctatagaggaaatcaaagggaaactaaaaggtatcattgtggaaaggagtagaggcttttcctcttggatcaggtttggggtatcaagtttgagaaagctactggaatgctttgaagaatgttgtagggaggaaaagaaaggaagattggttaaagtctgggaggaagagggaagaaagttccggttggagaggcgtgtaaacggggcaggaagatacgtcttatgctctgttgtggatgtagaggctaaaagattctgtttagtctttcctgaaggaaagggcgtgataggaggatgggccattctagccgagaagctaagggcgttggggatagttactaaaaaagaagacaaaggtgtagaagcaacccaaatcaattcaaaaaagaaggatgcaacaatagatgatgaggaagaaaggtgcagtggtaagaagaagcagggggagaaaaagagcttcctagatgtggctaaaggatcggctggaagggtaggcgaagagctgtggcttcaggctggaggaaggggattgaggaggagggaggaagttttggggcgttgcctagttggtaggtgggaaggggcagtgatggagatggagttagattcgtttaaaaactgggggaaacgcagctggaaccttaggaaaggagttaaggtgatgaagctgggagaacctttcttcttgttggaatttgaagatgaaggggaagcagagagggtattaaacagggggacgcgtagatttaaggataggctgctgcatttagagagatggaatgaggagactgggtgtttaaaggttggaagccaaacaaaagaagtttgggtaagagtggtggggcttctgcttcattgttggagtgaagaaatgttcaaaagtattggtgattgctgtggaggtttggtggaggtggatgaagatacaaagaatctttctcaacttcaatgggccaggattttggtaaagaatggcggaaatttttttccaggaactttgaatttagtggtgaagtccttctgctatgcagtccgcctgtggtgggaggtgcagcctagagtttcagcagtggagccgatgaagaacttgagatggagagagggggaaaggatgagggatcacgcgccgggaacagcggtgggaaggaaaaggaaggatggcgtgcagctgaagctgatggatcaggtgcagtcagaaaaagaacgggaaaagaaaagggtgatggtgacaagatgggagtttcagctgatgggttggcaggatatagcaaggaggaaggagaagtgggctcaagtgaaaaagactgtgtgggtgggcttgatagctgcaagtttgggtgcgaagtgacccagcccagaaatagtcaaaacctggagcatgagagtactgaggcgttggtagaaaaacaaaaggttataaatgggtcaatggctcgttgggaaaggggccagtcaagcagagatggggagtgggccgatcatgaaggccttgtaagtgttaaaagaaattttttaggggtgagaagcgggcttcaagggtggatatctctttcttgcaatgggatgggctgggtcatttggacaataggcccaaagtggtaaagaaagatgggcaatccaacttagcggggaaatacacctcggtggagcaggcttcttatgttggcccatctttttttcaaaaggatgggctgggccggctggaccacagacccagagtggcaggaggagaggggcaacccatcctagcatcagtttgggccccgcttgcttataagactccctgggatgagcccgacgtaaatgctaggcttcgtcttgccttgtgccagctgaggaatttttcgtcgaagacagactagtcggagggatggggccattagcggcgagagggacaccagagcgctgctcaataacggacgagtgc

SEQ ID NO: 13168 - DNA, 2159 bp, Vitis vinifera
  Intron number 2 from transcript GSVIVT01008317001 (locus G SVIVG01008317001) derived from phytozome v7.0 (chr-ID chr1 7; pos 3320867 to 3323025)
tccaaggaagaggagcaggtattttttatttaaccttagtaatattctcaattcatttcgtatagagtagcaggtgattttttgttggctttatttacattctcaattcattttattctatctactgaactacccgataccatagtgtgaaaaaatgttcagaacagtaagacatgatacattctttcccattacctggcactggaacatgaatttaatagatgacaccaaagttattttaattatggacgatagtcgcgatttgttcatttaatataagtattgtttacttgatgctcatttttcttaattcttcttgtagttttctttataactgtagttattgatatattatcttaatggttaagggacaatgttttcagtattctacttatttgctataatttctgtagcagcacttgacagtgaatttttatgcaaagagctccattagttatggctagatccactagttttctaataattgataccgattctagtgtttttgattatgggcacttcagtttttgtcctacttaataagcactaatattttactcaaattcattctcgaacttagctaatgtctcattctcaacatttttagctgaccctgagatttgcaaatttgtgattattatagtcttcatttggtgcacctgcatgcaagatagactaatttcaaataaaaaaagtacagaattttggaaaagatttccgaagcttatacagggaccttctgatatgtagtacacattgcttccagttggatggttagtgttggttttcagctgatgttggttaaatatagatagaggttatcagtgccccatttgagacagcttcttgattgtataacagttctttctatttgttaaaagtgctttatagtgtgtttgattacaactgaagtattttaagtcagaagaggattgaggcctaaaagaagagattccaagcagtttcagaatttaaaatccttttaagtgcttgtatgcaagaagacacataacatatgcatatggacatactcatgtatgcatgcatgatttaatttgtgaggtagcatgcttggaggctgcattagcacacacacttaacagtcaggtgcaagtggtttaagtacatgtgtgctagaagacacataacacatgcatgtgggcatactcatgtatgcatgcatgatttaaattgtgaggtagcatgcttggaggttgaattagcatgcacacttaacagtcaggtgcaagtggtttaagtacatgtgtgcaagaagacacatgacatatgcatgtggacatactcatgtatgcatgcatgatttaatttgtgaggtagcatgcttggagaccaaactagcatgcacactttacagtcaggactggctggacatgttaatgttatgtgtcagacacaaactaagtatgatcaaatatttaatttatgatatgtcactgacaaatggcagttacagtggaggcatgcaatgtacatgttggaacacagcaaaattttgttaagataatgcaggagtgcaatttgtgaagaaaaggcatgatgagaattttctataaaaaaaatatcaaatgagttgcctgttttctaaaaatataattagcaaagccatgagagttttaattatggacgtggagtgtgaagactttacataactacacataaaaatatttgactgcaactatcttttgctgtgtcgttacctatatgttgggaatttattatgctccttgtttatgtagaattgaatatgagtttgatttcagtgtccatgctacttagtcagagaaaggaaataatgtagtttttctttctattgtagatatgttagtcttagattttgctacatctatataccaacagtaaacataaaaaaattaaatcccaaaattatggaaattgtctagacttatttattttgacaatttttttaatggttaatgttttttttctctttgttttttgctgttatatggaactaaacctggaacttcccatccccattctaatcccttgccacttgtgctatgcctcaaaggctaaacagatttattttgacatcaaaaggaaaatatttgaatcgtactggtttctttttgggtatgacaggtcttccctttgcttacagagaagttctcagttga

SEQ ID NO: 13169 - DNA, 3344 bp, Vitis vinifera
  Intron number 2 from transcript GSVIVT01026545001 (locus G SVIVG01026545001) derived from phytozome v7.0 (chr-ID chr4 ; pos 22008295 to 22011638)
gcttaaagtaagtatttgtactattcattttctcccttatggtctttccaattgcagaactcttggtttcgagaactattttcctaggagcattcaagtacaattgaaaatcttaagaattacttgtttctttgttttaaactattgaaactttcctctatttcatcatctttctgcctggtttagctgattttttggattgtggtaacatgccagttgctaaagtcatggccttttgtctatgccttttcaccatgtgaaatattctgtaattttgttatcctctatgttagatggattccatcataggcattgagagagagagaatcataatctttttgctcttgctcctttttgtaggtaactcaacttagcctattggttgcatttgggctggttggttgggttggaagccaacccctcactttaggttggggattttcaactcaactttggacctttaaaattctgaagatgttaacataaaatatatataaaatgttaaaatgcattgttgccgattttcctaaaatcttaagcttaaggatttgggttcacaatgtatatcatgttctttaacaccccacctcatgtgcggccccattcttgcatgtggagggatatacatacccaaaggcaaacaattgcaaatagtccttttagacttaaaaatatgcaaatcatggagagacaactccaacacataaccttttgccaaacaaagttctaataccatgttgaactaccaatttttctaaaagcttaaacttaaggatttgggttcataatgtatatcatgttctttaacatgtatatactaggttgtgtttgatattaaggtctagttggtaaaaccttaaaccaaacttaaccctacataaggtgtggttgaaatttctcaacctcgtgcttcttgggctaggttgggcttagcttgccctccttggcattaaagtacaacatgtttttaccatatagctctatctagggccatatcctttgaatgataaacattcgcctcctttctcatcaaagcaatccataatcttcttggccttcctatagtctcttctatattagtttggttgattgttccttgttgcatatggttcaactgtcatgaatgagttttcctcatagtgtagtcaattaataatgtttgaccttcttgcaaatgcgctactctcttgtttcattcttcttgagtactcacttatctggttcaatttcctcattttggctaaacttatcatagaatatgtgtttgttatttactcaacattttattgcataacatagcttgatgaccgtttcttaccatcaatattaaagatgaacatgattaagtcagttttttattctttgttccttttttttagaaatattatcaaagattagttacattgttctataagaactaattggaatttaatggcacaaataattaatggtgatgatatttttgtgcaattgacatgagcccaagccctatgttcatttttaataataaatcaactaattatcctaagaaggaaaacacgtttaaatacaactatcaatcttgaccaatgtacaaatttttctaatttttacccttttgtgtaaaatggatattataaaaacaagaaaaagaatgctatttatgattattattacattgatggacacaaaaattggggtgtaatttgaaaaagggttcaatgacttaaatggacatagggattagggacatgtcaataaatgaaaaaacttttacataacagaattattttattatatatatgcaagaacaacaaaacaacggtattccaacaaatccactgtgctcttgattttaagataccaagaattttaatctaggaagatttagtgtgtctaacatatgtccaaggattaaaaagttggattatatcaatgaaattttgctgatttttctggatcggtcatgcttgatatgaaatatgaagaagatattcggatatttggttggattgaatttcgtcacttttttttttttttacttcccataatttttcattttttttttcctgaaattattggtgatatcgctgatttttctgtgacataaatctgccacatcagcaatacatcatctcacactccacaattggtgccccatcagcaggatctcattattcatttcaaaattcaaatgcagagaatgaagtgggcctgaccctaagttgaagaaatgcaccttgtgcaacttggtctcattaaatacatcatttttttctttgtgatttttctgtgtgataaacaattgtatatgtagaaaacataaaatgaggagggaacactgggcttaaactcaggttctccagcttgacaaaagcatgttacaccatttgggcaactttgctgttataaataaacacacacacatacacacatatatatgtataataaaattgttaattgttgaaaatataaaaaccttcatagtagtattcttaatgaattttttatgtttttttgtataataattaaatataaaataaatataaatttgtacttaaaattataaacatttttaaacaaaaaaattatatatatatatatatatttatttatgtaatcattctttattgtctttgaatatatccaaattaaataaatcgttattttagtattaactatgctttcaagttctataaatttttattatagaatatgacaaattatatcatatatatatatatatatatatatattgttttctttaataaaagatcttcaatatatgtattgttacttggtttatcatttattaaagtttttcccaatatttcgttaagctttgatcaatttcatcctcctaatagtttttgtttgaatcttcatttaatatttttgatttttcttgatatttatgtaaaatccaactatcaatatttatgtaatttctgatattttaatactttcacatatccaagcataccacatgtctcaaaactagcaaacctctttctggacgttttatgttacttagattagaattagagggatgttggggtttgatccttctctaggaatgatggctcactcattttgaagtgttcatgtaaagtttatcttttgttactatgtttagaaatgtgccttaatggtgttagtgatgcaaatagatattctcatattgtatgttattcttgctttctaagttgagccacaataggattattggtgcactcaagaggcatattgattttgcactaaataaattcagttcatgtttttttgaggctaagaattataccatttcttatcattaaatttgtggtttagcatcgtgaatttgccaaaaggaagaagagaatagc

SEQ ID NO: 13170 - DNA, 7400 bp, Vitis vinifera
  Intron number 4 from transcript GSVIVT01008903001 (locus G SVIVG01008903001) derived from phytozome v7.0 (chr-ID chr1 8; pos 3272033 to 3279432 reverse strand)
catttgcacggctatcaagtattttcttcactttctgttttgttactgttgaatataatgtatttatagtatataatctttccttgttaatataggtcacatgtatggtagttaggactcctagccttgtatatatatatttctcaattgtaagtaaactgatgaatgtgaattaaggtttttcttttttctctctctctcaacatggtatcagagccaagggagaaaacctaattctttcctgtttcccgtgtcatcaactccgggaaaccttccggtgaccgtgtttcattccggtcaccttccccatctcccaatactttccggtcagtcggatcgtcgtcagaaaacactcaccgccggcgaacttttccgacgacgtctttttcagacaccgaccacaccaagaggagcgcctggaggagatctccaacttttcccaaagcatcggagccaggaaaccgtccacgcgccggccacgcgcacatttacggccggcgactgaatctcacgcgccggcgcgtgagggcgcgagaggccttttctggcgacgcgcctcctcctccagcctcgcctgacgccgaccagcatccctacctccctggttctcccatccgagccctgcacgtacctcttttggggatttttgtctccatcagccctccaaacagtctttccggcgaagttccgactactttttctccatcccaatccctgcacgtgccttgggaagtgttcttctacctttctggtggtaccacgccgcgatctgaggccgtctcccttttttcggtggtgccacgccgcaatctgaagccatattagggctctcttcgatccaaacataagataagtggatatgactactaaaacttccattttttcctctgtcatatctggatctcctatgattacttcggagaaattggttggcagtgaaaattatctttcctggtttgcctctgttgaactttggtttataggtcaaggatatgaggatcacttggttacccaggaggcagatatccctgaggttgaccgcgtacagtggaggaagatagatgtacagttatgtagtgtattatggcaatcggttgatcccaggattcttcccaggattcttcttcatcttcgggcctacaaaacttgttttaaattttggactcaggccaaaggattatacacgaatgatatccaacgtctttataaggtggcttctgctattgtccatatcagccaacaggacttggatctatctacttatattggtcagattgcctctcttaaggaggagttcttgactgtgatgcctcttactcctgatgttggggctcaacaaacacagcttgacaagttcttcatggtccttactcttattggcttccgtccagatcttgagcctatccgtgatcagattcttggtagttcatcagttccgtccttggatgatgtgtttgctcgcctcctccgtatctcgtccactcagactttgccatctgatagcacttcagatttttctgtgttagtttctcaaactacctctcgaggaggacgcagtggtacgcgaggtagaggccaacgtcctcattgcacctattgcaataaacttgaccacactcgcgatcgttgctatcagttacatggaaggcctcctcgcactgcccatatggcccagtcctctgattctccgctgcttcagcctccgagctcctccgcatctcagacatctcaggcttctattgcctctgttgcccagcctggtaatgcctttgcctgccttacccacacatcttctcttggaccctggattctagattctggagcttctgatcacctatctggtaataaggatcttttctcctctattactactacctctgctttacctactgttaccttagctaatggttctcaaactgtggctaaaggtattggtttggcccttcctctgccttctctacctctcacttctgttctttatactcctgaatgtccttttaatcttatttccatcagcaaaatcacccgtactcttaattgctctattaccttttctgataaatttgtgaccttgcaggaccggagtacggagaagacgattggcataggacgtgagtctcaaggcctctatcacctcacctcggattcatctcctgcagtttgcatttccactgatgctcctctcctcattcacaatcgtctgggccaccctagtctctccaagttccagaagatggtccctcgttttttcactttgttgtcgcttccatgtgagtcatgttagcttgggaaacatactcgtgtctcgttcccgaagcgtttgaataatcgggcaaagtctctttttgagcttgtccacactgatgtttggggtccttgtcggactgcgtctactttaggatttcagtattttgtcactttcattgatgactattctcgatgtacttggttatttttaatgaaaaatcgagttgagttattctctatttttcagaaattttatgttgaaatccaaacccagttcaatatttctattcgtgtgttacgcagtgacaatgccagagaatatttttcagccccatttacttcgtttatgtctcatcatgggattcttcatcagtcttcttgtgctcatactcctcaacaaaatggggtagctgaacgcaagaatcgacatcttgttgagacagcttgtactatcctcctccatagtaatgttccttttcgtttttggggggccgttgttcttactgcttgttatttgattaatcgtatgccctcctctgtcttacacgatcagattcctcactcccttctctttcctgaccaaccactttatttccttcctccttgcgtctttggttgtacttgctttgttcatattctcactcctggacaggacaagctttccgccaaagccatgaagtgcctcttcttgggatattccagacttcagaagggttatcgtcgttattcccttgagactcatcgatactttatctccgctgatgtcaccttctttgaggactcaccattcttttccaccacttctgagtctcttcctgtttctgaagtcttgcccattcccattatctccccacctgatgctatgcctcctcgaccacttcaggtttatcatcgtcgccctcgtgtcgttgctcctctcccttttgctgaggcacctgctgactcacttcctatcccttcggcttcacctgccccgactctgccttctcctaatgacttacccattgctgttcggaaaggtactcgctctactcgtaatcctcatcctatttacaattttttgagttatcatcgattatcttcaccctattctgcttttgtttctgctatatcctttgtttctcttccaaagagcacctatgaagctctttcccatccaggctggcgacaggcaatggtggatgaaatggctgctctgtactctaatggcacttgggatcttgttgttttaccctctggtaaatctaccgttggttgtcgttgggtctacgcagttaaggttggtcctgatggttaggttgatcgccttaaggcccgcttagttgctaaaggctatactcaggtttatggttctgattatggtgagacattttcccctgttgccaagattgcttctgtccgtctgcttctctccatggctgctatgtgttcttggcctctttatcagttagatattaaaaatgtcttccttcatggtgatcttgccgaggaagtttatatggagcaacctcctggttttgttgctcagggggagtctggtttagtgtgcaggttacaccgttctctatatagcttgaaacaatctcctcgagcatggtttggccgttttagttttgttgttcaagagtttggcatgcttcgcagtacagcagaccattcagtttctatcatcataactccttggggcagtgtatttatctggttgtttatgttgtcgacatcgtcattacaggcaatgatcaggatggtattcaaaaactaaaacaacatctttttacccactttcagaccaaagacttggggaaactcaagtatttcttgggaattgagatagctcaatccagttctggtgtggtcctttcccaaaggaagtatgctttagacatcttggaagaaatcggtatgttagactgtaaaccggtagacacacctatggatccgaatgtcaaacttgtaccagggcagagggagcctttaggagaccccgggagatatcaacggctcgtaggtaaattgaattatctcaccattactcgtccaaacatttcttttcctatgagtgttgttagtcaattcctacagtcaccatgtgatagccattgggatgccgtaatccgcattcttcgatatatcaaaagtacaccaggccaaggtgtgttgtacgagaacagaggtcatactcaggttgttggttacacagatgcagattgggctggctcacccacagatagacgttccacttcagggtactgtgtttttattggaggtaatctaatatcttggaagagtaagaaacaagatgtaatggccagatctagcgctgaagccgagtatcgagctatggctttggcaacatgtgaactcatatggttgagacatcttcttcgagagttgagatttggaaaggatgaacagatgaaactcatctgtgaaaaccaggccgcattacatattgcatccaatccagtctttcatgaaaggaccaagcatattgaagttgactgtcatttcattagagagaagatcgcatcaggatgtgttgctacaagttttgttaattcaaatgatcaactagcagacatcttcactaaatctctcagaggtcctaggattaaatatatttgtaacaagcttggtgcgtatgacgtatatgctccagcttgagggggagtgttgaatataatgtatttatagtatataatctttccttgttaatataggtcacatgtatggtagttaggactcctagccttgtatatatatatttctcaattgtaagtaaactgatgaatgtgaattaaggtttttcttctttctctctctctcaacagttactatcattaaattccttgaattttctgggaatcacagttatatgttctattgtagacagagcctgaaatatgtaagtttgaacatatgatttttatggataaaatcttttcttggtgaatgtgtgtattctttcaattgtgttgaagcgttccattttgcattcattgaatttgtttttcctttacaattttgttctccatttggttgtgtcccttttgtatatgttctattgtagagagagcattaaaatcttttcttagtctctacttgtcacttgatttttacatttttccaatattggaccaaatcacctgttataacacacttgagttttccttttgcttggaagaaacagacacctctagtatgcaagacacgtgcattgattttgggagttgaaccttagtctgcttgcgtttaagaaaatatccttgaataagttatcataaacattccttgaaccgtatacatgaaattttatagtagtgtgttagaattgttgggaaccttggattactcaatttccaagccttggatcttgtagggtgcgtgcatctatccctagacatctctaaatctattgcaacgaaataaaataacaataaaaaccactattactatagatctagagacacagtatttatacctatggtttggatattcttagatcaaaatccatccgatgaagagcgtgtttgaatggtccagatgccttgttcatccaggatcttccgtctaatgacttgaatcatgatcttgacactccaaagtgtgggttttggaagtatggaaacctaggctctctctttctctctctctggaggtggaggacgtctatctaaagccatggaaaccctaaccctaacccctaagtgatttaagtgacttgagcccaccaaggcttgtgtcacttaatctagcccaaaatgggtcttaattgattaattaacccaatagagctgtttaattaatcaattaacttaatttagagaccttgttcaccatcttttgtgtaattttgtgtaattatcaaaatgcccttatgcacagagagtgaacctagagccactccaactctcataaatcgtgtcatcatggtatataagtttaaagtggggaccactgagaccaataggagtattgactcattcagaatccaattctgaagttgattcaacatcccactacagagaatcaattacattctaataccttatgtgaatatcaacaagacgaagcttgagtctgtgacctattatccactacatgtagactcatgaattggtgtttgtaatctaacaaggtaatgctatcacctatcaagattacttcttcaatctttgagttacaaatcccacttattatgtgatcaattaacatattctaggtctagggagcatttgtcaaattccattaaaggaattcttgaaaccacaatttcatgatcgcatatcatttagatcatccaaggggatacgccatcttaatcccatgagatatcatggtgcttttattgagaatacctgttgccactagtctctatccagagtgaccaaattcataaggatatctaaccactttagggtctcacctataggtcaaagccttttattgattttgacatagacttaatgtcctctcaaggttgagaattcatgcaatatagtagtttggtgaatcattacaattaatagtcttacattatgattcaccataggttttgtccaatgtgcatcacatacgctactgcactctcactatcggaaatctatcctgatggccaagacgagccatccctccaattaggaggtggtacattatagtctctactggattgtctaaatctatgaaccaactgtggataatttttttacttacaaggaacctatgacttgtatattctatgcaactcctaatgcattcaaatcatgcacaatgtaagagatatgggttgaatgcaaatcaatatcaatgcataaaagggatagtaagaggatagttaagtctaattttgttatgagtcttgcttttaggggctcaatcatgacaagaatgtatgttacttagtgcttttaaccttgtgatagttgtcaatgtgaaacttactccacttctatacagtttcaaccttctttaatgttgtatggagttttttttttttttttttccaggtatctggttttatataataatatctttatcctgtattttttttggatctccattttaaactgcaatgccttgtgtgcttgagaattttgtcactgagaatattgtgcacagcagaagaggccactattaaaaaactggaaatcgca

SEQ ID NO: 13171 - DNA, 748 bp, Vitis vinifera
  Intron number 2 from transcript GSVIVT01035262001 (locus G SVIVG01035262001) derived from phytozome v7.0 (chr-ID chr4 ; pos 11588091 to 11588838 reverse strand)
gtgatttcaggcttttcggcacgagcataatcatctataatcaattatttttaaaaatagatttcgtagaaacaattatgggaaattaagggcctgtttgattatattttttgaaacttgtctttaagaattgtttttaagttaaagaataaaaaacagtttttaaaaacaagttttagaaaatatgatcaaatgagactatgttttccttttatttttaaaaattaataaaaacacctattagttgttctttaaaaattgttttctatttcattttatttttaaaaattattttcaaagaataacagtcaaataattaagaatttttaaaatgattttctattttattttaaatatagaaaagtgtttttaagtcatacaatcaaacagactctaatgatctaaaaaaacttaattctttgatcgaagactgtaacaaggtggaagccactcacatcttcccttcaaataaaatcagttagtattttatatatagtaaggaaaacaccatcttttggtattttcatattaggttctcttcttggaaaagcattgcattattgatattatttaaaaaacttctagatttgaaatatcttgaataatcttaacatgatccagagtttacttagtccaattacagcttgcacaaaacatgtccaaattgtaaaaatgacgtttgtaaatgatatatttgatgcttgaaactccagattcgagggcaattataagatacattgtggccaag

SEQ ID NO: 13172 - DNA, 13744 bp, Vitis vinifera
  Intron number 3 from transcript GSVIVT01001532001 (locus G SVIVG01001532001) derived from phytozome v7.0 (chr-ID chr7 _random; pos 1064326 to 1078069 reverse strand)
gattttacaaggtacatggtacttttcactgaaaaatatcctttctgtgtttaatttggagcatgctgagcaaataccattctgctcatcccataactcattgaatttaaagtaagcattttgttttagtgcattctgaaagtttcagctttcaaggactagctcatcttttgggaatttcatgtttaaactagattgttcatggaacaaaactgtaaggagggatttatgtcaggatgtaagcaaaccctttttttacatttgcaatatcttattgctcagacctactgaagttagttggtattccttaccagctagggcaatgtcagttttacactgactaatattctcctaattgggcatcctatcactgatcaagtatgctcaaaagacaaaagcttattccttgatttttccattcaagttggtttcattaaaataattctttgatgctttctctattggttctgttgaaatatgaacataaaatccttttccaacaacattgttagactaacgctaccgtgttctccttaatgagtaatgtgcttttctctctcttgcttcatgttttttcatgaagatactgccacttattttagaacttcataaaaggtactgtatctaagtgacaacaatgtttcaattattgtatccatgtgcaaattgatacaagcttgttgataggcctacaaactgctggtgttaagatatgatcatgaaagttggaaatcagaattttttattatttaagacgaaaatgagtataatttatagactaccttctagattaaaagcaggaaactaaagaatacggtcagaaaaaaggaaactaactcttataattgtgcactaagttaggaagaaaacaccaactacaatattctacagctgtacggttgatatatactattttgaaaggggatagattccctggtttcctattgcaatgtggggagatcaacctttgggttctccatttccaggattattcagaatagtcataattaaaaaccatcatatttcatcaattcttggctttacttatccttttctcttggaaagttaattgtcgttgtaacttttctaattttgaggtagaagatctagaaagacttatgtcctctcttacttgtttgcacctatctccatccgttccaaatgcaagagcttggtctttatcatcttctttaggtttattttatagtaaagtcttgtccaaccattctggtccaattcttttttttcctactaattttgtttgaaaatctcaagtctctttcaaggtcaagtcatttgcttcattagtggcacacaagaaggtaaacaccaatgacatgctacagttgaaaagaccctacaaagcccttagtcctcatgtttataagttgcgtaaggagcatggagaattggtagatcatctcttcttatattatcctttggcgttggagttatggtacaaagattggccaagatggattgggttcttgaaggagtatttgtgatatgataacaatctcatttaagggatcgggaagctccaggagagacctagtactatggtaaacaacttatcttacttgaaagaaaatgctaggattttttaggacaaggcaaggacttagaaattctttgggataccattcatttttttacttctttttgggcctcttacactacaacttttaagggcattccctttaatgtggttcaacttgatacattatcagtgtatagttctaagggtgtgggttagtaaggagaggttgttatttgtattcaccatatggtttaaggtataccacaaatgtttaggtttacttagtactttggaggttctatttgtttagtttttgtttgtggggggattcctaatccttttattgtactttttacttcatattttaatatattacattgttgtttcaaatataaaaaaaatccaagttttataacactcccccttaagctggtgcatacatgttgtgtagttccagcttgatcaccatgaaatcaaacagagtacttgacagccccttcgtaaaaacatctacaagttgttgttgtgtagatacaaagggtgttgtgattttttgggcttcaattttctctttgaagtgtcaatccacttcaacatgttttgttatatcatgttgaactaagttgtgggaaatgctaatggcaagcttgttgtcatggtgaatctttgttggttcattgaattctaacccaagtactttgagtagacctcgaatccttaaaacttcataaatgcatagtaatatagctctatattctgcctctacacttcatctaagcacaacattttgctttttgcttctccaagtgaccggattgctcccaataaatgtgtagtaccttgtggttgatcttcaatccttgattgacccaaccaatccgcatttgtattttcctctacatgtaactcaccatttttcttgaagattaggccttttcctagggtagccttcaagtattttagtatccgtagcacaactttcatgtgacgttttaggggtgagtgcatgaattgacttacaatgctaaccacataagcaatatcaagtcaagtgtgggaaagacatatcaattttccaactagccattgataccttcctttgtcaactggaacaccttctagctcgactcccaacctatggcttggatctataggagtctcgcttggtttgcataactgagatcgagtgtatacttcctttgagtaaccgagatgccccctttaaaccttgccacctagattctaaggaagtactgaagattgtcaagatctttgattttgaattccttggcaagaagtgatttcacatatatattttttcttgatcaccacctatgacaattgtcatccatataaacaattaaaatagtaagtttcattagtgaggattgtttgtaaaacaacatatagtctccttgattttgacaaaacccataaagtttagagacttggtaaacctcacaaaccaagctctaggtggttgcttgagaccatatgaggattttttttttcaatttacaaactttcctagaaccatttatcttctcaaaacctactggcaattccatgtacacctcttcttcaagattcccatgtaaaaaaacattctttacataaaaaagatgtagattccaatcatgatttgcagcaatggagagaaggactcttatggagctcatctttgcaactagggaaaaagttcctttataatcaatatcagaagtttgtttgtacttagtgctaacctagccttaaatctctctatagatccatccgcttggtacttaatggtaaagacccatttacaaccaataggtttcttgccacttgacaattctaccacttcctaggtgtcatttttatgtaaggcactcatttcatcaaagacaacttccttccacctaggatctaatggagcttctttaataatgtttggaataggctctagggataggtttgtggtgaaggctttataagttgattttaattggtaataagaaataaagttggctaatggatgttgggtgtaggttctaacaccttttctaatagtaatgagaatatctagattgatatctaaagaagaacaaggttgtttagattctagagtttggaggaaagttgaagaagatgaagtggaagaagaagaaggagaagaaatatttttcatacctttctttgaagttaaatattttctgcatgaaggaaaatttgggactataactggaggatgattatctcttttccttctagtttagaccacaggcgtttttttcgatttctttgttaccttctttagatctcagagtgttatccaactgttgctcatgagtattttatctccctgattagttatctactgtctgccttggattttcattttcaatcattcctccaaagttagtctcagcttgtatgaattccaataaagcgagtattataatggctgtaggtttattctggctgagacatagtaggttttctattttcccttcctccccttgaaaacctgtctaaattaataagatgaggtctcaaagaattttacatccatggtcacaaaggttttcctcgtgggagggtgaaaacacttgtatcgttgagtggatgaatattgtacaaagacacatttaagggctcttagttcaagcttagactaatctttcccatgaatatggacaaacgctacacatccaaatacccgaggaagtagagactttcaaaaggtcaaggggaactttaaggttaagtggttttttatggcatacagtttatgggatatgttgttgtatgaactacctctccccacaaaatatcaatgttctccctacttcccacaagcggtttttttttcctctcagtcattccattttgttgaggggtgtctacacttgagagaagtatacaatccaattctccaccaagtaaggacttaggatagaattaaaatagtctctcgcactgtctatccttagaatttgaatttggctatggaattggtttagaattattttatggaaggctttgacggtttgagtagcttcagatttatcttttaggacatatatcgaggttatttggctaaaaccatcaatgaaagtaatgaacaatttgaaaccattataagtgtttactcttgaaggaccccaaatattattgtggatagtagaaaatggaattttagactattggttactcaaggggaaagatacactacaacttttagctaactcatagacttgagactgaaactttgagacgtcaacattaacaaagaaatccaaacacaaagctttaagagataagaaacttgggtgacccaatctttagtatatcaaccagatctgctcctctttttcttttaacaccttagcgacatatcctagagcattcttcatagtcttggaatcaagataatacagtccctcctctttggcactgccaatcctctttcctgtagttaggtccaaaaaaatgcaatgagaaggataaaaaatcacacgacagtttagatactttgtaagtttactaaaaaaccaaaatggagaatagataataatttgactctagaaattccttttgagggtatcaccacttctgcatttcatttgaatttccatgtgctttaggagtatgctttctctggatttctaagcagtcaatgtacccaagcaataggctctgctgtttttcctttgtggctcttgcatatgcaaggaaatgtcatgtttgcctttgatgttgtatgaggcatattgagttgagattcctatatggtatatgcaacccagccagtcagaacaatgccggtaacatcccctggtggtcggtgctggtttggtgttgagttgaagacttttgagattagcatagaagaacacaaaggaaaagtgagcggtaagatcagtgaaagaggccctaagttttcttcatgggtcaaatttggagggaaaggtttatctctgctgctagaaggggttgagtcatgttgtgggttaaaggaaagaacccccttcaggaagctatggtcggaaagagatagagaatacagtctggagctccgaaataatagagcagggagattcttgttttgcattgtaagagatgcggggaacaaaagattttcactggctttttctgaagggagagggtttgttggaggctggaaaatcctcgctagtaaactgagaagtttgggagtctctccccttccatggaaaggagctctgttgaaaaaccacttaccttctcaagcttcacccagcagtagtgtagtcagagacacatctcctcttagggattgccccgcgcctcgagatgccatctggctagaaatggagaaagcaactctggataggaacaaggaattgctgggcagatgccttgtgggctcttgggaaggagactctgatcgtcttccggacctcgttcccttcgggccgtggacgaagaactcatggctcttggaagggaacctctgggtgtcaaatatgagagcaaatctcttgcttctggagtttgaatttgaggacgaagcagagagggtgtttaactcagggtcgagatgcttcagaggaagaagcttctccctagaaaaatggaagccatctgtaggatgccttgagggtgttagaggggatgtgcgccacgtgtgggtcagaatcttaggccttcctctgcatctctgggacagaagtctcttcaagaagtttggagacgcttgtgggaagttcgtggctgtggacgaatacactgctgatcgccggaacctcaagtgggccagagtcctcgtcgaaaccagaggctggcaacacccaagttcgctgcaggtggttgccggcccctcatgttttgctcttcaactctggtgggaagaagagccctgcttctcccccgtgatcccctcccatgggcctggtgtttggaagattggggaagacgaggtggccccttcacgcgctaaggggagcgtggactcccggccctcttccacagtcctcctgcaaactgtaaagctgccctcgccggccttggggagtggtgcccctacctcggacaagacaggagcagctgctacctcttcccgcgcccacgaagttgagacgggccggcatcccctgtcccttgccagtgatttggagacgggccaaggtatgggcgccttggcccattcgggcctggcttgtggcgtttcctttgggcctgggctagggaaggcacaggtctcagcctctatggggtctccccctaagccccccgatccagtccatttaaaggaatttgggcgtggaagccctaagtgcttgtcgagccgaaggagagaagcccccgctccggctctcaccttcgcagaacatccccagatgaaagcgtggccccgtttggacatgccgacgtcagcgaccgagccttccctccccggcgaagcttgcaaaattccccagagacatgcgtcgccccctttggatgcgtcgatgtcagcgattgagccctccctccccgccgaagctcgcaagacaccccaaaggcaggcgtcgcctttttcggaagaatcgccgcctgtgaaggagctttcctctcctgtccaacctcgcaatccacaatgtactccttctctaccctcgatctcgtcgaaaggggagccatcctcttcttctactccattctgggtttcggggcttgagaggggtaagggtcgatgctctagtccgtggaaattgacgacaagggaagaggaagcgacgccgaaccctctatccatgatgctcagagatgggacgacagtggttctgaaggaagccccaagctctgatccggaaattgatgtggcgaagtagaaagacctgtcggttgctcatccacgcgaagaaggatggtcagatgaggagctctccaagctttttcattttagtagtgtcttgggaatgccggttgaagggcatgaagtagaaattctggccttgcttaagaaactgaagctgaggactggaaataactccctctgcaagagaagaaagaagaaaaaatcttgcaccacccgctttgaaagagagttaaaaagattggaatgctctgttagttatggggagacatccgggataaccaaaagatccggtcataactcctgggatttgattccagttgattaatgagaattaaaattctctgttgaaacgtccgagggatcaatgattgtgaaaaaagaaaactgattaagggagtggtgaggaatcaaaaaccagatttggtttgcctcttggagacgaaggtgaaagatgtttctctgcaattggttaaaagtgtgggagtaggaagatttctcaattgggcttcagtggacgccaggggtgcggcaagaggcctcctcctcttctgggataacagagtcttggagaaattagagatagaaagcggggagtactccatctctgttcgctttagaaattgcgctgatggattctcttggattttctctggagtttacggaccagtgataggtagtgaaaaggaagatttttgggaggagcttggagccatccgtggtctgtgggaagacccctggtgcataaggggggactttaatgctgtaagatttccagaggaaagaagaaatgcccttagactcacaacggagatgaggagatttacagaagtgattggggagctggggctgagggatttcccactggctggaggtcctttcacttggatagggggtttgaactctcaagctgcctctagattggaccgtttcctgatctcagacccttgggaggaccacttctctgccatcactcaatctgctctccctcgcttggtctctgatcacagccccatagttctagaagctggtggattctcgacaggcaaaagcccctttcgtttcgaaaatatgtggctgaaattagatggtttcaaagacctagtaagatgctggtggaatggctattcagtcgaaggctatagcagccattgcatcgctgagaagctcaaagctcttaagaaggaccttaaaaactggaacaaagaggtggtaggcaacgtttcttttaatagagcagaggccttttcccgcctgcagcgatgggaggccaaggagaatgaaagccctctgactcctggagacgtggaggccaaaaaccgggctcttgaggactacaagaaatgggctctgctggaagaaacttcttggagacaaaagtcaagagaaatctggttaaaagaaggcgataaaaataccaaatatttccacaaaatggccaatgctaaggcaagaaggaacttcctgtctaagataaaagtgaatggtgtgaatctctcttccgtggaagatataaaagaaggtgtttgtagggcctaccagtccttgctctcagattctggggattggaggcctagtattaatggccttaacttcaaggagctgggagaaggcttggccagcagcctggaagttatgttttcagaggaagaaatttttgcagcactaagcagcttttgtggtgacaaagccccaggcccggatggttttacaatggctttctggttgttttgttgggacgttgtaaaaccagagattttgggtctctttagagagttctacctccatgggactttccaaagaagcttaaactccacgttcctcttgctcattcctaagaaggaggggactgaagacctaagtgatttcagaccaatcagccttgtagggagtgtgtataaattgcttgccaaagtccttgccaatagactgaaatcagtgatgggggaagtgatttctgattctcagcatgctttcgttcatgggagacagattttggatgctgttcttatcgctaatgaagcccttgattctagattgaaaggcaacaacccgggcctccttctcaagatggacattgagaaggcttttgaccatgtcaagtgggactttctcatggatgtgatgtctaagatgggatttgggcatagatggattaagtggatgaattggtgctgctctacggcttccttctcaatcctcattaatggaagcccctcgggcttctttcgtagctctaggggattgagacaaggcgaccctctatccccctatctattcctttttgccatggaagcccttagccaattgctgtctggtgcaagaaatggaggctttatttctggtttcagagtgggaggaagaggaagagaggggctgatcgtgtcccatctcttgtttgccgacgacaccttaatcttctgtgacgtcgaagcagatcagttgcgttatcttagctggaccttcatgtggtttgaggcgatttcaggattaaaagtcaatctgagcaaaacggaggccattccagtgggggaaggcattcctatggagactcttgtgtcggtcttgggatgtaagataggaagcttacctacctcctacttgggtcttcctcttggagccccttacaaatctaccagggtgtgggatgcagttgaagaaagattcaggaaaaggttgtctctctggaaaaggcaatacctctccaaaggtggccgtcttaccttgctaaaaagcactctctctagcctcccaacctatttcctttctctctttgtgatccccaagaaggtgtgcgcaagacttgaaaagatccaaagggatttcttatggggcgggggtgccttagagaataaaccccacttggtgagttggaaggctatttgtgctactaaaaagaaaggaggcctgggcattcgaagtctatctacctttaacaaggcccttcttgggaaatggttgtggagattcgctaatgagaatgagtccctttggaagcaaattatctctagtaagtatgaccttcaagaggggggatggtgctccaaaggagtaagagaccgttatggggtgggggtttggaaggctatcagaaatggttgggagaactttcgttctcattcccgcttcatcataggggatggcactagagtgaaattttggaaggacttgtggtgtggaaatcaagctctagaggaagctttccccattttgtttaatctttccgtcaacaaagatggttgggtcgctgaggcttgggaggaagaagaagttgggggaagctggggacctcgctttaataggcaccttaatgattgggaggtgggggaagtagagagcttattatgtaagcttcatcctttgaccattagaagaggtgtggaggacctgtttcggtggaaggagaacaagaatgggtccttttcggtcaagtccttttatagtttactttcaagggacaccaagccccccttcccggctagaactatttggacgccttgggttccaattagggctagcttctttgggtgggaggcggcttggaacaggctactcaccactgaccgcttgaagagatttggatggagcattcccaacagatgttttttgtgtaaacaagaggaggaaaccacagatcaccttcttctgttttgcgagaaagccagaatgttatggcttctgatcttctccctttttggggtgcattggttgatgcactcctctgtgaaaagaaacctcttgggttggcatggttcttttgtgggcaaaaaaagggagaaagcctggagagttgcccccctctgcctgatgtggaccatttggaaagaaaggaatagaagggccttcgatgatattgagaggaacgatcaagatattaaatccatttttttgtacacttttgtgaattggattagggtatacatagaggatcacactttgtcgttgatagattttgttgactggttagccaccaagtaagggtcaggcttgtttgttcttttgtttttgcttcctcgtatacggtatactccgtgtataccctttctcttgccttttggctcttaatgaattttctttacctatcaaaaaactaatagataggaactatatttaggaacatgaagtacaaaatcaagagtaagtcttggtgtcactgaaattgaaccttttccaataataggtaccatcagcaacaataacttttttaggtttagagttggatttataagaatgaaaaaaaaaacaaaaaaattgctcacttgtcatgtgatttgaagcccctaagttgatgatccaaggtttagagtcacaagaaacgttaagaattgaaatagtgttacctgtttgagcaaagaaggattaagaattggaagtgttggacgggtcctgagttttcccaactatttttcttctgttgccacaccttcttttgatcaccttcatatttgatcataacttcttaagggttaagatatcttgagaaccattatccatcagtaaagatcactaagacaaggaaggggttctgtacccaagactctaccccatacgtcatcaaattttggtcataagccagccaggaagccaaatacttggtctggttccagcatctctgccatagttgcagcatcttcaagtgccaccatctcaaaatgttggaggagatctaattcctgccacaacaccatcagaattgatcctgtaatggttgttttcgattcaaggatctgagctgcattccctttcttggagaggcttttgtcacagcatcctacacctttttagccgttaaaaagtacaaaaagggtcgaccaatcttgggtttcatggagttcaacaaccaagaaatcaccatagaattttcagcgtccctaatttcaaattttggatctgtttcctttgtctctttgacactcccccagaacatattccatatttccttgactctaggaataatttggtcaattaagaccaggagaaaatattttctccattcaaattttcagtggtaatttgaagggttggattttcaaggctaggattaattttgacggaggtttgagtgagggttgaattggactcctcagaaatggacaattttgatagagaaagagtgaatggcaattaaggccaaggaaaaaaacataaacccaaagaaaattaggaaaaatgaattcccaagaaaaaaaaaaaaaaatgcaattatggttgtgaaagaaagataaacatcagaaaagattccagatctgataccataaaagtcggaatcagaatttcttgttacttgagaagaaacatgagtacaatttatggactaccttctaaactaaaaaatggaaactaactcttataattctacactaaggaaaaaacaccaagtacaatattctatagttgtacagttgatatatacaatctggaaggaaataaactccttgatttcctgttcctaaaaagttcatgctttctaacaaatcatatttttattacaggcagtatcatacttttcactaatatgtctaaaggtgaatatttattcctaattacaaggattggaaaaggcgacactggtgttataagaaatagcatttagggtttatttgggaggtctggtggtagtgatcaaaattatttggatcatcattttgtattcaaaatttcaaatatttcatctagaatggttcatcacagaaaatggcagtcatagttgcagatattcttaaaattttaaacagtgtcatgtcatgaaaccctgatctgacaacatgagctatagtgataggttccatttgttcagtgtctccatgatttgttctttcagttttcaatttccatgtgactttgcaatgaggccattctatgtacagggtacttccagaagaatgtccaacttttgactcacttctgtcaactagggttttcctcatagacaaacaaatattttattaacagtgccaaacaaagaggagcacctgaagtacataggtagcatacaaagggcaccaaaagggctcacttctatcaactagttatgatgataacaacacattcaaatctaatttatgcccatgatatgaaatttctggattaaatctgaatatagctgtaagctaatgagcattcatgtgccactttggtcttattttgatggtccattggaatgtcttgccccattgtattttatcatttaaaaattgtcgtatgagttatgagctttctgtttcaaaggtttgatgatggacttgtggtgtacacttcatcatttgcatcgaaataagtgttttggaatagggagttgcctttagctgtttgcttcatcattttcatcgagcagtctctctgcattctctgacatgtccctgtttcaggtaaagtgtttgtgg

SEQ ID NO: 13173 - DNA, 12316 bp, Vitis vinifera
  Intron number 1 from transcript GSVIVT01021072001 (locus G SVIVG01021072001) derived from phytozome v7.0 (chr-ID chr5 ; pos 14129148 to 14141463)
ctgttactcaactcggtggccccgatagtgcgttctccgatcttctcctctcaccttacctcttcaatttaaactctttccttatctaccatgttgtttgtgtgtctgtgatttctatttctttttttcggttgtgggttattattactattattattattattattattattattattattattattattggatgatgattaatttagggaccgtttggtgacggctaaaatcacagcaatttatttgccttcagaaacaagaaaaggaagctggaagtggtctaaatgaggtcattaagtgctttgatggttttgcgagttaattgcccttttgctgaacctaactgattttattgaaatcttattaatccatttttttttttaatttttttaaaataaattgggttcatttttcctaattttcctaattggaatgttagggaaatttaaatttcgtgctcctccccctttcggctgaatacattttgccaccgttagtttgagatttcatggaaatacctccccagcgctattggatgtattagggcaaatttgttaatccttctatggcacgctttatagtcgaggcattactactgtgtctatttgaagaagaagcaaatgcgaacttgaccagaggatgtaacactcttctaagtgtcacacaagtctcaaaccgccacaatgcattttaaaattctgctagttcacagccaagtggtgatcaaactgctctaaagttgctacatttttcttgctatgctctgagataggcttcacttaagtggaggtttcctaaagaataatttggctacatgcgaggcatttgccctatccaaacagggataaaatgttttgattaaaaataaggatacaatgtgccatcttggacaacctatcaaccataaaaaaaatagaatcatgtcttcaggccttggcaacccaggaacagggttgtgtggtatagtagaggaatgtaccaactagatgtctactatgcaactcctaaatcaaagaatctcaaaaagaagtatgaggaaggcatagcttttaccctccaaacaagtatccatcataatgacgaaattaatgtgatctcgatgatgacaatcttgaatttcttgataaatgacatcaaaattaggatgagtaagacatgcatccttcatccactacatatgaaccaatatgtggtcttgaagaaacatcatccacctaacattttcttaataggcaaacattatccaccaaacatgcttggcacttagctttctttgagagctaaggtaccccaatacttcatggttagtgtgcagcacaagttcttgagataatagataattcctccctgatgaagggcttacacaacaacatagaattctttatcagaagtggaatacctttgttaagcttcattgagtttcttgttggagtatgccatagaacgctcttcttgactaagactatagatcaagatatcatcaaaatagactactagtaactttcctatgagagaacacaaaatttgtgtcataatcttcataaatgtactatgcacattagataacccaaagggcgtgaaccactaataaagttcatcttgggtcttaaatgcagttttccactcctcttttgatgaaatatgaatttagtgataatcactatgtaaatcaatcttaaggaatcattctgattctgccattaaatctaagatgtcatctgacataggtataagaaacctatacttaatagttattttgatgatgcatgactatctatgcagtctccaagaacaatccttctcagaggtaagctaggtggggacaacataagggctaagactgttgaaaaaagcctttttccaatagtccatctacttgcccatttatttcagctctctttaggatccagtctatagtctatggcattggaaattagatattttacatctcataactagatcaatagcatgttgaatgttcctcatggatggtaactcactaggtaggtcttcaatggttgtatcttgaatctcaagttaatatgctattgttccatggatggtaactcactgggtaggtcttcaatagttatatcttgaaactcaaccaaaaatttgttaacttgagatgggaatgtgatatcgaaagctaaaaaccaatgagaaacgtttttaactaccatgagtaacaacacacctaaattatgtcattctttttctaactttttatttttattttttactttttgtttttttttattttttttatgggtgtccttctttctcaaactcatttcgtgttaatataagaaagttttgcttcttaagattttgagtaaaaatgttaggtgcctaagatgttgaattgattaattcaattgatgtctttaattgtggcttgctatcccttttagtagatttatcaaggcttaatggggtagacttactattatcttttaaccaataagtgttttccttaccataataggcaacatcaaagtcatatagccaagacctaaaagaatataagaaacatccatgagaaggacaccatcccagtttctattcaagtagtctcccattgtgataggaacttgacatctttcatatacaagcaatgaagttttgtctaccaaagttgctctatatggatggagatgtcattcaagttgaagtttcatcctagcaacaatagcttcaaaaatcatgttcatcgagctaccactattaataatgagcttgctaatttatccccaaatttaatataagtttgaaaatacatgcatttccacccattgttattgccagagaggatgaaatgcacctcatgacaataatgtgggtctcatcatccattctttttcaaaatcctctcttggtttagacatataatataagggttcataaacttggttataatctttgccttattgtgaatactcacccttatcctatagttagagtgtgacgtggacaacatgatgctatatgacccctatcgtgtaatgatgatactctatgttagaaacaatggccaaggattatcgaaattgattctccacccctattactgcttactccttaactagtgttgttattaccacgtgaaataatttaattggttttaacactactagtaacccttaatttgtttcttaccttattatgagataaacctcaagaatgataagagtccatagtttgagaagtcatacatctttaactaggaattttaagctatctcttaatgtgatatcccacatcggattagggagaaatttcttgatgttatataagtatgaacttctttttaattatgtagacgcattttaaagttgtgaggctatatctacactgttgcgagcgggtcgttacaaatggtatcagagttgatctccaattctagtgtgggggtttgtttggcctcgtagagggtgtttgtctatttgaccctgcaatcccgtgggacactataaggatgttgtgttcgcatgagaggtgtttgtgatattgcacatcagataggggagaaagttactagggctatttatgtatgagctcctcttaatcctgtagagacgttttaaagccgtgaaggtctctttgagtccagagcggataatacctatacggttggatgcaatttgttacaaatggtatgagagttgatccctaatctcgatatggggctttgtttggcatcgtgaggcgtgtttgtctgtttggccctgtaatcttatgggacacaacgaggatgttgtgtctgtatgaaagagtgtttatgatatcctacatcggataaaggagaaagtttttgacgctatataagtatagactcctcttaaccatgtagacgcatttgaaagttgtgaggacccctttgagcctagaatggacaatatctacactgttgggagcgggttgttacaaatggtatcagagccgatcctcgaccccgatgtgggggggtttgtttggccccgtagggggtgtttgtctatttgaccctacaatcccgtaggatacaacgaggactttgtgtctgcatgagaggtgtttgtgatatcccacatcggataggggagaaagttactggggtaatttatgtatgagctcctcttaaccttgtagagacattttaaagctatgagagcccctttgggtttagaacagacaatatctacatgttgggtatgggttgttacactcaaattctaaaccttgtgatagccttcctctaaagtttcaggagaatgaaagttcacctctcttttaagttctaatctcaacccattaatgtattttgccacaattacccaaggacctaagattcatctcccacatcgcatctcaattgaatctccttaaagtgagctaagtggtctgtcacattagaggatgattgcctaaggttaatctattgatctagcaagtgtctcttatgatatgtagggacatatttttcctttaacttttgtttcatttcaactcaaaaggtaattggttcctcacctaaacgctctagggtagattgaacagtttgtccatatcgttcaataaaactaataagtctcattttagtgaagcagatgtattaggtgtaacatatcatagggtttaaagtaatcctcaagatcaactaaccattcaaggaaaacattaattgtccatcataactaggggtatctactttaaccttggttatatcacttaaattttcatgaggccttggtacatgtttcaaaggtatatgcctgataggccaaccaaagttcttatggtaaccctctctttgttttggcatgactgagtcacttccccatgtctcctgtgttgggataaagccttaaaaagcatgacatgatgtaatagatcaaaattcatttataaatttatttatttatatttcttgcggtttccctttgttatcccatatgcattagttggtcatctaagcctacatgtttatattagttgcattgtacatgatttgagtacattaggagttgcacaaaaaatacaagtcatggatttcttgcaagatgataagttgttcacaatcaatttatggatttgggtaatctaatagagactgtaatgcactacctcctaatgggaagaatgacttgttttgtctgttgggatgagtttcccatggtgagtgtactagtgtgtatatatattggataggacctacggtgaatcatgacataatactattagtcatcatgattcaccaagctatatactacatggactctcaaccttaagaggatattgagtttatgccaaaatcaataagaagttttaatttatgggtaagaccctaaagtggtcataaatccctatagattgggtcattgttgatggaagttggtaataacatgtattctcaatagaggcaccatgatatcccatgggattaagatagtgtctccttgggtgatccaaaagacatgtgatctagaagattatggccataacagtccttagtggaaatttgacgtatgctccttgaagttagagtatgtcaattgattctataataggtggaatctataattcaaagattgaagaggtaatcttgataggtgatagcactatcttgttagattacgaacactttttttttttttataacttaggaacctttcatgaccaagcccttaggactctccatggaggcccaaacctccgagtgctgactgccctacaacaaccagcaccaggttgttgtgaatagtagtggatagtaggttatggactcaaatttcattttgttatcatttacataggatactagagtgtaattaattctttatagtgggatgttgaatcaacttcagaattaaattttgagggagttagtactcctatgagtcctagtggtctttgctcgagctcatatactttgatgatatggttcatgagggttgaataagctctaggttcacttatgtgcataagagtgttttgataaattacacaagatcgcacaagacttagtgaacgatatctctagattgaactaattgattaattaaatgacattgttggattaattaatcaattaagacttttttttaagtaacctaagttgatgtgggctcaagtcacttaaggcaaatagagaattctataaattcccctttaggggttcggatttcaagttagtcatcttccaccatccagagagaatggagagaactttagcctccatcttcccaaacactccactgtttgagctttatgagtctagagcttcatcttcaaagaatatttaatagcttgattggattgcacaaacttaataaataggagagtctagagctttaagagactttgcaattctatatattgattttacttgagtgatttgcaaaatatatagactttatgacaacaaataagaataagagagagcctatgataactaatagataagaatgagaatgggacttatcataacagggatatagagtcctattactaattctaataaggtaactcattttccgtgcatggatgactcatcgacatgttccctctagtgaaaccatggggattgaacaatagcaagcttttcttttagtaagtggaattgagagatagataatgactagatattgataggttgatcttttattggcacatattttatctccaattctttggcaataaccttgtctttgataaaacagacatcaatctcaatatgttctgttcttgagtggaagactaggttagacgcaaattgtttaacctctatatcgtcacaccaaactgtagggtacctatttatctcaattccaaagttcagagaataaagatggtaaacaaataagttctattgtagcttggcaagggcacaatactttgattcaatgcttgatcaagtagccttttgttttatggagtcccatgcaactaagttcccaccaagataaatacaataacctattatggattttctattgtctagggagctagcccaatcttcatcaaacatacccttcgagtgtcatttctactattggtgagaagagaatcccatagtcaagagtgccatttaagtatattagtatatgtttacaagtttgctagtgattaactgttggtgcttgctaatattgactcagtttatttacaacaaatgatatgtttagcctggttagggttaggtactgcaaagctctaatgatgctcttgaatagagttggttgtttaaatggatcactgttagcaagctgaatttttcttccttggcacataggcattcggttgcttttggcattcgacatgttagccttagacaatagatcattcgtataattcttttgacttagattctagacttggttctaggagcttcaaaaccaaggaagtagtttagtgatcccaagttctttaaggcgaattgtgcatttaagctttcaataatcttttcatcttaacttgatcattcgtagtaatcatgatatcatcaacgtacactaacaatatgagaattgttttttcagacttgaacataaatagagagagctatctaatcacagagcatgaagaacctaagtgaggaaagcgcgcattgaaagcgcatctcaatctaaagttagctcaacaatgcactatgaagagcccaatacaaattgcgcaccttgggagtgtcaatctagattgcacacttggagaactgcacttaaattgcgtacctttaagtggcagtttatattgcgcacctaggggcttagaggcttaacttgcattatgcttatcatagaggagggcacttgaggaccctgctcaaattgtgcactatttaagtgcgcttgagtgaatagtgcacctctcttaggagtttcaacattttgcacttacatgccttgccccaggcctgcacaactctcactaagtgcactttagcacaatcataagtgcacaattcgtttgccaataacacaatgcacgttagtgcagtcctaagtgtgcaattttccactaataaagaagggcatttccccaagaatataaagtgcttaattccctcccccaacaacaaagtgcaccatagagagcatctacaccagcgcattgccttgatcactccactttgtgctcttaccaattcttctgatcattgcacattcattaaggcaacatctcaaaaaacatctttagagctttgattgatccatccacatcactatgccatcatactaaaaaagaggggtgtagccagccattccaaactaccacataaaaaaatgatggctacactgacacactcaggtcatgagtatgggcacaaggtattattagatgaggtagctgtagagtagttggagaggggggaaattttctcctataaaaaacagaaaatgtaaatatacaaaggagaggaggaaataagagggaaaataagttagatatttgttctcaggagtaagagtatgagtaacttagtttttggctataatcttgcatttctttttcttaattttaatgaatgaaaagtctttcaattctttcaattttattttcaattttcctttttcatttcctgcttttgttgttttgtttccttaggtagtgtttaccactctaaggtgtgagaggagctgaggtctccatgtcttagtccagctcactggtgatctaaccatgcttagtttaaaagaatctaacttgggacagtggttacaataaccatggggagaagaggttaggatgttctagttgtgagggccaaaagttaagcaaccttagtaacatacctgtgctttactgcaagggttttataaattaaatgcataccttttgacatgcggaggaacccatgtgaaccatccaattgcaaggttccaaaagagaacaattggattgagttgatatttgttgaggtggttaatgttcatgtcaattggaacctctttggtataaacccttggcatgatcctaaagttgcaagcacaagtttagagtcctattaaggagtggagcttgagagaaggaatattggtggatttctgctcttggagtttgctttcctttagttttctagtttttaggttccctcttgctctcattttgaaatacatttttttgagcttccaatgtgtactcacaccccaaaaacttgtatctctagaattgatctaaagttccttgtggagatgatctgaacgctatacaactgttagttcttttattttctgttcaagaactctttttgataaacttctattgcaaaataatttacttttccttcatttaaaacagaaacatgatgatccatgggtacaatccattgctaagcttctcttgcaacagtaccctctttgtaattttgtccttgataaaaaaaaaccatcagagtaaaattcagcaatgacgttgttgccgttagtaaattggaagacacttaacaggttttttggttattttgggatatgcaaaatatgattcaggaataatggttaaaaatcagcatttgaattaattaaggactttgcaatatgagaaatatgacgtagctgaccattacctacaaccggctactcattacctttgcagtatgtcttttgagaaagtgtattcagattagctgtaatgcgattagtagccccactatcgatataccaagcttcatcattgatggttggtggtgaagtaatgaatgacctttgtctccctcacaattgacaagttggtctattcaagtctctatgggcacctcaaccacaacttctaccacagtaattgttgtttagagctcgactgaattgattgttgttgccttgattgttgatgctaggtttaacattatgattgaagttagcagccagatttgctgttggattattcagatctactgcagcagctgaatttatttgttctaatctcatttcctagctttgtaccataaattggacttcttgcagggttacctcatcacatcgagaagtaagatttatacaggatcatacttctgatccactcctccaagaatgtacaaaattggttcctcatcagaagttagctgtactgcagcagacaaattctctgcaatagctttcatctttagtatataatcatttacggtcatggatcccttcttaattgactgaagctgaaaacggagttgcagtttgtgcaattgtgtagtgaataatttttcaagaatactccagacttcatgtgagttagtaaaatgtaccatatagccaaacatggcctccgattgaatttaataaccaactcattaaggactggtcagttttcttccagatgacaaaactaggggttgacttgatgtaccgcaccaggatcctctctgtagaagaagagagatggaaggaataaaaggaataaaattcttttccttgatctttagcttgtatagatactcacataaatatatgaaaattcctagcaccaaaattaggaactttcctaacttaattacatcaaattcctttgattacgggattgcctaattctcttcttaattgcaatatcacgagtttcctaatttcatccttccacaatctccccgaatgctatggtcaacatattgaggtgggcgtggtcccaaacaaataaccttccggctcatgagcaaggactgccggcaagacttgtgagtgctagaaggtgtagttgtttctgtctagtttcagcattactggagcgaggttctgaaacagcaaaagttgagacagaataaagatttgttgattgctttgagaggaggtagccattgacgtgaatgaatctgctttgataccaacttaataaataagagactctagagctttgagagactttgctattctatatattgaatttacttgagtgatttacagaatatattgactttatgataacagataagaagtgagagagagcctatgataactaatatataaggatgagcatgagacttctcataacagagagataagagtcttgtaactaatttttgataaggtaactcattttccatgtatggatgactcttcaacactcagcatcctcaaatgacctatctctctccttccaaagagtccaaaacaaacataagggggcagccctccaagctctcttccacttcttctccataaaagaacagtgccaacttagaactttcctctaaccttcacatctattcttgttctacctgtctttgcataccaaacacacccatatagtaagttcatataacgtagataaggttgggagatatgccactgtgaattcattcttttatttttgtccacagttgctactttgatgatatgcattttctattttattcttgtaatttacttgagtttgataggagcattcatggagatagcaatgtacaatccatctcgtatcttttgtgtgctgatgaattgctaactcattgacttaacaactgttccattaggcaatcaatactttttattttcatcttttcttccataatttgagtagttgcagtttgtgaatgcaaatgggctatattatagcttggatgaggttttctgaatactgaccccaaaccctaatagagagagaaaaaagagaaaaaaaatgcaaagcctagtcatgcctatgctgggtgttgggacacaatctccttgcccaagttggttcatggtaaactaggaatacagctgagtccaacttgactttaccagtaatgattgtgctaggacgtagcttataaaccatagtcctggttttccaggtccttgttgtggtttgcataaagaaattctaaaatcttatatggcattgatgaactctttgaactaccagagcctgaatctgttagtaattaaccatagggtagtttagaaaaccaattgtatagttgattaagtagctggaaatgctgtaggttcacccatatttgaactctcatacatgcatgttacatgaaccaagaatttttgagttgtggttgtacctgggtgggccaattcttgtgcctccagaagagctcctaggttgtccagtttgaatccagatttggttgaattccccccagactagcatacatatgtgtatatatatacacatatgtatgctagtctggggggaattcaacgaaatctggattcaaactggacatagatatatatatatatacacgcgcacatctcataaatcagtaccaacttttgtgtagctgccaactgtacatagatgacatacattttcttcttttcattatttggattttgaacattattaatgggttagtgatctgactttttggtttatcctgttaaatatggtagaagcaactccaaagaccatc

SEQ ID NO: 13174 - DNA, 15907 bp, Vitis vinifera
  Intron number 7 from transcript GSVIVT01016759001 (locus G SVIVG01016759001) derived from phytozome v7.0 (chr-ID chr9 ; pos 1062706 to 1078612 reverse strand)
taggcttgccaaggagttgagatcactgaatatggagatgggagagaaatggaagatggtgagtgaggtgtgggtggagatgttgtgctatgctgccagtcattgtggatggattcaacacggtcagcagctccggcgaggcggggagttactcactcatgtctgcctgattcccctggcgttccccccccccctccccctgggcccctggagttccccccccctatttccccggaactttgatgccacttcttgatcacgaggaagcttgtaatttgaacatctcatttctttcgtgactgctcgatgtgggatgggattcaagtagggtaaagaaatgccaaaataagaatatagaaagaaggcccaattctatggcccacacttcctcggccttatgttccctcaagcactaaacccgatcactaaattggaaatttaggctatgtttggttcccggaaagtacaaaggaaagaaaaaaaatgctaagaaaaatgattttctcatgtttggttgtcctatgaaaaatatcaaagaaaatcaaatataattaaaactaattaaaaacttatgtatttttaaattatttaatctttatattgatgagttaaaataaataaaatgagtttgaagtaacaaaaaaaataatttatcaaattttaatctatttttttattttccttcactttttctttccttctacttttcttttgtattttctttccctcgtattttccctcaaattttccgggaaccaaacatagccttaggctttatttatttattttaaataaaaagtttctaaaaacagattaggtccataaaacactctttacttttctttttttttttttgtttttttttacctaaagtgtgattagagaattttcagattcacatgatgaggatagaaccttcgtctcgcctataaggaaagagggggttgggcacaaaaaaagagtaatttaacatatttctaaatgcttcaaaataacaagatttaatataataacaaaagtttataataattatgtttgattactaacaaagtgttgaaaattatctagattaagtcgtattaattatttagtggtttttatgtgatacatttatgaatttgtaattgaatccaatgtttgattatttagattaattctttaatttttggatttttaatttagagaaaaacatcaccacctaacatttgatttttcaaaattaattaaaattattaactctagtggatatttagatgcatttgaattatagtctagaattttaattatagaaatttcactaaattggaaattttgtaataaattcacttataatataattttttttattataattttattgagaattggatgagctacgatatcatgtagttaaatctcagttttgattttggaactttctggatatattttaaattcttttcttatcaaaccaagagatttttataatatttgatttgttttatttagtaagaattcattaaataaattttaaatttacttgaaaataagagaacaaaatggggacaaaaaacaacttatcttagtcatattcaatcttttttaatgacaattttactaatatatgataaattatttctcacctaaattgcatacaaaatttttaagattgaattttattttattttaattttttaaatgagaaattgggtgtaagtgtaattgtagttaccaaatggctacagctgcccaaaaaatgaaatgcaagcaaaacagaggaaggagaaaattccaaataagggagtccatatctaacagaaatgaaaattttctagactaagttgtattaattacttagtggtttttatgtgacacatacatttaaatttatgcatttgtgattgaaagtatatttgactattcaaattaattctttaatttttggttttttaatttagggaaaaaaattaccgcttaaatttggatttttaaaaattaattaaaattattaactctagtggatatttagcccaatttgaattattctctacaattttaattgatagttgattttttttaattgtattataatgagctaaacttaaaattttataataaaaaaaaattaattataattttattgacaattggatgagttatgatatcatgtaattaaacctcaattttaatttcattttggaagtttgtagatttattttaaattcatttcttatcaaattaagtgattttttttttattatttgattttttttgttagtaagaattcattaaataaattctaaatttacttcaaaaataagagaacaaaatgagggaaaaaaacaatttatcttagtctatcttagtcatactcattctttttttaatgacaattttactaatatatgataaattatttttcatctaaattacatagaaaaattttaaattttaatttaatttaatttaattttaattgagaaattgggtttaaatgttattgtagttaccaaaattgtaagaaaaacagaggagaaaattagaagaaaactgaggaaagaaggtgacaaaaaaaattgaatatataataggtgaagcagagtatgtctgtctcttgaaaatttgaactcaactccatcactccaactttcaaaacccctcaccatctccaattaagtttggcagatctccacagttatcaatggtgggtgtagggaccccgccctctgagaacacgtgccacgcatctggccgagacacgtggcacgtatcttacagtgacccatggcacgcattgtcatccgggtcaccctcatccggaccttcttataaagcacacatggcgcaccttgtatatccggactgcctcaaggaagagcaaacgacgcttacgaagcataggcatccggacggcttccataaatacgtccgctccacaatacatccggataaccaacatgggctatccggatatgattgtccggatcattgactaaagtaaagcgagtcttacacgctatcgcaacaaaccagccatggcccacgtcccatcgcctgtagagtgaaaggacgagttgaggtgacaacaagtcacttcccacgatcattctacatgatcacttcccacgatctctgatagcagcatcacctaccatggtttctgacagccgccagtagggtggcgatgaccatgctgcctccgaatgtcatcatgacaaacataaaatatctcctcgccattaatgagaggaacagtactcctggcactatatatgaacctttgcacgaagaagaaggtgatctcctgatacctagtaaaagaccaactgatttatatctccctctctaaccatggctaacaaaaccatcggagggtgcgtccggacaccctgttcggatgtcttttgcaggtacaacgactgaatcaagaacctttgtgggttgagatcgcgtgtccattcatttggcaactacgtggaacactaggagcgcgaggcatcaacattggcgccgtctgtgggaacttttttttactttgattcagtcactaaaaaagatggccacaccttcccgaagccgatcatctggtaaaggagtggaggataatcttgaatggcgtcaagccatcgaaaggagacagttggcaagcgagcaacaactgaaagctctcctccaggagacagaaagattgagagaagaaaacgatgtattacgcatccaggcttcaacatcagggcctcctcgacgtcagcgttcaaggggccaagtagcaaactcaaggcctcaacaagaaccagaatcaatatatcctgggacaacaggagctatcccaggagcatgcaacgtaagacctcatgagccacgcacgcctatgcctcgagctccccgtgaggaaagctcagactctactcacttttcagcaaaaagacaacgtgataaaaaatcccagttgtcaaattcgatgcgcgcaagactaggcccataagagcctggaagatcaaggtcaccaatggccacaacctgggcaccacgccctgaccccatggccacccccatggtgcaaaacgttcacccgcatcgtgaccccgtagtcacccccgtgatgcggaacgttcattcgcacccagcggaacaaccaactaggagaaacatcccaaacgagccacccattggctccatcagcaaaaggctggatgacatgctctccacgcctttctgctctcatatcattaattacgagcccccaaggggattcctcgtaccaaagttttccacatacgatggaaccaacgatcccttcgatcacatcatgcattatcgacagctaatgacgctcgatattggcaatgatgcactactatgcaaagtatttcccgtcagcctacaaggacagaccctctcatggtttcatcgcctacctcccaactctgttggcaatttcagggacctgtccgaagctttcgtgggacaatacttgtgctccgctcgacacaagcaaaatatcagcaccctgcagaacataaaaatgcaagataacgaatccttgagggaattcgtgaagcgatttggccaagccgtgcttcaagtagaggcttgtagtatggatgctgtcctacagatcttcaagcgaagcatctgtccagacactccatttttcgaatcactggctaaaaaacctcctacaacaatggatgatttatttaggcgcgccaacaaatattcaatgctcgaagatgacgtacgtgcagccacccagcaagttttggttgccggacgaccatctagaagtaatgcggagagaaacactaaacctccggatcggccaaagccgtctgaccgaaggtaggaagggccaagtcgcccggaaatgccacctctcacacctctttccatatcatatgagaaacttctcccaatgatccagggcttgtccgacttcaagtggcctagacccattggaacggacccatccacaagggatcgtagtaggagatgtgccttccacaaggatcatggccatacaacagagacatgccgagctttccagtttctggtcgagagactcataaaagcagggcatttgaagcaatacctccgatcagataatggaggaagggacgcatcccaacatcacaaccccgggacccctagggccccagctgcccccaaggtcattataaactatattaacggaggtccatctgacgaggagtacgactctaggcgaaagagacaaaaattgttgcgggccgcatcaatacacgaacgcatcaattccatctggcctgggctaactggagggggccctcgccccatagatgggacaatcattttcccaccagtagatcccacccggacactgcaaccacatcgcgacgccctcatcttgtccctggaaattggggacttcgatgtgcggcgtatcttggttgacccaggcagttcggccaatcttgtgcaagcatcagttgttggccacatgggacacaatctcacaggcctcgaaaaccctggacgaatcctatccggattcaacgggtcttcaactacatccttatgagacattgtactgccggtccaagtaggcccagtcactctcaacgtacagttttcagtagtacaggagttatcacccttcaatgtcattttggggcgcacatggctccactacatgaaagctatcccctctacatatcatcaaatagtgagttttctcaccaacgatggccaaatcgacctatatggcagtcaattagccgcttgccaatgctatcagatagcacgtgaagcaggggtcaaccaggaagatgcatctccccctaaacccagccatacacatgaccaatagcaattattgggtccggcggacaaagatcccccgacagcataccccttgcaaacaatccaaatttcggaggaaaacactcacctcacgaacatcagttccctcatgacacaagaagaaactcagagcatgcaaaacattctcagacagaatcatgacattttcgcatgggcacactctgatatgaagggaattcatccctctattgcatctcacaggcttaacgtctttccaactgccagacccgtccgacagaaaattagacgtttccacccgaatagacaaaaagtcatccggaatgagattgacaaattgctaatagctggattcatcagagaagtatcttatccggattggttggcaaacgtagtggtggtacctaaaaaagaaggaaaatggcgagtttgtgtagattacaccaatctcaacaatgcatgtccaaaagacagttttcccttgccacgaatagatcaaattgtggattccacttccgggcaagggatgctctctttcttggatgccttctccggatatcatcaaatccccatgtccccggatgacgaagaaaagacagcattcataacgccacacgacctctattgctacaaagtcatgtcattcggactcaaaaatgctggcgccacttatcaaagattgatgactaaaatcttcaaacctctgataggccacacggtagaggtatatattgatgatatcgtggttaaaagcaaaacccgagagcatcatgtccttcacttataagaagtttttcacctcttacgaaagtatgacatgaagctaaatccttctaaatgcgcccttggcgtaagtgctggcaaatttctggaatttatgatcagccaaagggcatagaagtcagcccagatcaagtcaaggcagtcatggaaacaccccctcccaggaacaagaaggagctacaacgactcacaggcaagctcgtcgcactagggcgttttatagcccgcttcattgatgaattgcgacccttcttcttggcaatatgaaaagctggagcacacggatggacggacagttgccagaacgctttcgaaaagattaagcattgtcttacgcaaccgcccatcttgaacagtctcattccaaaggagaaattgtatatgtatctggcggtatcagaatgggcaatcagcgccgttctattccgctgcccctcgcccaaggagtaaaaacctatctactacgtcagcagggcattggcagacgtagaaaccagatattcaaaaatggagctaacagccttagcccttcgaagcgctgcctagaagctccgcccttatttccaagctcatccagtgatcgtactaactgaccagccccttcgcaacattctgcacaaaccagatttaaccggaagaatgctacaatgggccatcgaattaagcgaatttggaatcgaatttcaacccagattgtccatgaaaggccaagtaatggctgacttcgtgctagaatattcccgaagacccagccaacaccacgaatcaagtaaacaagaatggtggactctgcgagttgatggagcctcacgctcatcaggctttggagttgggcttctactacagtccccaactggggaacatttggagcaagccatccggctggaattctctgcctctaacaatgaagcagaatatgaggccatcttgtccgaattggacctcgcccttgctctatccgtctccaaactccagatctacagcgactcacaactcgtggtaaagcatgtccaggaagaatatgaggctaaggacgcacgcatggcgcgatacttagctaaagtaagagacaccctacagcaattcatcgaatggacaatcgaaaaaatcaagcgagctgacaataggcgcgctgacgccttggccggcatagctgtctccctccccatcaaagaagccattctattgcctatacatgtgcaaaccagcccttctgtcatagaaacctccacttgcaacaccattgaggcaacccaagcaaacgaccaagaatggacggacaatattgcagaatatctccggacagacactctacccggagatcccaagcaggcacacaaaatccgggtgcaagctgcccgtttcaccctgattggggggcacctgtacaagcgatccttcacaggaccttacctccagtgcctagggcattcagaggcccagtatgtgttaactgagttgcatgagggaatatgcggaaatcattcgggaggacgatctctggcacatagggctcattcgcaaggatactattggccaacaatgaagaaagacgcggcagcatatgtcaaaagatgtgataaatgtcaaaggtatgctcccattccacatatgccgtcagcaacgttgaagtcagtctcaggcccatggccttttgcacaatggggcatggatatagtgggacccctcccagcagcgcctgcccagaagaaattcctccttgttgccactgattactttagtaaatgggtggaagttgaagcatatgctagcatcaaagacaaagatgtcaccaacattgctttcaggaatttctgttcgaagctgaacatccggaattcatattccacaccacgatatcctcaaagtaatgggcaagcagaagccacaaacaagaccctaatcactgccttaaagaaaatgcttgaacaatccaaagggaagtgggtggaggagctacccggcgtcctatgggcctatcgaaccacacccggacgaccaacaggaaacactcctttcgccctcgcatatggaatggacgcagtcattcctactgaaataggtcttcttactgtccggactgatgcagcaaagcaaaatgatgcaaacacggaattaggaagaaatttggattggacggataaagtaagagaaagtgcagccatccagatggcagactatcaacaaagagcatccgcccactacaatcgcaaagtaaggcccagaaacttcaaaaatggtacgctagtccttagaaaagtttttgaaaacactgttgaagtgggtgcagggaaattccaagctaactgggaaggaccctatatagtgtctaaggcaagtgagagtggagcctatcatttacaaaagttagacgggactccattacttagaccatggaatgtgtccaatttaaaacagtattatcaatgaaaaagagagacaagtacaaatagaagaaaaagacatattttattgatatgtatcaatgaatgtgcaaagaggtctccggaccacgaaaatacaaaaagaagattacagcaaacagttgcaaaaagacaaaagctatcagggagaaccttaaagtttcttctcttcacccggaggaattgaagggacatcccgctttatgccattcttcttcatacaacagcgatagccaaagatgaaggtgtcatccacttgtttttggtagtccgcttcaagttcctccctctctgcagcaaactcccgttctagctcttctttttgcgctgataagcgcaattgcaaatcttgtttctgcttcttttcaattgaagcctcggtctggagttgcctcacctccccccgcagccgggccatctcatcctctgcctcctgcaggcgggcctccattgattcctcccggctctttgcatcagccaaatctgcccggagggcctcattctcccctcgggcagtggatacgctagcttcagccttccccagtctcaggcgcaactggtcttcagtatctttgtgccgagcggcgaaggccttcatgtaatcagtggtccgcagcaggtcagtgaaaagatcgtattgattgaccatgccacggagaccactcaccagctgcaggtaaacagtcaaacgagaaaagcaaagttagaaatcacaccacaaacacatatcagaaggacaaaaaataaaaaagcacaaagacagtataccgattccaccatctcgaacatcttggctgaaggcataacactggtcaagtcgggtggaatctgtttcagcttatcttccaactccgcgtagctaaaagggctagcggaggtgcaagacgcatcattaacaggatccccgcctgatgaggcaacagaacgagactcttgttccggattcggggcctcaacatttacgaccggatgggtctccccgggtgcaacctcagccgggaccatcacagggacggatggaggctcagttgtcatctccacttcgcccccctccggatgagcgtcgtgggcggatgagcaactaacttcgatctcttgctgacgatcttgaagccgcccgaggagtccggacctcagattgcgcgccgagtgaggcctctttgaaggtggctccttcaccagaacaagagccagacggtccgaatcatcagagggctgactctggctttctgcccctgcttcctccatcggggccgcgcaaacggcttcaactgcatcgacatccggagtaggggagtccggatggttgatgaacgcagcttcctcaaccaaatttgccagacgggcaaccgctgctaagaaggtacttgagtggttcagcctcgcgacgtgtccggatccgcttgagatagaatgaggagcagggttcactggttcctctattattacctccgcctcatgagtaattggcggagggataaaatccttgagaggagtggactccttcacccccttcccattcttcttcactaacttccttctttttgctggagttttatttggaggagaggtcgcgccgcgtttctgtctgggagccttccgaagggttccttcgttctttctcttctcccgatcatccaagagtgctcggcgtttttcagcgtcaacctctttgaactcctggtagatcgggagatccttcacagtgtaatgctccccaggcactacctcctttggcatcttcctggggagaatgttgatgacatactcttggggctcccggacgaccgccatcaggttccacgcagtcagcagcgtcttgcactgcctctccttggcgtctatctcaaataacttgctgagacaggcaaaagacgtcttttccacccaatccacgaggtggcccctcctttccgaacctgcattgacagcaaacaaaggatgagaatactgcccggaaaaattaacaaaaagacaacaaagtaaaagtcggacaaaagtcgcaaagcaaacttacccggaatcactaaggagtagtttggagagaagggcctcgccggatgcttcgaccccgcccatgcaccccggaccatcacgtgtcccctcgcccctcccttcgtcgagtctgacagtttcgtcaccaattgaagggagggtaggtgcgcggacaggctgaagatgtcagtttttgccttcttcagcgaatagacaaaaaacacctccagcagcgtgagatcgaggttgtacagcatgtttatgatgctgcatcccatcagcacccggatgatattggggtgaatgaagacgggtggaatcttggtgaaatgaagaaattccttgaacaacgccggtagagggaatcggagccccgcattgaattgttccttggagaagatgacggtatcttgttcagctttttcagtagatacgacatcctccccattcaaaaattccacaattacgccatttggaatgtagaatcgatctcggaactcctttacgctcagtttgtctgtagacttctcatgagcgtcgccgactcgggcagatgaagcagctttcttctttgaagacatttttaggccgagattgaaccaaaacctacatacaagaaatgcaacagtcaaacacagccaaccaaccccgcaaaccctaaacaataacaacactcagaaaatctcgcaccaccaatatacccattccaaaaatccttgactctactccaacaagaaacccccaacccacaaaaacacaggggggcaacggaaacccttaaaatacccagtcacaaacaacactcgcccaaacaaaccagcaacaaaccaacaaacaccaaagcgcagaaaagaaaagaacaaggcacaaagaatacgtaccaaatgtaagagaagagcaagggttgcaaaaccgcaaggcaaacaccgtcaaagcgcaaatcaccgttaggaaaattttgagttttactcggaagaaagcgaaggtacgtacaaagttgaagaagaaagcaatctcagaaaaagcagtaggaaaaaaaagcaacaatgggcacagtatgctatttatagggagacaagccctcggaaaaccaaacacccaaacagcgccatcattgaaacgacatgctgcctgggaatacccagagtcggcggctcattataaatgcctttcttggctcccgcacccccactcgccatgtggcccaaccagacgaaaggtcgacttctgtttcaaaaaccaattattttttaacccgcccattttttctaaggcaaaataggcaagttaaaaaaggagggcattgtagggaccccgccctctgagaacacgtgccacgcatttggccaagacacgtggcacgtatcttacagtgacacatggcacgcattgtcatccgggtcaccctcatccggaccttcttataaagcacacatggcgcaccttgtatatccggactgcctcaaggaagagcaaacgacgcttacgaagcataggcatccggacgacttccataaatacgtccgctccacaatacatccggataaccaacatgggctatccggatatgattgtctggatcattgactaaagtaaagcgagtcttacacgctatcgcaacaaaccagccatggcccacgtcccattgcctgtagagtgaaaggacgagttgaggtgacaacaagtcactttccacgatcattctacatgaacacttcccacgatctctgacagcagcatcacctaccacggtttctgacagtcgccagtagggtggtgatgaccatgctgcctccgaatgtcatcatgacaaacataaaatatctcctcgccattaatgagaggaacagtactcctgacactatatatgaaccttcgcacgaagaagaaggtgatctcctgatacctagtaaaaggtcaactgatttatatctccctctctaaccatggctaacaaaaccatcggagggtgcgtccggacaccctgtccggatgtcttttgcaggtacaacgattgaatcaagaacctttgtgggttgagatcgcatgtccattcatttggcaactacgtggaacaccaggagcgcgaggcatcaacagtgggatcaaggcccacagtggtgtttcaactttcaatggtcttcctttcacaattaatttagaaagaatcatatttttattttttatttttttatgaataaaagttaattaacacctctttctaaataatgcatgtgaagtctctttggcctaattttctcaaaatgatttaacctaggcaatacaaatccactataaagtcttccgaccttagtcacattattcttaacataatccgaatttgattttgttaatttttgaattttttttccttgaaaaaatgagatgttttctcatgacatattttaataatttttatttgtttttaaaatgatatttaaaaaaaataattctaaaaaatggataataattgaaaataaagctcataaaacttaattttaaaaaatatttaaaaatatacaaaataaattaaaaatatttaaagttctcaaatagatttttattttagaaaatatcaaagaaatattctaaaaaattgcttttttttatacagttgtttcaaataaaaaataaagaaagttaccaaaaagaccttaaactatataaatctataaatgttttactcacatgatcatcataaaataataggtttaaataaattatggaaatatggaaagatttgttaacaactccacttttgtcggtttctatttgtctaagccacctttctttcttttaggacaattcttattcttcaatatgtttctcaacaaatgattaaagaaccccataatgcccaatggttttccttttacaaataatttacaaaggcatttttttttttttaaccctgagggtagctcagttggtccggccttgggtttgctctctaatggtcacccgttagagtcccctcaaggccattggaggtctatgcctactattgtaagtttgtcatagttaaataatgattagggaataaatatggcactggagaatctgaaaaaactgcaagtgaattaatctcataattacgtagtgagaagaggcaggcaatggagattttctcaaaggtgcaaaaactttgggacgaatgggatatccgtgtgatggttttattcagtctgttgctacaaattatgcttgtcatctctggcaaccaacgaaaacgtatagctggaagctggattaggattctaatttggctgccatacttgttagcagacttgatggcaaactgtttcgcttggtactctctccagaagctccccggatccaaactattcgctcatggcattttgggcacccttccttctcctccaccttggtgggctggatagcatcactgcctactccttacaggacagcgagttggggcggaggcacttgcttggactagtcatccaagttggagcggctggttgtgtttctaaggtactggataggaactggactcacttttctgttcattctaatgtttattgctggaatgatcaagtatggagagaggacctgggttcacaggtctgcaagcagcaagcaattcagagactccttgctccgaccccctgatcctggacctgattatgataaattcatggaggattatagttcaagaaaacgagaggatgtaggatttcaggtggcgattaaatgtccccttccaccacctactgtcggtgatgacattactatatattcctgatgcaaaatatattcataaagcttacttcttattcgaggggcacttcaggcatctatatgcagacctcatcctcagcttggatgaacaaaaaatcagtgacagcatcatcaggtgcttgccatctgaagatgccttcgaagtggtagagatggagctcggttttatgcatgtatgatgtgctccacaccaaggcagcagtggcttattctgaactaggccttctgctccgctccacaagcttcttctccacaatttttactttagtggccttctgcttcttcattgataagcacgagttctcaaacattgacatcggcgtaacttacacgttactgtttggagctattgttcttgagatttatatatgctctcattatgctgattttgtcccactggaccattttctggttgagcagtaagaggaaccccctggctgattccattggtcgagccatctcctcttttcgatcagttgtatccagtgacaggaggtggtctagacgcatcgcacagaacaacttaattgattcttgcctcagagacaaaaccaagtttgatcgggttcccaagttcatcgacttgaacaaattcttggacaagtactggtacatgacttgggagaaagtggatgatataaattaatccatcttctggtgggttctagagatgataaacgaaggtggaaatctcaagcagctactcaaacacagaggtaattatgtgattacaaaaaaggggtttattaatgaacttggttggagtatagttgatgtggaatttgttcacagcctccttctctggcatattgctacagatatgtatggcagttcttttgatcataaagaccctgatcctaaatcaaggtacaatataagcaagttattatctaattacatgctccatctcctagtcatatgaccatttatgcttccaaaaggaataggggagattccgagacactcgttcagaggccaaaagattttttcagcaaaaaatgggaggccatatctaatagagatgaagcttgcacatcgttgcttaaagtgatacgcaactgctacctagagatgtgaaaggagataaaagcaagtccgtattattcgaggcatatagacttgccaaaatattagaatcaccggaa

SEQ ID NO: 13175 - DNA, 15108 bp, Vitis vinifera
  Intron number 2 from transcript GSVIVT01000696001 (locus G SVIVG01000696001) derived from phytozome v7.0 (chr-ID chr1 9; pos 15756957 to 15772064)
caagtctgttagatattggtatgtcctattccttgccttttggctactgtaacctgttttaatcattgtctatatataagagtgtgtgtgttttaaatatgttattttttgtcaaatttcttatacattgataatgttctctctctctctctctctctctctctcattttaatttttaggatgaagtggggtgttgcagtaatgcaaggaagtgcaatttgaaactctgaatataattctaatattttggacaaaattcatcaattcggaatagcatgttcaattatagaagtcaatttcatgaagatattatgtgtacttagatttgattctgagtgaaaatatcagttcattcttgaaagggggtttatgtcagttgtccatttctagtgaactgtgccttttatctgtccaccacatggcatcagataaatctccctgtctaatgaaaaggcaatccttgacacagcttcgtactgtgcttcaattgagtcttatgaaatgttttgagcatgtacagatttgcttttagaagatctattctctttggaagcttgttttggtgaaagattccatcaactgaattatcaattagtgaaacgaggaatctgtgctattaatttattagagatttctttagtaataactaggaaaatagttcttaaatttaaatttggttcactcaccggggaggatcaaattactcaaacctgatccggtcacattaataaatctcctttaataatcacaaaactctataagatggctctatttcaacaagcccccctccaactagtgtgtgcaaaagtctgttacctactctcaggtttgaattcttgagaattcaaaaatcaatggacctttctggtttgacaatatagacttcgcccttaagaggctggcagttaactacatctggtctcatcagaatgactacatattggcttcaattaacagttcatatctttgtcatacagctatcaccttcttaatttctcctttttgttttttctttctactttgagagagggaggctcttgcactacttttgatcctcctttgtcattgagggatgatctagcttacatggagacatggttatgggctccctgaaaacaattggaggcttctaagaattcatcttagcttgtaattaacatattatgactcatattctatttctagagctcttgtcaaaaaaaaaaattctatttctagagctgccctccatagggatcactaacatggaggatagggtacggtggaaagaggctaaggatggtattttttctgttaaatccttttatagcgctatggagggcagcagtacagtctcgtttctgaaaaacattatttggagcccttgtgctccttctaaggttgtttttttttgtttgggaagcttcatggggtaaagttttaactttggatcaactaaagaagaggggctggtcactgcatttcttgtgctgctgaagagtctattgatcaccttctaattcattgcaccaaggccaaggttttgtgggatttgttgtttaccctttttagtgtgtcgtgggttcttccttcgtcagttaaagaggtccttcttgggtggcatggctcgtttgtgggctagaagcgaagaaaggtttggagagcagcccccttgtgtcatttttggatgatttagaaggaaagaaataggattgcttttgaaatgaggagttttcgattcaaaggttgaaatatttttttgtttgtaatttttggtcttaggctaagtagtgtatagatgaagggcctaattctttaatcaacttttttgattggttgggctctagatgagggtgggtgagttttttgtacccctctctcttttgttttttgcctataggcacttgttatatacttcttgtatgttttgggttggtcgttgggtgccttgttcttattaatatatccttcttctatggctttgcctgtcaaaaaaaaaaaaaaaaagtttaaaattgaatcaaagagatggggaacaacattagaaatatcctttgaagtcttacaagagaagctcaaagacttgttccaatggccaagccttaatttatgatagtgatgatgatttaaattcatcttggggcttgccatagttgcttttttaaatttctattttggttagtggttgactttttatcaagtttctatccatttttagtctaagaaaatagaaaattttctatttcatgtgggtctaaataatattccttttccatatcttttcctatttttgcaaagaaagataaggaattaggaaaattgtcttattaagggtcataagagacgactgcatatacctatgtagtctttcaaagtgaaagaggagaattttaatgaaagtttcagcatctattatgcgttctttgagagtgggattggcttcttccccagtgtgattgcttaggtaaccttaagtgtgactgtcaaggttttttttatttttagccatttctattctttccactttatcctataatccaagtcaatgatatagggctggaaagtttaagaaagaatgcagaaaatagcttttgaagacttacaaggggtaagactagttccaatgcctaaggcgtaatttgagatactaatgatgatttaagttaatctggggacttgccataattgattttaagtttttattttagtttggtaagtttatattttagttagcaattgactttttgtcagatttctatttcttttaatcttcttattatatatatattagaagagtttttgtttcttttagttttttgacaatattccttgcctatatcttttcctgttctgacaaggaaagataaggaattaaaaaggttttcctattaggtaaggtcataagagtccatacatacctatgtagcctgtcaaagtggaagaggagcattttaataaaattttcagcatcaattatgcttcctttaaggatgtgattgccttctcccttagtgggattacttaacaaaccgtaagtgtgattgcctaaaacactgcctagcaaccttagtgtggttgcctagcaaccttagtgtgattatcaaaaacattttttttcactgacattttttaattttttcatctcattctataacccaagaaaattgtatagtgctagaaattttatgattttgtgtcataaaggtagcaaagagttgtggagttagattgatggtaagaaaatagcaaacaaaagcaagaatgttgaatgaggaaaggtatacgcagtgagaagggtgaaagaggggataacttacctagtggaagtacaatgtagtccttgtggcctctgtgaaagtgagatgaaatctattgatcatatctttcttcattattgtaaggctagggagttatgacacttgctattttctttatttagagttgcttgggtccttcctttttcagttagggagaccctcttaagttggcatgacattctttgtgggaagaaagcataagaaaagtttggagagccgtctggttgcatattttttggacttcgtggaaagaatgaaaccaaagagcctttgaaaatgtggagcaatcgactcaatcattgaagagctcctttgttaaaagtttgttgttatgggttaggatgtacatggtagaaaaatatcaatgcctttaatcgattttatagattggatgagatctagatgatagaggcaacacttttttgtgttttcccctcttctgggctttatcctttgttttccctttgtatacaacctgcctgccttggtatatagctctttctattaatatgtatcttaccattgcttataaaaaaaaagcttgtgatcatcaatggaagctatctaaaagaaaggtgaaaggggaaggaaaaaagattaaggggaaaagaaaagaaggggaagacaaaggccagtggcccaatgtcttcaaaataatctccaaaacccctctaactagggttggaatcacaacttttgtggaggagaggcttggattgcctagatctagggtttgatctaagtgcatactacgaaaaagcaacacaccaagtgcttcttgcttttagaggaatgcacttccattttaggcttttagaattaacttaagggtctgaaattgcatggctgttgcattgagtagacaaatatacctgcttgggttatgagactggtagtttcattggattctcttgagggcctatacatcattgattcattctttgttcctatctggcagtcttgtttgtctacaagtgtgatccttctgcatcttatgttatcgatgatgaatttttgctttgatgggtttccctgaaaactggtaggaggtttttttacatacattttgttggtagacatttgaagacggctcaatttattttgcactggaaaacttctgatggattgtgcatcttatattgttgagttgttctttagggaagttgtatctgtatggagttagtgaccctagcttgggctatttttagtctagtagttatcatctctaatctgatggataaacagaagtggccaatcattggttgggatatttctagggatttccagctggcaatagatatcaaaactgaaggtacctgatcttgccacatgctgaatttgtaaatatttgatttattagtaggtcaagctgaaattctcatttggaaccatctattgcaatatcttaccttaggagttgcaataaaagaggtgtagtgagaagtagctgtgagataagcttgccaactaaagaatgcagtgtatgagcaaagaagagagcaatcgttgttgctagggtacttgaataaggtatactcttgttgagagacatttggggttggatctcatggcaagtttagttggagaaagttcacactttattgaattcttgagaagttagcctcattgaatatctcctaggttttcaacattgcttcatttttcaattaaaaaaaaaaatctgcttatactagtggaacttatttatcttccgctgagattgcaaagcccacagaggattatatttgggacatttgcccgcaaagacatgctgaggatcacattttgaatgtacctaggctgatggaaggtcaagaacagattgtatgtggattgatgagggagacttgtgacagtgagcaccttttccaacagatatcagtggtttacttaacaggcttgacttctcacatggggcaatttgatttagcttaggatttttacttggtccactttctattctggatgatttccttttaggaaccctttccatgtagttactactttggattttatttacattaagtaaagatgttagtttattagttcaaattactttatgaaggacactaggaagaaaggccctcaacagggcagagggatccaaagttcagttgtccaatgaatgtaagacttctgagttggaatgtgaggggcgtgaatgacaggtccaagaggaaagtaatcaagtcagttatcagaagccaaaaggtggacctgttctgtattcaagaaacaaagatgcaagttatgtctgaagaggtggtgaggagtctagggccggggagatatcttgattggaaggctttaaatgctatggggacagcagggggtgtcttgatttgctgggacaaaagatctctggaattgctgggggtggaagagggccaattctccatttcctgtagattcaggaatgtgggagatggagtaatctgggtgttcacaggggtttatggtccttgttccagaaaggatagggagtgtctatgggaggagttcggggcaattagaggactgtgggaggacccatggtgtctaggaggtgactttaactcaactctataccaagctgaaaggagtagaaatgggaggatcacttcagctatgaggaggtttgcccaggtcatagatgagttagggcttattgatattcccttgcaagggggatccttcacttggagtggggggctcaataaccaatcgtgggctaggttggatagattcctggtgtcccccaattggatagatcagtacagtagggctactcaaagaagattgcctcgcccaatctcggatcattttccgattttgcttgagggaggtggcctaaggagaggtccttaccccttcaaatttgaaaacatgtggctcaaagctgaggggttcaaagagctgatagaggggtggtggcaagggatagtggttagaggaaggccgagctacaggttagcagctaagatgaggggtctgaaacacaatttaaagatctggaataaggaggtttttggaaggttagagaaaaacaaagctgaagcccttcagcaagtggagcgatgggacgtagtggaagaagagagggctctatcagaggaagagttaggccacaaaaaaacaactaaggagaattattcaaaatgggtgtcgatggaagaagtgcattggagacagctatcaagggaaatatggcttagggaaggggataggaacacgggattctttcaccgtatggctaatgcccacaggagagtcaataatctgatcaaaattaagattaatggggtgaggcttacagaagatcaagatgtgagggatggaatagtaaatgcttaccagcatcttctttcggaaaactcggattggaaggcggatatagggggtcttgtgctgaagcagatcagcctatcagaagcggatgctcttgagctccctttcactgaggctgagatctatgctgcattaatggggatgaatggggacaaggccccgggtccggatggtttcactgtagcattttggcaaaattgttgggagattgtcaaggaggatgtcttggatatgttcaaagaattctatgatcagaattctttcatcaagagcctaaatcatacatttttggtcttgattccgaagaaagggggggcagaggacttgggggactacaggccaatcagtttgcttgggggtctttataaattattggctaaggtgctggccaataggctcaaaaaaatcatagataaggtgatttctcctgaccagaacgccttcataaaagggagacagattcttgacggttccctaatagcaaatgaggtaatagactcttggcaaaaaaggggagagaaaggcctaatctgtaagttggacattgagaaggcgtttgataatatcaattggcaatttctattaaaggttttgcataagatgggcttcggatcaaaatggataggatggatgtggagctgtatttctaccatcaaatattcaatgctggtgaatggagttccagctggtttcttttcaagttctaaaggtctcaggcaaggggatcccctatccccctacctatttatcatgggaatggaagtccttagtgcgttaatatcgagggccgttgaaggggggttcatttatggctgtaggatatggaaaggaagagggcagcccgtaaacataactcatctcctgtttgcggatgatacaattgtcttttgtgaggcaaagaaagagtccctgttgtacttgagctggatcctattatggttcgaggccgcctcaggtttaaaaattaacttggagaaaagcatggtcattccggtaggggaggtggaaggggcgcttgatatggctgcggaaattgggtgtaaggtgggacaactgcccactgtttatttggggctgccccttggggcgcctaatagggcctcctccgtttgggatggggtggaggagaaaatgaggaggaagcttgctctttggaagcgtcattttttgtccaaaggagggagaattactctcattaagagcacgctggccagcattcctttgtatcaaatgtcacttttccgcatgcctaaatcagtggcaagaagactagaaaagcttcaaaggaattttttgtggggaggagccaatggagggaataaggctcatctaatcaagtgggaggttgtatgtacggataaaaagaagggagggttggggttaagaaagttaatttggttaaacaaagctctccttggcaaatggatttggaggttcgcgcgggctaaggaggagctgtggaaaaaagtgcttgaggctaagtatgggaaagaggagtttgggtggagaacaaagaaggcaaatggggtgtttggggttggtgtgtggaaggaaattctgaaggagtccacttggtgttgggataacatggtattcaaggtgggaaaaggcaataaagtaaggttttggattgatccttggtgtggaaacaacgtgctgtccgaagctttcccggacctcttctccatggctgtccaaagaaacgccactgtggaggattattgggatcagaatctgagtcaaggagggtggagcttaagactattgagagacttcaatgattgggaattggggttggtggacaatatgttagttgagttgaggaactatagagtatctatggaggaagattcggttttttggaggggaggagcggacgggctgtttaaagttaaggaagcttatagggtgttgattaatgctgatgaagcggccttcccccatagcaatgtttgggtggccaaagttccaacaaaaattattttctttgcttgggaagctacttgggggaaggttcttacattggatagattgcagagaagaggatggcatcttcctaatcggtgcttcttgtgtggatgtgaagaggaaactatcaatcatattcttattcattgtacggtggcaaaaggtttatgggatattatccttgcattgtgtggtgtacagtgggtctttcctaattctgtaaaggaggttcttagtagttggaaaggctcttttgtggggagaaaaagaaagaaagtgtggaagtccatcccgcttttcattttttggacaatttggaaggagaggaataggctcgcctttaaagggggtgtgttagcctttcagaaattaaagacttcgtttgtgtataatttttggggttgggctaaagtgtacattgatatggagtcgaattcccttataggtttcttggagtggatagcttccaagtaggggttgggttcttttgtttttttggttaagggtttgtagccttgtatactccctgtatgctctttggctttttgccttcgttaatataatcgcttacttatcaaaaaaaaaaattactttatgatgtgcacaaagtgcatgttatcagctaaatatttagatcaccagcatgacttcactgcaaggtttttccttttctgtctctgtgcctaatgagagatggtgtgacctatcccagctcaaaccccaggcagggtagaaatccaattaccatccctatcagtacatggtgggtaggtcgagtcaggatatgggtaaaagatctgcacaaattgggtgccctacaagctgtttattttgaaagaaaataaaatctgttggtttggggaaaaaaataaagaaaaacaagaaagaagaaaactaaaaggaatactaagtgcccgtttagattacactttctaatttttatttttaaaaacaaaaaatagtagtaagttgtatataaaatgtaagagatcttatataaaatgtatgaatttatcttatattattaaaaatcacttttaaaaattttaaaatttgaggtagtaaaatttttttaatacttcatttttttaaacaattttttaaaaccattatttttttaagataagtctctaagagttcttacatatatttttttttttgatagacaatcacagaaaaaaaaaaggcaaaaaaataataataaaaaaataaaataaattgagtagaaagacgaaaaaaagaaattgagtatatccaaatgacgaaaaaaaccataatcttcatgtaaatcccattaacccaatcaaattgagtacaaagatattagatatttaaaaaactcaaatgggctcaatgaatgatttccaaaaagattgaagatgaaataaaatagggaaaaaatctcacaaaagaaaagcacaattccactgtgggaatttggaaagtacttgcaaaaagatcgattatgaaataaactgaaaacacctaaaaacctcgctccaaatttttccaacaaaacttgtcttagaaaggggaaaaatagagaagaaattcacagtccaatcaatccaaacaaataataataataaaaagagatcaaacaatgttacactgggtttgagtgaacaaaataaataaagaaatatataaataaataaataaaaaggcagatggaagaaatcgagttgccaatttgtgggtgaccaattggagaaggggctgaaacatggtgtaaaatggtgggtgaggaaggaggatatgaggaaatgaggtgactacttgtgaaggaagacatgaggggtgaggattggggttgtgtaaaatggtaaacataatggggtttttgtgattaatagcaaattcaaggggagcattgtaaaataacgttagatcccagggcatttcaaggaggccagtgcaatacctatcttggcggacctgagcttggtcatcccatttcttcctaaccatccctactccattttttctttacccctacccacccctaatagttgtgggccactgttggttatataaatacactggtccattgcctcccctattcctttcaactcctttcatcctctcttttttgtatgaattgaagtttgcaagcttactctacaatcctttgtgccatcttctgcattcaggtggcttgtaagttgattcatgccctcctttttggtgacttccttctcatttctccctcttgcttgactttcattttcttcacctttttctcattagtgcattccccatatctgtctataccacagtcaactgttctattgctatttcttcttatttgactgccctgagttcaatctaccctacattagaccttgtgactgaaaattgtcccgtaaggtctgaaagtgaagattgtctaattgtgatgttttgtattattcataaattcctggtgggttttaattccttttacatgctggaggagtgcaaaacattaagatttccacttttaaatttaatatcttgtgtgtcaacaattttcagcttgtctcttttgcatgctatcaaactattttcttttagtaatctctaaatgtgcgttgcagattgtgtgcttaaagactaattcattttgttcccttatacgttctccaaatgaggcattagcaagctagacaaagtgttaggctttgtcccccaaccaatgcaagattatgctttcttgtattgctagggatctaagcatgtatatgtagagttggtattcttaccattcatatatgcatgtataggtatcttcgtcgcatctccatcggtttttaagcatttgcatgtctatgcaatagaggctagcaatttgaggacttgttgatgctacttctttgttttcttaatatttcataccctaagcctgtctgtatggggccaccgttattgtattttagcatcctcatttgtctcaacgttacaaacactacctactttttggtgcccattattctgttcattgaagtatagataatctacacaactataaattttcatttatatatctatcatttttttttttttgtcatttatagagttgacatcatcaaaataagatccttaagcaaactactaggaatccaatcttcgtttgatttgatcagcattctcatagtgtcctatatgtcctaaaatctctcaagtggctttaactaaagtaagtacaacaaaatgtagagtagcaagggatagctgggaaaatgtttgcatggaacaaagaaagggagttttgggtgttagaagtctttctttgtttaatagggctcttttaggcaagccgagctaatgttgtgcatcaaaaagaggagccctatggagataggtcataagttgaaaatatggggaggaagaagggtggtggtggtcttatgatgtgagagatgggtatggtgttgggttatgaaaagttattaggaatgattgagatttcttttatagtaaaatttcatttcatatagagaatgggaggaagcgtgaagttttggaaggataggtgatccggggaggagcctttcagtggttcttttccatctttgttcggtttagcctcatcaaaagaggcttgggtggcattggaaaccgtgcttttctagaaatctaaatgattaggagttggatgatatggagtaactcttctctagaattcaaggcaaggtattgaataaaaaggaggatagggtagtgtggatggaattgagaaatgattccttctccatgaagtttgttatgtggccttggagacaaggaattaaatcactttccgatgtgggtcgtttagcacttgtggcttccattaaagtaagcttgttttcatggaaggcttgttggggaaaggttttgactctagatcaacttcataaaagagggtggacttgtttaagagatgcttcctttataaagtcgaagaagaatcaattgattatattttgtttcattatgccaagacaaagcttatttggtagttgctcttctctttctttgacatttcttaagttttttctattgtcaaagaaacacttctaagtttgtatgtctccttggtaggaaggtttgaagatttgctttgttgtgcattttttggactgattaaaatgagagcaattgaaggtcttttgaaaaacgaggtccatgttcttaagagtctttttttattaccctcttttgggggttaaagttgtacaaagatgaaggctaaaagtatttatcatatttgttgattggtagggctcttgctaagtgatgggggttttgttgatcttgtagcattctttgtatatgtcctgtgcaccttggaccattgttctcttggtgcttgttaatattcttattgtctataataaaagatagttgggaaattgtgtgaaattttctagtacatggtagctgaagttgattgtctgtgttaaacttgatattggcttttacttcttgcttctcttgagtcttttggttaatgattgaatcgttatcttggaaatgtttgataatttttcgtatctattcaaattgttgattagaaatatgcttcaaagtcatggtattagtcattgacttaggaggtcccgaggcacatcggtcttggctctaggaatttatatcgagcaatacataaaatattctaatttaagaactccaaaaattgtaaaacaatttttaaaattatcacaaaaataagtacaattaaacaaactatatatatgtatagtttatctgattgtatttatttttgtggtgtatatatacatattcataacattattcatatagtgactaaatgttagataaaaataataaaaagggatttatttaaattagatattttgaatttttttttaaaatattttcaactattaaaagatacaaccatgcatcatcttttaaaatataaacatcatttttcctatcaaatatattctaaataaaacaattataaaaaaataatttttattaagtttatttttatttaaataaataaatttaaaaattaaatatattttttaatacttctatacctaatttcaatttttatattaatatttataacctctttatttcatataaacataaatattattctttattttatttaatcccaattatctatttaaatacaagtgttgtcaaatgacccaaatacctatcaccatttaaaaacccatattcctagtcaaacatttggtccctttctctgcacaataccaatttctgtgcaaaatacccatttcatcttctttacataatgtacattttacctcatccaacaacttcctacatcttctcttaaattttaaggctttaaactgaagataaatcagccatacaaagatgcaaaagctcaagtatgaaggatgaatatgcaaaccaaggctccaaactctccttccaaagttcttcacttctccactgtttttctctccgatatcaatgtttttttttatctcccattaaccaaatagctcagtatcggtcattgactcgagaggtcttgaggcgcaccgatctccaattcaatagagttgattcatgagttagcaaaatattaacttggttattagtcgatactgggtgcggccgaggcagataggctccaccgagttgtactagtctcgacctagattttgaaccctgattagatttgtctagaaaaagtacaggaatgatgggggtttagttgactgcaaaatacaatctttgctctcacccttgtgaacataaaaccaaatggttgttcctgattaaaaaataaaaaaattggaaaggaaactcattcttatgtatggatgccaaatagttaggttgagggtttgctgagattgtagtactattaacatattaaggatattatcatgggacttaatgaaagaatttctggggaaccatgtattttttgtttcttgttttctttcttttttgaactcttggtacaaataacaggagactttactctttttttttctttcaaagaaagaatgatgtcagttatattgcttggcaagtcatacaggctgtcatttccaggtggatattgaatgattggttcaggcatccatgtggtcaactatgatgagtgtattcagaatcaaggtttacatgcattttggttaaattccaaaagttcatgtctgttttgcgccaaaaatatgtatacaatgtttaaacatcgtgttaagtattgtatacttcaaagccagtggttattagagacaacaaaggaaactaaaaccgcacttgcaaatatttttatgaaagttatataggctgattgattttaatcctagaaagctttttaattgtttaattgccttcttagtaatattttagcattataagtatgaaagagaattgatgcatgtggaaagggatttctcctccatgcataacattataaacatgtggcacaacataacctataactttgtaaagttctctcattaattttcaaaaacaaaacctgtatacagttctggaaagtgccaaataattcactggaggcaag

SEQ ID NO: 13176 - DNA, 1094 bp, Vitis vinifera
  Intron number 3 from transcript GSVIVT01000756001 (locus G SVIVG01000756001) derived from phytozome v7.0 (chr-ID chr7 ; pos 435552 to 436645 reverse strand)
gcagcaacaaggtgggcttttactccaataactgatattcctgaatatcattttacattgagtctacctagtttcaatgcacttacatttacatgaaatatgaggatgatataatctctttcaccttttcatgtggtttagaaagaaaaaaattataatgattttctcccttcctgtatagatattgttcactttgagtccaatagacccctcacaactttagaacgtgtatacctaagtaaaaaaagtaactacatatatagtgtcaggaacttcttcctctatctgatatgggatcataaagatcaataagttcatatgacttttgttatgtttatccgccatatcaagactatagggagaataaatcatcaacaagagaatcaaggagacttcttgaagctttggccctatctaaaagaatctttcaactaaaaatggttttggattgctgaatggtgcccatcttgattgagaattctatatggaccactccacacgaatccatggtttagcatacatattagaagtcacctgtatctttcatttctctagacatgaaaggagaccccaagcgtaaagatgcaaaggccaccttttttgttgcattattgcacacttcaacagaagttacagaactatagttaagagttaactcagattctgtaacctcattcatgtcaaacacctcaaggaaaaagttggttactacctatgaaatagcccataatgttaatccaataactatctgtagttttttcttccttctcagcaaattatttggtactatagaatgattctgttcatacaagccttttggctttggagagggtcattcaactattccaaagacaagtacagaaacttgtctacttctcaaaaaatcatgtgatcagactgcaataaaataaatagaaatcagaaccatacgaaaacaactgaaaattagtcaaattgcaattcatttgtgcttgaaacgataaactgttggaaaaagaacagagcgtgttgtgcgattatagtcatagtactaagctttgtgcatctcgtttgccttaggcaacagagatttgagagggttacaaagaacctga

SEQ ID NO: 13177 - DNA, 9446 bp, Vitis vinifera
  Intron number 1 from transcript GSVIVT01012401001 (locus G SVIVG01012401001) derived from phytozome v7.0 (chr-ID chr1 3_random; pos 493292 to 502737)
tgccctggtaaaaatgcgtgcttatttttccatttttttaaattctattttcctgttattctgtgtttggtttccgagaaattggaggaaaacagtagaaaagagaagtgaatctggagtttgtgtcatttttgtggcttttacataaattttacaaataaaattgatatttccccccctttattagataccaatctgcagaagatgtaggaatcccaaaaaaaaaattcgcttttgcctttacttcccccaaatctttcataatggaaaatggacttaccacctcttttatcacttttcctttaccatgtcaggtttacatgtaatcaaacactgtatttggagtagagcacttatcctaatgtcaaatggtgttgaaaacttgaattactggatcttaagactccagaagaaatttgattgtttatgattattgctccatgagaagggaaagggatttcttttgtttttgctcacatatatggccaaattgatttatctccttctcatacgaacaaaataaggacatttcttgtcttgctgccttttatgccaccggttccacatgctgatgtgacaacccttgtgctattctgtacaaatggtaggaaaattctggtaagactggtggccagcctatcatgttcagagaataaattcaatgtatatctggaattcactctatatcagtatagggtgttgatattgattataaatgactaaattcaatttattatccttacattagggagtgctaaaaggatgcaaattgttcatgttatacccaaagacatacaagtgatgctagagattttcacaatgtagataatcatagagtagagatgaacactatggagtcttttggcatgtgttcattccatgtatgggaacatgctttggaagattatgtttcctcctccctcccctcccctcccctcccctccccaaagttaatactatgttgtcatggcaagaactttggtgacatgcttctgagtggaatagcctcctagaagtccatttatgtggcagttggcaagttcttctagtcaatgagaactttgtgactatctgattgttgtactaatcatcatcagatttttttttaagttcaagttgcaaatagcctttcacagttgaaggtagcaatgaagaggcctgttgaaataattatttcttctgcttgaatggattaaaatcagataccacaccttcagcctagaaaactatggactttcctatgtacctgcaattggctgaatactggtgtgacactgaccaaaggctctctgatgctgttattaatttcctgagcaaataagagaaaacagagaggtcataatgtgaatcagttacctcttgagtagggatgaaggctttttataactttttactttctggttaggccttggaagcacttctgtgaaccatgattttgtactgtaaaattagatgggatggataggtcaccttaactctacttttggaagtgattggggagcgcatgactgtatgaatattgatgtgttctccccacacagagcccaacttctttttgaactaggaagcatgaagggtgggtggatgtgggctgaggaaggaagatttgacttgtgtgccgcaggcctgcggtaccaatttgttccagaacttgataaggcccataaactggtaggcaagtttcattatttggtcaccactgaattttggcagtatggccacaaggaaggtaggaaggagagggagaagagaaaaccccaattgccaattgcaagcttccggttggcacagtgctcattgctgacattttcatttgattttgacctcgcaacagatacagcttaacatgatggaccagtttttcacaatcttgtgattcattacccaacttctagtaacagtttctcagcagatgactcacccatgacaggctgatgatgtctgcacacaacttgaaaggtattcatgccaaggtgtgaaaggtcatattgtgacaccattttgcctattccagaaaatgtaacaaatgtatggctggttcttgaccaaaaaatgctggcattggtcaccaagtgctagggtgattcttgacaaaaaatcttcgtattgttcagaacaatgatttacaacttcagattggccatccagttaacgatgataagcacttgttttacaaagttcagtgtcataaaagcaaaataattttgtcaacaaatatgcagataactttatcataattactacttatggaagttaaggataagttgggtaatgtgagaaagttttggtcagaggatatgaggataactttgttgcaattgctaagctacacctcctaggactactagcagaaaagtatgagcaacagaacaaatttacagtccatccccattagctgcatggagaggttgggcttattgctgctatggtggaggtcaccttcttgtaaactttgaaatctgcgaatgaagaggcagatttcttagaggaatgggtaggattcagcttgtggtagatattgagcttattgcctctatggtgggcgtcactttcgagtggactccaagccccccaaatgacaggggggtggggaggatgggggtggtggggggccaattctaatttcatgtcttctcaatgtggatttgaggtttaacgagatttttgggaaatcattaaggttaaaagtaatcgaaagagtgtgtctgtggagagcaagagggggaaatgtttggttcccagctagggttgcttcatccgaccgttaatctcacagcaaacaccgacggagcgttattgttggaggcttccaggtactctgatcaattctcttgttcttttttttctttggggaagcgggaaacctctctttcttctactccttctgggtgggatggggaaggtgttgccattgccagggtttccgatcggggcagtggtttagaagccgtagggggagctgttatgggcctgttaaggatgatattggcggatgggagggaggccgaggtcttggatttggcgggtagggagtctgggactttcgaggaggcgtcagagggggtttcgaaaagggtctcccaagaggatgaggaagagagggacgaagagggggaactgtgttggcattctagtagcttggttaagttcagccgctatcttggaatgccgatggagggcttcgaaggggaaattttgtttttgcttaaaagaataaaagagaggaaatttcaaaaaggaaagttgaatggcagaaaaaggaaaaaattggagtcgtcaaaattcgaaatagaattgagaaagttggaatggatagtgaattatcttggaggaggagaagagggggggggaagtatgagcaggtctaaatgaagctccaactgctcacttggaatgtaagaggggccaataattgtgataaaaggaaggtgatcaaagctttgataaagaagaatagggtggatctggtttgcctataggaaaccaagatttaggaaatgtcaatgggcattatccgtagctaaggagtgggaagattccttgaatggggagatgtagattcaaggggcacagctggaggtatagtggtgttttgggataacagggtgttggatttggttgaccttcaaaaaggattgttctctatttcttgcacttttaagagctgcgaggatggtttcatatggatgtttacaggggtttatggcccaacgttgaggaggaatagggagagtttttgggaggagttgggggccattaaggggctttggaatgggttgtggtgtgttgtaggggattttaatgccattctaagtccggaagagcgcaacagaggagggagattgaattcaaacatgagaaggttctcagaagttatagaagatctagagttaaaggatctgcctatggttgggggtccttttacttggattggagggctgaataaccagtctttttcaaggctagatcgttttttggttaatgaggggtgggatagtcattttggtgatgcgaggcagtttgttctactaagacctgtgtccgatcactttccggttcttctggacggagggggcctgagaagaggcccttccccgtttagatttgagaatatgtggctgaaagtggaaggtgttaaggaccttttgaagcattggtgggaggaaggtagcttcagtggatccccaagttttatcttggccgaaaaactaaaatttatgaaggctaagctgaagaagtggaacaaaaacacatttggtagggttgaatatagaaagaatttggctttggagcaggtggagttttggcataccaaggagaaaattagtagactgtcgttggaagagctggaagctagaaaagaagcgagggaagattataaaaaatgggtcttacttgaaaaaatcacgtggaggcaaaaatctagggaagtgtggttgaaagaaggggatagaaataccggttttttccacaacgccaatgctcacaggaggaggaataatgtggacagaattaagattaatggagcctggcttacggaggtgaatggaattagggaagggattgccaatgcttttaggttgttgctgtccaatccgggggaatggcgcccttctgttttcgggctatagtttgagactttggagcctttggacgctagtgccttggagattcatttttctgaagaggtcttcgatgcactattgggctataatggggataaagccccggggccagatggattctctatgaccttttggcaatttgcttgggatttcgtgaaggctgatgtgatgtgtttcttcaaggagttctatcaaaatggcaaatttgttaaaagcctaaatgcaacttttatggtcctaatcccaaaaaaagcaggggttgaagccttaggggattttaggcctataagcttggtgggaagcttgtacaagtggctggccaaggtcttagccaataggctaaaaaaggtggttggaaaggtggtctccaaggctcaaggggcgtttgtggaaggtagacaaatcctagatgcagtgttgatagctaatgaagccattgattcggttctcaagaataatgagagtggcattttgtgcaaactggatatagagaaggcgtatgataacgtggactggacttttattctcacagtcatgcagaaaatgggttttggggaaaaatggatcaggtggattaagtggtgcatatccactgcaagtttctccgtgttggtcaatggaacccctacgggtttcttccaaagctctaggggtttgagacaaggcgatcccctttccccttatctctttgtgatagttatggaggtctttagtgcttttcttgaaagggctgtagagggaggtttcttattgggttgtagggtgaagggtaggagtgaagaaggggtcctaatttctcacttgttgtttgctgatgatacattggtgttctgtaaaccttcacaagatcaattgacttatctcagttggttacttatgtggtttgaggccgtttcgggattgagaataaatttggaaaaaagtgaactcattccagtagggagggtagagaatatggatgatcttgcttgggaatttggttgtagattgggtagccttccaaccacctatttggggatgcccttggatgctccttttaagtcagttacagtttgggatggtgtggaagagcgcttctgaagaaggttagccatgtggaagagacaatatttatccaagggaggagggcgactcttattcgaagcacgttatcgaatttacccatctatctcatgtcattgttgtgcttaccaagctcagtcagacggagattagagaaaatccaaagggacttcctttggggtgggggcaatttggagcgaaagcctcatttagtaagatgggagttggtgtgtttaagtaagaagaaaggaggtttgggggtcaaatgcctttccattctcaacaaggctcttcttgctaaatggaattggcgtttcgcaaatgagagagaagctttgtggaatcaagtgattagagggaagtatggagaagatagagggggttggtgctctcgggaagtgagagaggctcatggtatggggttatggaaaggaaaaaggatggatagggagttggtgagcgataggatggttttcattgttagtaatgggaggagggtgagattttggagggatagatggtgcagggattctcctttgtgtatatcttttccttctctttttgatttgactgttgagaaggaagcgtgggtggcagatttttgggatcctttggctgaggggggttggggggtgggggagggggtttggaacccctattttttaagagctttcaatgattgggaggtagaggaggcggaaagatttttggagaggcttcatggtaaaagagttattgaggatgtggaggatatagtgtcctggactgaaactaagagtggtaaattctcggtcaagtctctctatgttgcccttgaagcgggttgttcatctctgtttccttcaagctatatttggaatgtgaatgtgcagcccaagattagtttctttgcctgggaggctacgtggggcaaagccttaaccttggatatggtccagaaaagaggacgggcattggcaaatagatactttatgtgtcttgagaaagaggagaccataaaccatctgctccttcattgttcaagaacaagggtgttaggggatctactttttaccttatttggggtgtcttgggtattgccttcttcagttagagagacccttctaagctggaatggttttttcgtgggcaaaaaacgcaaaaaggcgtggagagctgctcctcttcacattttctggacggtttggaaggcgaggaatagattggctttcaaggatgatatgttgtcaattcagcgactgaaacactcttttatcctttctttttggtccgatactaagttgttcatagatgattgccctctaactatatctaattttattgattggttgggctctaagtaggattgggttgttgggctatctttgttttttagccttgttggaggcgggtgtataggtattatataccttgagtcgcttttttagcgtttcttttatatatgaaatcttatttacttatcaaaaaaaaaaaaatgtaattgaagactttcacattaatgaggtaataaataaccactgatacttcttcaccccaaagttccttcacaaaaatttggcaagtgaagaactatttcggagttgtgaagcaccaattccagcttcattatcttgatcttcagaaagagggatccaacttgatttgggattttatacctgtcaacccagtcactaatttttaggagaatacttccaatttaccattgggttgctttagaaagtttcttaatagtgccatctctctagcttaaggggcttttgttaatggaaggcaaatactagatgtggttatcattagtaatgaaatcctagacaaatactagatgtggttgtcattagtaatgaaatcctagatgaaaaattctgttctaaggacgaagggatggtttttaaaataggttttgaggaagtttgtgatcacatagattggggtttcatgtatgatacatactttgaatagggaaggccttgaacctggatggcacaaagggactggatattttgaggttgtttttcaaactgcaggctctttaatggtgttattgaagctgagtgtttagcactcgaggaagattcggacatggttgtttgcctggatgtaatgaacctccatattgaaggggattcctttgttattgtctcagaaccttctttgaaggcaaaggtccttagtggattgctcatcagatggggtggcttcataatcatgctagagacattgcttgttcttctctattgaggcccagatcagctagccaggtgcatggctatatttttcttatagggatgctaatatctgaaaatttttattgagaacacttactgctctttgattggtttgaggcatggagcggcttttctgttctcttcttgccataaatgcatatcatccctctttttgatcttgtttaactcaataaattctcatttgttataaaaaagagatattatgttacatgatggaaggactttattctgttatggaatatgcaaaacctagatctattggctagagctatacagtaggttgttgggctgttcagcattgtctcttttttggataggtttggccaatgccccttgatgttactttttggtaatgtaattttctttgatttttcttgaaaattcctcatttttcaagcttgcttgtatatctttcctgcttccattaatgattgtttgattccttactaaaataaataacaaattatgatgcaaaaggattacgtttatggaaaattttgagattttcaccagattagagtctctgaagctggtacttgtcttgacacagataataggaatcgttttccccccaaactacataagacatgtctgctacttggtaatgttccattggcagttataaactctcctgtcaaaagtgaatctgttgtagcattccaaatggtgtagtgtcgtacatagattggtaattgaggactttattatggattttgtcctgttctggttgtgccaacaagttctatcctgttctttgtcttgctgatttgggtggttgtgcatcatgatcctacagctgtataattatgcttcaggagcatagttattctggttttaccatccagatgatggtactaaagtatttgtattctagattgcacaactccttatatgggatatttttgcaccaaatgcttagtgatcaagagaactctcatattaaacacagtcatcttctattaaactaaattccttaagtatgcagtctcacaactacatcataccattcttttccttttttcttcctttcttgctattacaggttggttgccactaatatagtagaaagcaaattacacgaccctgcttccataagacctttcttattccataggttgaaatagaaaaaacacttgatgggactaatgtttctttttgcaaccaagcaaattaaaatgttttgaaacccatgctgccatgatcgtaggtaatttgcattttatatgtctactcctttctatttaccataatgatgcatgcatctagtcaaattgtgtatttcttatgcttgtatttatttcctgatgagtttattctgactctttgatcaggatttctgcaatcacattgcttgctattgaattttcaatggcttaatatgaattattaataaagatgttgtttaattatttcagcagcttatacttggtaatttcttttaacaactcttatctctgatgttcatttgtaataaatagctggagaaagggcccaacgtgaacgccttcgggac

SEQ ID NO: 13178 - DNA, 3021 bp, Vitis vinifera
  Intron number 20 from transcript GSVIVT01023884001 (locus GSVIVG01023884001) derived from phytozome v7.0 (chr-ID chr 3; pos 2703025 to 2706045 reverse strand)
tttcatccaaggtatggtttcgactgcgctttaagttcataatttaatattctttttttccccttctgatgtgtaagatgatatatgcatgactgaatgctttctggaggatgccgattactattttatttctgtttattctccttatttaaggtgattataatctctctctctctctctctctctcacacacacacacacacacacacacacatacacacacacacacacagatgtagatatataatgaattatgaataatgtcatgccatttggtggtcgtgtctattgagtctgttagagagccggcccattggttaagggcccatggtaaagaaagtccaggaagggcttctaagacctccttttgaaggagtttctggcaaacccttggagtatttcgctaaccctctcataaaggtgactactcagggtccaatggagcggctgttgggagttgatgaagtcctcatggcaaaagcgataggttttgaaggtagtttttcctcccttctccggttgggtcactaatcgtcggcatcgggccaatgtgtcaagcaatggtggggcctcccttggggactctaggttctagttttcggccgttaagaatgttgctccaagatgggatgatgatggatcttatggggagtgtagcaaagggctcttcgagtaaaggatttggtggttagggctgaagaggtgaaggacattaaaggctaggaggcctatagcgtttcgaagggggaggagcttggttctgttagtcttcctagtaagttagccactttcagtagctttttgggattgcttgtggtgggttttgaaaaggaaattagttcccttctaaggaagatgtagtcaagaaaaggacgtggtgttaaggtcttaggaggaaagaggaaaatgcttgtctacttggttggaaagggaaatccaaaaattagaaagctcggttaactacaattgcactcctctcttagtcaggggaagggataggagcagtggggttttagctcccctaatttgagatcactttttttttgctcctagcatggtagagggtttttcgttttaaaagggctcaaggatgttgtgtgctccttgttatgctctagttgtctcctttggtgttggttttgtttgtgctctggtctttcctgccagggagagcccggttttttagggggttgtgttttgggtggttggtttttgcttttccctttcctctcttgttagccttttggtgttttttgtatacttcatgtgtactctgttgtgcctttttgctagttcttaatatattctcttatttatctataaaaaaaattgtcatgccatttggtggcatgagtttctatttgtttctagtatgaataaatggctgagaaccaaaatgtgtgttatcatgcttccgtcatatgattaggaaattctgagaactttttgctcttagtcagtacttcctttccttctttggatagaacaaattttgaaggatactgaaggtggataatatatagaattttgcttggttttattttccttttttttttctttttataaaatcttccacagatttttattttttattttttatcaataagtaaaatatgtattgcaaaagaggcgctaaagaagcgacgcaaagagtttctttttataaaatcttctgcagatattattgtgttgagagttgaaaccagggaatgtagagcttgtgttggcatttatatgttcccagaaaaatggcagggataaatgaagtgaggaacaccacaaatactagggaacaaatatttctgcctaggagttctctactttcacaattgttgctttaggtgccattcatactcctttgagatataacaaagggtttgtcctctggtaaatccttgttctataagagccatgaaatgtacataagggaaggcttgatgaatatagatatggattacatgaatatctgtatttctacctagcagttctctactcaaatataggacattcatggactacatgaatatagatatgactccacttaatttgagtctttgagggttggagaagtcatcgtttcaatgatttaatctattctgcctctccccataaaagcctgaggcttcatacaaggtcatctgtgataggtatggttcagttttgcattcaacatactgccatattttttgtgttacatagattttcttttggttctttgtttttaatgtcctggaaaatttaatatcaacaataggcagagggggccttggtctctatccaaaccatctacaaaatctagaaaagataaacttgtatcacctagagaactccttgaccaagaaaaaagagactctatgaaatgatctttcaatgccaaatcagatccaagccttcaaaagtcctgcacttctgctctttccagacactccaaaataagcacaaaggtgccaacctccaaaccgtcttcctggccttgctaacaaaactctgatgcctgctagactatgaatcttttacttaatgaggtaatactctgtacactcccaactctgaagtaactagttggcattccatcaatcaacatagcaagtttgactgtggaaatacaaaaatcattgactcccactttaatttgtttcttttagatattgactcatggaaagccttatttatcttaatagctaatcttgttttagatatcctcttttaatctatataatatacatttcatatatttattgcatctctatgcatacaagtattctgtcatgtattgagaaatgctaaatttttttatgttcatgtttctgaatctttttacttatattcctgaaacaatctctccactttattcactatgctgaaaagcgaggtttgaaagttgttcaattactaatattttcaagctttggataattggatttatagtgctgtttggttcaagcctgcgctgattattatgttggtttaatggtttggattccaggtattgcttggtctttcaggagttattgttgtcat

SEQ ID NO: 13179 - DNA, 6840 bp, Vitis vinifera
  Intron number 9 from transcript GSVIVT01008369001 (locus G SVIVG01008369001) derived from phytozome v7.0 (chr-ID chr1 7; pos 2770643 to 2777482 reverse strand)
caggagataaaccagtctttccctactttcgctttgttctttttttttctctttctgcacttcattgaaattttctcccatcttttctaggcaaagaaggcaacagaaagagtgtatgaccctataatcccagtggagaagtcattaagctgaaatatagattacaggaaagtaactttcccattaatttggaggcttgcgaaagactaggcgtactgctaatgcaaacatcattgtgcttcttgttgggagctgggtttaactcccaatgttttgacggacttagttatttagtttgaatttcccccttactttgtatacagggaagtctcggattctcgtgaatttataattaatctttgttattttttattaagctctacttttgtaaggatttctaaatattcatttttgatcattaatttcattcatggctcttaaagttttaacattttttcttttctaattgatctttttcatttttaatttttgttgttattattattataacctataaaaattatattaatactaatacatataaataatataataattaattataaattattatttcattaattattattttaaaaatattataaaataacttatccaaaataataataatattagtattaatataatcgtcttataaattattgttttattttaataattaaaaatataaatttattacatagatttcataaattttgtcactagttctacaagatatctattaagaaaatatatatatatatatatatattagtaaagcttataggccttaagaattaaaaaaataaaaattattttctagggattttttagtagtaataataaaaatatttgtatataatattaaaaatataaataataaggtcaataataatcataaaaataatagataatattaataagaatgatattgacaataacatgaataattcaaaatattaatatcataaaaaataatattaataattaataatagtaatgtgtaaaaaagtataaaagaaaaacggggaataagaggaaaatacaaaatatacatatatatatatatatatatataattgaaattctaaaatgttcaacctttcaaatcattactcaaagagggtaggaattataacttagtgaaccttatcaattccaagtttccaacctttcctacgtcgtaatcttcccaaataataattgctttaatgactttttgtgatttgatgtgagcttgcattttcaaaccgatcatcttaagttgaatttcctttggcctttcacagattcagccaacaatgagatgtaaggaaacgggaaaaaggtggccacgatgtgatacgcaaaataaatcattcgatcccaaaaggcttatcttcttttcttctttggtagtagacaaaaactccatctctcacctataagggacttttgacattgacaagagtacggtaaatcaaagagagcagactctacaggtattagaaatcttcttttcaaaagccgattttcatccgaacgaataaaaaaaaaaaaaaccttaaaaatcatcttttgaaaagacgatttccccaaaaaaaaaaaaaaaaaattcccttaaaaaaaaaatctcatatgaaaatcatttcttaaaaaaccaaaaaaaagaaaaattatttaagtgaaaatcgtcttttcaagagacgattttcatccaaatttcaatttaatatatttaattatctctgttttataaaaaaaatatatatatataatttaatataaaaatatatttgaatccatttcaaaattaaaaaattaattaatttaatttactaattttaatataatataaataatatttatttattgttttttttttctttcacttttgtaattaaaaaaaaaactattatcaatttatatgaaaaaatgagtttaaaaaaacaaatttttttattaatttattatataattatttacaaaataaataattttgttttgttttaatttttaaattaattatattatataattttaagattaaaaatattaatctttttaagttaaaatttcatatgttttcataggtattataacctattatacttcatcacaccaatttaaagatgaccgtttgctaccctcacaccaatttgaaggagaccgtttgcgaccctctcatacctaacaccaatttgaagaagaccgtttgctaccctcacactaatttgaagaagaccgtttgctaccctttcatacctaagaccaatttgaagaagaccatttgctaccctcacaccaatttgaagaagactgtttgctaccctctcatacctaatacaaatttgaagaagaccgtttgttatcctctcatagctagctcataagtataggtataggagaatcttacctattacatgtgttatcatttccgcccatttaatactccaatttactccaccaattttaccgttatactccaccaattgcatttgaaactcaaattttaaccatttatcctacacactacactcatcttaccttttttcgacttctcatacactaacttttcaccttcaaacttcttctttctaattttcatcttcaaacttcttcactctcatttccctatcttccccacttgaaagtcaatttttcacttatcagtttttcacattccatctttggtagactttgagcatatctcatctcttttcttcgacactcactactaatatttttgctttatttttatttcaagttattttataatatatagtttttattattatataagtttttaaatttatttggattatataatatttgtttgaataatatttattggaaattattattttaaatagattaaatcattcaaaaaaaataaaatatatattattttattcgtatgtaatatttttgcctttattttatatttattgtataatgcatgatagatatttattgttacatgtattttttaaaatttatttgatttatgataattttgttagaatactatttgttataaattattattattatataaagataaatgaattaaatcattcaaaaaataaaaatgatattagtttatttaattaatatgaaataagaggattattttttatgtttatcaatcaaataatacgttttataaaatattaaattttaaatttaaaaataaaataaaatattagtaaaatgagaatgaaaaataataataatagaataattatatttctatatattttgcataatatatgatttaaaaaaatattaaaatttaaaaaatagaaatacaacattatccaaaattatgaatttatcctatatattttttaaaattaatattagtgttaaataattgaaaaaattgttgtaaaacaatgagatgtaaaaataaaaataaaaataaaactaaaatgttatttgatttatttaaagtaattgtgtataatataaaatagtaatagtgggtattaaaggtatataatatatatttaaatattaaattcatatataatatatatttaaatatcaaaatattcatttaaatggataaatgaaaagaaatatataattgtaaaatgttagaatatataataaaataaataaatttagtaatggttgttagtgttaatttttttttttgcatataatattatttaaaaaatattaaaatataagaaatataagtagaaaattatctgaaattatgaatttatcttctatattttataaaaattaatattactcttaaattattgcaaaaaatcttgtaaaatattgagagctaaaaataaaaaataaataaatgtagaaataaaactaaaatattatttgatttatttaaatggatattttaatgtatataatatatatatataattgtgtataatataaaatagtaactgtgtatataatatatatttaaatattaaaatattatatacatttaaatatccattttaaaaaagcaaataaatatataattgtaaaatgttagaatattaaaatattaaaaaaatttaaatgatgcaggaaatacattctcatggatcttggacatgtagatcgttttattttgtataaccaagaagtacatcgatcttcgcttatataggaaggaaatgatcctggtgagctccattgtcgacgtcgtgaagctagtttttatcgtaatagtgttttggatgcacatatcattccatatctgcaacaatctggattctatggtgttgcccgattaggtgtcatttcattggattggcacctcattacaatattcatagagagatgacaccctaagacctacactttccatgtacctcaaggagagtgtaccattacacttcaagatgatgttagcattattttaggcttatcgattgatggtgttgtagttagcggtagcacgtggttggattggagagaggtgtgtgatacattgttaggagtagtgcctggagataaagatatatctggacaaagacttcgtttgacttggttgacagaacattttccttcattgccacctgatgttgatgtggagtccatgagatgctgtgctagggcattcatcttacagttgattagaggttttctttttgcagataaatcgaacaatatggtacacttaatgtttttaccactacttgaggatcttgaagttactggtacttacagttggggtagtgcttgcctagcttggctatatcgagagatgtgtcgagcatcccgtattgatgcacatgatgtatcgggtcttctcattttgttacagttatggataagggatagatttcccttcatagcacctatgagcttacattcggccccacatgatggagtactgccacaaccacctttaggcatgcggtatgtattcaaccttagctatagcatatgtaaacacatatatgcataaataaacaattactaaaacttttaatatatattctttttgtagttagagagatgaattttgtactacttcgatgcctatgcatgtgttacctcagtatagatatctacttgatcaacttatgctagagtaggtgagaaattcattattttgaataatttttttaaacgatttataatcataatattattaaataatgcatgtgagtcatatttcaaatttaattgcaaattatataggagctatatactgatgatgtcatctctggactcccagattattgtactattgcctctgacttgtggttgactatttcaccacttatctgtttccacatagtggagtggcatagacctgatcgtgttttgaggtagtttgggttactacaacatattcctgagcaatgcgatacaaaattgggattacatagatatgatttgaggggttgacatgatttggattggatgagtattcatcaccactatattcaaaggtgggaggctaggtatgatcatcttgctagagctgaggcagcatatacttcttacgggtataaccatccatatatggtgtggtatcgttctattactcgccttttcctgactccacatggatcttcatgggagatagtggtaattacaatgtctttttatttattattatgtttttcttctaattagaaaaacatctaactttttattcttaattcttacagaatcgcagtttgcaacagatacatctatggactgctccaaatacaccgaatataggtcatcgtgatgaaattcatcaattatgtgcaaccactttagaggctatacacgagactgatcggttgcttattccccctaatgtcgttgatatagagagacaatcatcggatgaggagatagtgatgagagatggtggggtacgaactagaggtggtggagtgcagactagaggtgatagggtacagaccacaggtagtggggtccggaccagaggtggtggggtacgaactagacattcagagatacacgaggccgataggttgcttattccccctaatgttgttgatacagagagacaatcatcgaatgaggaggtagggatgagagatggtggggtacggactagaggtggtggggtgcggactagaggtggtggggtatagactagagatggaggtgtacgaacacgtggatgacatatttctgacgatccacacttccctatcaatgatgcatctatacattttccaccatcagctctacaacattcttccttcaatttttctacaccacttgaccggtcactgccttattcatcagttccatccattgctgagggagtgatacaggaagatgttgggacatcattcatgcaagagctatttcattcttatactgttgggccttcttttcatatacctatgtcgcctagtatcgatgtgtcatttactccacctacagcaccacttattactttgtcaccacaatcattagaacatccatttagagatgatgtggcaacacagatacaatactttcccacgccacttgttgaacaatagggagaggctcaggttcaagatcaaggacgtggacgaggaagaggtcgaggccgaggacgaggacgaggccgaggacgaggacgaggatgaggccgaggacaaggacgaggacaatgatgaggaaatggagcaacaacattagatggtctctcatatcaatctgagttggaattatttttcctactacggtaatttaagaattattttttaaatttaccgtactcttgtcaaaagtcccacctataagttagcttcgctttttgatatctatataggttcatttaatattaatttctacactaagttaccaaaatatttcctttttaattgatgggtattttagtcagtaagaaaagataactggttatat

SEQ ID NO: 13180 - DNA, 1047 bp, Vitis vinifera
  Intron number 9 from transcript GSVIVT01022069001 (locus G SVIVG01022069001) derived from phytozome v7.0 (chr-ID chr7 ; pos 16332662 to 16333708 reverse strand)
atataccagcacttcaggtacattcaatcacatctttttccttgagcccctttaagattctactgttacctactcaaaaagccaaaaaaaaaaactgttacaacagaatcagttccattgtattgtgtgtgtgtgtgtgcatgtatgtatgtatgtatacaacacaaaactctgaagaaccccagaaaaactttgttgcctggaattggtttaaatgccataccacatatttgatttggatttcttttcatcatgatggaaaaaaatttgggacatcttcatttcatcatgaccccattgtttctcttgttaatgtctgtgttcttcaatcctgagtctttattacttgcggcaaagaaagcagcttatggtgtgaatgttgattgcttgaccactctggatgttccttttgagcagaaccttcatgttattgataccgtcaaaactagtcttcatcagacttgtgtgagtgcttttagggatgcaaatagaccataatggggtttttatcttacaggaaccctcaattaatcaaacctggggtaggtagcttgacagctagctgtgcttttctatctgtcactctctacagcttgagttgataatttgtattctggaggatgttgctaatgttcatttattttggcagttccctgtctaaagtggtatttttttcattctgaaattcctgatagtcacaatgatgttatgaagctataacatcataagggtctctaagaccatttagtttcaaaagattgaatgagaagacacagaattttatagaattaaatttgctgtcttcaattttttaaagcattaacctgtaataagtctcctcttttgttcattcttccaaaacccacttctgaatttgataccgagccaaaggccaactcaagaaagtaatatgggaatttaatcccatttttgttggggtgcaagtcatttgttagaagttttaaattcttcatgtttgaagttttaagtctgcaactactaattctcataaatgatgaaggtgagaaacgtatcaggtgagtggat

SEQ ID NO: 13181 - DNA, 1309 bp, Vitis vinifera
  Intron number 2 from transcript GSVIVT01026065001 (locus G SVIVG01026065001) derived from phytozome v7.0 (chr-ID chr1 8; pos 25053637 to 25054945 reverse strand)
gcaccattgttcttgcttctcttctctacatcctggttggtctccctctctctcatcgactgtcctaccatcccatggtggttgaatatgccttaagttcagcttcttattagcgaaaatggccctctacatacccagaaccactgtttattatcataagaaggatcctcttctttgggttatttgattaatagggtatttgaaaacctaatttttgaaatttaacctttcaccatttttttttatctcatttgaacaaaaataccctcattgctttcttataaaaataaccatctgttttaaaatctatgtaaatacttaaaataacaaagaatatttatgtaaaaaatgagttatttttcaagaaaaaatatgaaaagattagattcacaatttgaagattatttaatccattttaatcaaatatttcttcttattattaattttaaaaaaatttagataacttggatttaaatttataaatgtagatcggggagtttatcctacaaagtgtaaatcgaataaaaattagtattaactaatatgtatcaaaattgaatttgtatgagatgaaagaatctttaatttactgtttaatataataggatttatactttgattttgtacagctttttttttttcctctcttgaaagttttaaatattatatatgtatgtatgcatgtgacaattccattaaataagtggtcaattgcattaaaaaacttgagcttgcaagcccaaagctttggggtccattgatttaaaatagtaaaaactaagcaaaagagcatgaagtgatattattaataggttatggacagctagctggccattaatcaactattattccacatcatatactacatagtacaccacaagagtccatgcactcattaattacttctacgtcaaaagcattttcctccattagtaaatgtgtttgtgtgtttctcatccaaggggtttcatagccttatcttgctttgaccacttgttaaaaattgtgtcatctttttatttcctaagtaacaatctacattgaaattttttattttttgggaagcacacttgtggattaggacaaactttattaattcaataagcttggttaattctaaattttaaaaacatatctatggtctccccacttcccaagttattctcaaaataccaagtataagtggatttttagtctaagcaccaatgcgagaaacaaattcttctggtaaaaaatagaacgatcgatttatatctttgacttgggttgctatggatctcaggggctgagcttgttaactttatctgct

SEQ ID NO: 13182 - DNA, 10883 bp, Vitis vinifera
  Intron number 5 from transcript GSVIVT01029345001 (locus G SVIVG01029345001) derived from phytozome v7.0 (chr-ID chr1 7; pos 14857300 to 14868182 reverse strand)
ggtactgtatttggaactaaagaactgccttcttgttttgttttattttcttttaaatattttgttattacaagtatgtttgttgttgtttgtgcacgttatccctgttgttagtttggcaatcatacatttaacgtttctcctgttattagtttttggcaatcatacattatttctagtttcaatgatgggcaacaacattaaatccatggcaccttgatgatggtgttgcagtggcactgcagccacattacattgatgtttgtgtagcatcagcattggaagcacattgcattgatgtttattttgcagtggcattgcaaacagtgtatatatgtttgtgttgtttgttgatttattcatatgataaaatatctgcacatttatccctgtttctaggagtcatactttatgtgatgggttgggagtgaaagtaaaactcaatatacattacacaatctttgtgtgatatcgttctatagttaatggttgtttgtttgacgaattttctttggtagaatatcacctgatggagattctttttcatttgatttacatggaaaaatattcctagttgctagtgtttgggtaatatggaaagcaagaaatgagaagctttttgagttgttgtagttgaatgtttatcttgtggaccatatgattgttaatttggtagatcttgcagttgagtaaattaagagggatcgacaatgtggaattacataaagcctggacttcatgtttcttcttaaggttcttttatttatatatgggatcctaaacatttttttcccttgatagggtatatgggatccttatggttgattcttgaatcttcttttattctatatcttatacatttttccttagctattaatgaatctggttacatgccataaggaaaaaaaatggtttgtgaggttaagaccaaatgcaataaggtgtagttaaggccatatgctattaggtgtatatatagccggtgctatcctgacctctattgtaaaagacttagcttctcagttaggtgaacacaatcaaagtggacagctgtacatgattttatcacacactgtatctctcagctgtgaaagagctgagcttttatctccttctatagcctaatcactgttttacatgaatgtatatgacttatatatgagaaaaggaaataaatttatgcacagaaaaaatatcatgtatggctggggctaaaggttctgttattgtggattgtttgaagagttcccaagtttgcacataaacttgactgtttttcaggtgaaattttttgttctaaaaagtatttaggatgctaaggatccttgttatcccacttcaggagggggagagggggttggcaaaattgtctctcaatagaggttcgatcatgatgtttgttcacagatattcatgtctaacaaaataagtaatgggggacccatccaccaaacttggtagcaccatgtgagcatggaatattggttcaaacggcatgtgtgggtgctaaagctctcacaagatatagatatcatatgaagatgagtatatactatttggggattaaaaggtccatgtgattgttgctgcaacatggagctatattacaacttcagttgctctttaattgtctgtgaaatgagtgtatctgaaaaattacaatacccagttggacatcgtggagcaccttaccaacttacccattggagtggagaaattgtggagatcaaataaattttccttgcaaaggtgaagaccaatatctttaattccttaaagatattgtaaaatttctttttaagtggcatatgatggatgattagagcatgcacatgctgtcagactagattatcggaataagcagactagattatcagaataagcatggtctgattgaatgcattttagatacatgaatattgctatgttgccagtggactatgaaagtggatgtaccgcatgagttcaaatggtatagtacctgcatttctggctagtggagtttttcctttttttttttttacctcctttttcttgagagatttgagctaatggtggtactttttcaagataattgctggcatatcagctgcttttaatgtccaagagtaagattgaaatgttctttcattgtgaatgtgcaactcacatcaatgaattcctgaaaaatgtaattgctgcctttagcctattgaatagacatgagcatgaatgtgaaaacgttatagatacatcattatggaaaataaaaaaatgagaacaaattcagcatgaggactgattaataagtaaacatatacttctgcatatgaatgtaggccttcctaaaagacaattgtttttttagttgtttttagaaattctttttcttgacagtcgtattattttctatattaaaatggaacaattgcattccaaaatcattgttagattaaataggagctgtggggttggtcgcttccttgagtttttgtttttattttttatttttatgttttgctttttatttttatattttatattttggttgagggtgcagggggaagtgggttaaacagcttcctactcaaaccatcagttgaatgacgcatgaatgcctccccagagttatgtgcatgctctgacatatacacaaaaacatccattcacacaaacaactggcctgtattagagcatgtactggctgctttgctacatgttgttcaaggtcaaataattaccactggatcaagtgaatcctctgaatgctggccggtaatggaatctgctatggcaacttcactggattatagcaggctgttgtggatgggacttcatgtctctggttatcatcattatcatcatgggatttggcaaaggtgtgataggatgtttcctgtcaaatactattttgagaagagatatctgggaacatatgttttttcccccttctagtaaaacatgtcatgacaaatatatctgcccaaatggatggatggaggtatgcacaaaccgtttctgatatgttaatatccataaaacacgtggaagggaagttaagaaaaaaatcgtctttttgtggttacatgggcaaagatagaaagaactggaaactgaataaaaatgagtaatcttggtgactatcagcgatgagacaacttgaagatattttgattttcaagatgttttctaaggaaagtagtggcaacctagatttaaattcacttgtaaccttattgccaacactggagttttatgagtccaacaacattttttggcttattttctgaacaccatccccctcgaggtcttggatgagctactagttgaacggtggatgcttatcctgttgggattgtatggagtcagtagcaatagctcagtttgtatctggaggataattttgcagggattggattctttgattttgggtaaaggtcagtgggaattatggaatggaggtatgggtcttcttgtctttgatcatcatcattattatcacaggatttagcaaaggtgtgataggatgtttcctggtaagtactatttttgagaagagacatctgcaaacattaatttttttcctttctattaaaacatgtcatgacaaatagatctgcccaatggatggattgaggtatgcacaagctttgtcagatatgttatatcccataaaacacatggaagggaagttcagaaaattgtccttttgtagttacatgggcgaagatagaatgaacacctagaaactaaataaaaatgaataattggcgtgtgtattaatggggagacagtcattttattttcattaaaaaaattttctaagaaaaatagctgcagcctagattcagaatcacttgcgatattgctgccaatgatgtggagagttccaagtccaacatcatttttgtgtcttagtttcagaacactattctgccaacgttctcggatgtgcaactaattgaacagttgatgcttatccagttgggtgtgtatggaaccattaccaatagctgagtttgtggaaattatggaatggtggatcttctcttatggtggagactgttttccctattttggtgtctagctttctcctctttcttgaaaacagagctaaggagtttggactggaagtgcctcttgtaggttttcaacggtgcaagagatttcagtcattattggtggcctctcttgaggggcatggagtagatgttattggctgtctaaatccattgaccataataggatacgacagtcttaggatcctatttctggagagaggatagcattgagctcaaaaagagtagggaattgaaaaagctgatgtccattatgaagcatgaggggagtagtaatagtaggaaaagtaggttaccagagggggagaaggagaggggattaactgttttcccatggagctcaaaattatttcctgggacatacagggttttaatggcagaggaaagtggtcagttgtgaaatccctctcaaaggactggttggttaatgtagcatgtttgcatatttgcccttgaagcttggctatagtggtaagggattggggtgggattgtggaaggttcgatgttcacattcttgagggaacaaaaaaggaaaagggaaaaaacatacctaacaaaaaaagaaagaaaaaaaaatagtagtatgttgcatatttccacctgaattgatccactacattcacagatttttggacaaagttattttagaagtgggaggaaaaagctgggtatccttatctttgggtatccaagggtgttgcagaagtctgaagcacatgacttcattttgggttcactcaagttgtttttggtctacagacaaagtagcttttttgatatatggtttttttttttttttttttttgtggtccacagacaagtagtgaaagggaaggttctttggtggaagtgtggggagggaatccttgatctattatggccaatctcaatatgagagtattcccctgagagagactctctagttgaataaattttcagactgcatagtgaactttgagggattttctgttgactggtagtcttttatgtggtctggtgggcaggataatcatgcaatgtcatggattgattgatttcttgtttcctgcgggattgattattcctgtagataatcatcagactgcatagtgaactttgagggattttctgttgactggtagtcttttacgtggtctggtgggcagaataatcatgtgatgtcatggattgattggtttcttgtttcctgtattgagagcataactttgttaatgtttttaggagcttccttcctagatgatgtagagcactttctttgatttgagagcatttggttaaaggaaaagggatttggtgatagagtgaaaaagtggcaaagttatatctataagggaaacctttttcagccctgttccatagagctttttgaatgcaaacatggcccaaacttcacaatgtgatttatcttctcattggaaaagcagagaaaatcctacttttcctcaaatgcaatgtgggaaacacatcttatttagttaaaagtttaaaatatcaaaaacaatacttatttctaataaaagcattctcaaataacagacctcagacacagaattaattacacaataaaattaagttgcttctgcttttacctcttctactgctaaaagcaggagttagaaactatctgaaacatgcccttcaagttggaaaataaaataaaggctttaaaagaagatttgtggaagtgaattagagaaatttttaggcatgtggttgccaatgaagccgaggcgctggacagaattagggagtgggattataagagctttaggaaatgcatttttgatttgagagggggtagttgctttgtataccccttgtatactttgtaactttccgtctctttcttaatacattttgctgtacttatcaaaaaaaaaaaaaaatctttctaaggaaagggggtcattatgtagaaccccaagggagaggagagttcatggaggagggtggtggcaagcaagttcaggtggatgcaagtgattggcattccaaggaggtgagaggtccacatgggaagctcattatgttgacaaaacaagttcaattgatttgtatgtgtttaagagtcaagtcattgattgtttagtaaacaaattatgttgttgaaggatctttacatgattatttgtttatttagttatttttaggatcagaaaggatctttgcatgatgatcaggtgggttttgtctgggttgagtaagtttaaccacttttaccttgatgtggcttacatccaacctaacacaactcattaccccaggtagaagagtctgctcaatgagatggtggtctgcagggatagaaaggacactattaggttcaggctggatggaactgggggagattcactgtcaagtcccttgttcaggcaatatgtagtaggaagagtagaagctttctaacttctattcttttatgtggtagcagccccctctgaggcgaggtagtgcttccctcataggatggagagaaattctcactatgatcaattaatgaggtgaggttttcttatggcaaattgacaagtttgtgtaaaaggaatgaggagtcagccaaccacattttcattcattgcctagtggctaaagagttttgatcctcactgtttttaatctttggtttttgtgggtgatttccattcagttacgaaaatcagtactagtttgcatggaaagttcgtggataagactgagtaaatttggagtgtggctctgttattttgttttggtggctgtatagtgtgacagtagaatctttgcaggagaagaaagattggttttgaagctgaaggacatctgaaagatgtctagtatgaagaaatgtaacaaaaagctattgcactatccatctttgatgaacatgacgaggtgttttatcaaattaggcccactaagaccagatttgtaataccaaggtacatattcttaaggtaactggtgttcccacttatgtgcgctttgattggttgactgtgggagaaaccctcccatccgaatcactgatacatttatgaagccatgacgagagctgagaggccactgcaaggaattttaaattatgcaaatctgactattgagttagatgaagttgttatggccagtttatataaatgcatagcaaaggtgataaagacacaacattttcttagcaagacaagattttgtaaagagttgactctgcaaaggtgagctaagcctcttcgggatggacatggctattaaaaacaaagacagactaaagcaccaggttgactatattcttgattccttttggcacttattactatttcaaatgaatgggtgaataattattaatagctggacggtgggcagcatatggatatttaacttacatcatctttgttcttaacatacttagagtgtctttgaatatgtaaggagcccaagggggagagttagctttgaattctagttttagtttttttttcgactcacaggtaatgggttatttatgaattcctgcaaattggtagctaaaataaacttgaaggatggtacatggttatgtaagagatatggtattcatcaagtgcagctcagtcttaatgtgatgatataatatgcataagatatgtttgtgtgtgatgatgatatttaaacaaaggaataaagaaatgtcttatttaaataaaaggataacaaagaagaatgagagaccctttggtggaaggaaaactctaggtagacccacttaatatcaaacatactccaaaatccaacaagatctttagaagattcaaggagaagatcagaaatgaattctgtctcacagttctgggatggagctctatcagtccatgaaagtcctagcattttcctcaatcctagcaagtgatgcacattgccaaggactctttactcttaatttcctgccaaggccctgaatggagaagaattaggtcaagcttaagcatgagggaacaaaaagaaatggccacctaccctaataaagcctcctcaataacagtagcttgcacccaatggatactgaacaaatcaaacagcaactgccaaaggaccctgacctttgtacaatggaagaggatgtgatttatgaattcttcttctttgcaaagaaaacatctattgaccaagaaccaccctcttttctaaaggtgatctatgaatctttcccaaagtagccttctaggcaaaaaagttaacttcagaaggcacccacgacttcccaattacactccttggaaaggaaatcaaaaccctggttccaatacagcatataaatgcttaacagagaaattattgttcaagttcacccacaccatcttgtcttcctttgcactatcaaccacctttccttgcaaccttgaaaataaatcttctactttgtccacttcccaatcatttaaaggtcttgagaaacaagggtcccaatgatcttgcttccctgtctgaacccatagatctgccactttcttatcattttctggtgatatatgacatattctatcatgttagatctcatacagttgtggtagtgcattattgcagttctggtttattgagagtattgaatgcttattaaacaatgggttgcatctttacttgcctttttttccttcaatgacttgtgttgcatccttccaagagacatttgttgaatattgaatcttgaatgcaatactgtatcttgtgtttgcacctttgctgccttgcatcaggaagtcatacaacactttcataagtttagaaatctcaagagccatgcttctttggaagagcatagtgactcattttttccggtaaaggcttgtaaccccttagatttcattaccaaacccttaacatgcactttgtagcccaggaattgtttccaccttctcccaaagaattgctcaaagagttttgtgatgttattgtgcagatgttataatcattatattattaatatagcaccttggaaactggcatgaagaattgtgctcataagctgactgcttccttaaagccaaacatggcacaacaatgtggtctttatcttgcaatcattacatgattaataatattgcatgttcacatgaacaattctggtcatgaagaattgctctataacttggtcttggtgatgttctctacagattttcagatttttgtgatcattgcatttttaacttgacatgtatagttgtcggcagttgaggttctatagggtttgcagagtaaattctatatgtattgcttgcgttaattggagttttctcaatttttgtttggtatgagtctctttttcccctattgttcttacattatagttggttttcttcccctcttctctctttccttgtatggtgcttattatacgtagctcagtagaggttgctcagacatgtatagatagtagctgattcaggacaaactttatggtagtgttattagaaattaatacataaaatatgccagtagattggttatggaaaatattttcatacttggacactagcagaagatttagggaataagaaaggtgttgaatcttgtctatcagcttggagatagcatatatgtggcttgtagactgtgttttgattgtagaattagttgatatattaatatgagcagtaattatcatggagaatagttggggtagaattagttgatacattaaggatcaatattcggcctttctttttgcataggttgtagaggtgcttatttggcatatcccaaggggcatccaactgtgtatctctttagttcactctttattccttctagaagaatcttgaatagaagttaattccaagctagaaccagggagtgttacaattaaaatatcaagggtttgggttaagctggattaagaccatatggggcattatttttagttgaattagagagagctagaagatgtccaaaaacaattattttttgctttcttggcttgattatcataagagagcagagaatgcagaaggcacacccttggaattagagcaagattgaggaagcaggggaattgtgattatctgctatatgtaaactaggaaaaaaatttgtatgatgattagaattctagctaggcttaatggtaaagaattctaagcaattgaacacacaatatactaaaaaaatgagtttaggggaaatgaggacgtaaggagaaagaaactgcaagaaaagtaagattgaagttattagtgatgagaggtggtggtgacatggaggaaaatgaaccaaacttggttaacttgattcagccatgtgcaatgtgaaccaatagatacataggcaccatgaagacaaagatgaaggccaatgagacctggattagagtgggaaagacatgattgccaacagtttggtgaagatattgtacggtattatgattgctcactcaatgcatctgtcatttcatctcatgggcaacattgttttaatgtgtgtttcttgtaatgtttggacttattgagatagatgattcagtattatggttctgatgttatctctgtgggggtgtgtgcatgtcatgttgaattattgatttgcaaaatgctcgactccactcaaagtaatcccatatgtgaaattctttcaaataataaaaaagagaatgaaatgtggggatctgcaatcacatgctctaagttaactgtcctttaatgtggtatctcgatcatgtaacgtgttgtgtctgcatgtttgcctttgaataatatttaatcaatgtctatacagcttgccaagtgcttcaaacaattattgatgtgttgttcctaaagggtttctcttttgtccttgtttggcaggtaagagaaaggggttcaaatctgtaaccattgtt

SEQ ID NO: 13183 - DNA, 693 bp, Vitis vinifera
  Intron number 5 from transcript GSVIVT01031301001 (locus G SVIVG01031301001) derived from phytozome v7.0 (chr-ID chr1 4; pos 534123 to 534815)
tttgtcatagggacatcaaacctcaaaatcttttggtatgtttatgactacatctatatgcttacttccaatttggttacttattttagtctagtttcaactctacattttcttaattcttatatgaggatgatatataagtagatgcttcacttgaaattttacaaggtaccgattttattatgtttggggaaactaggctctatcaagtttggtacttatttttccgtgtgtgtgtgtgtgatggtagatattgtttatattgacttgtctcaaaacgaaaccaaaatagagccatgttgctaacaggaccaaatcacactcaagaacaagctccccagtgggaaggacccctgctacctttgggtacaactaaagccaaacaacaaattctttttctacccttaataaactccttaaaaacaaaatctctacaaaaaggaatcttcaaagatgaagaatccaagaaattccaatctatttatcattggcattgttatttctcaaaatattcctattaaaaaatacatttctcaaaagatctggtcttcatctcagatgttcacagtcgcatagtttccatattgttaatgatatgagtttgtattccacattgcaatgcacaattttgttcaagtaaaaaattttgttcttctctgtgtaggtgaatccacatacccaccagcttaagct

SEQ ID NO: 13184 - DNA, 6381 bp, Vitis vinifera
  Intron number 1 from transcript GSVIVT01018721001 (locus G SVIVG01018721001) derived from phytozome v7.0 (chr-ID chr1 6; pos 10591667 to 10598047 reverse strand)
ccaacttcgattccgtggttcgcgagctctgtcaggttgtgcttttattttctttcttttctcgcgctttctttacttttatatctgcatttgatgcttgtagttggttctaactcgatcagtttgtcttcacagttgatctgtcataaaaccctagattattatcgtttgatgcttgtgtctgcggttggttctgagtttgttggggaaaagggagaaatcaattttgttttgttttgttttttcgctttttgttttttgtttttgtttttttttttcttaaattttcagaagatgatcaatggaaaaggagggtctggaaattcctttttttctttttctttttaatttcctgcggcgactaaggtttttgtggatggatatttcttttggtgctcttaagcttgaaattttccatgtcgaagggtttttaacatgtatgtttgtatgcatgtatcttcaatagtgttcttcagtgggttacctatcaaaaacgaaaaaaaaaggagtggtctttagtgggtttgcttatataactgagtgtgtagaagaaatgaatgcagtttagtccaatgttttcttattacatgcttcagatgattgtgatgtgcgtactcaagtaaggttctgattgagtgtaaaggaaatgcaaatgtaacaagtaaatgtgttttatggaatgggatgtttccagtgtgtttccattgttgaatgtgcacaaggtgttattttttgaattgcgaatttgggaaattagggttgcttttggttgcttggaaatctggaaactctttgaattggaataaggccccgctggagaattctaggttacacagttttgttgctttgtatgctaatcgacttagaattgaatttactcccataagcgtctaaaggatgaaactataccgcaataaaatcaacactgttttgaaatgtgcaaaattgaagttgcaagtttttttttttttaattttcagaagaagaccaatggaaaacgagggtctggaaattccttttttccttttcttttaattcaggcagtgagtaaggcttttgtggctggatatttttttggtgctcttacgcttgcaattttccaagttgaagggtttttaacatgcatgtttgtatgcatgtatctttaattgcgttctttagtggggtacctatcacaaaaggaaaagaaaaaagaagtgttcttcagtgggtttgcttacattcctgtgagtgtgtagaagaaatgaatgcagtttgagtccaatgttttctatcacaagcttcggatgattgtgacatgcatactcaagtaaatttctgattgaatgtaaaggtaatgctaatgtaagaagtgaatgtattttatggaatgggatgtttctagtgtgtttccattcttaaatgtgcacaaggtgttattatttgaattgtcaattcgggaaattacacttgcttttggttgcatggaattctggaaactctttgaattggaataaggtcccattggagaattctagagaacacagttttgttgcttggtatacttatcaatttgaaattggatttactctcttcggacacaactattccacagtaaaatcaacaattttttgaaatgtgcaaaattgaaatttcaaattaaatgaagatatgcttgcctaaatgcagacaaaatgcatatttatggataagtttgatcactagtgtgaatgcattatttctctagtaatctaatggataaataatcttgataatcaaatacaattttgttgaaccacatgcagcctaaatgtatgtataataaagttgaatgatatgattttggtaggcagacaaaatgcattttatggataagtttgatcacaagtacagatatattatttctctagtaatctaatggataaataatcttgataatcaagtataattttgttgaaccacatgcagcctaaatgtatgtataataaagttgaataatatgattttggtagttactcattcgccacaaacaagcacatggtttttaaaatgctttttgagcaactgctagtgatatctggcaagggataatgacctaccatttatgatgatggataggaatgtattttcgtattatgttagttatagtggtcagaaatagaaccagatcttaatttttttttaatcatggttaatagtatgatcattgtgattgtttagattttccttttctttttgggctttgggagggagtagggtggtcatggcaagggtgtgatttggaatgtgatttgccttacaagatttcatgatttggaacatggaatatttatgtggtgaatcttcatattgcagtggaggatcagatgatttggcacaacatattaatgataaaaaataaatgaattgctaactgtagaattgatgttgcggttaagatagtgtaatttcatttagttccaagtaaggtggactttccatattgaaagcgggagggaattgactgcatcattagtaggtatttgactataagtagggatattatttataaggaaggggctgatggtggatatcttatccttcattttagagtgaatttagatatttaggccttctttctctatttgaatacattgcttgccttttgagttgatagaaaattggtgttattagtggattaaaggttagaagtcaaagaaaaagaataggaagatcccttcattgagctattcttgacaatattttgagagaagaaaacatagaaattctgaagatattagcctctttatatatgaatttaaaatttatcatgtcttggatgtttttttttgtttactttttagtttgggtgggatgaggtgacaattgtggggttgtgtatgcccctttggtaggaccccccctttgttagatattttttctcttagcttgctcttagctttggatgatccttttccttgtttgattccttgcatgaataagggcttctgcaaaacggttcagtttggtgggttctagtgaaaaaattggttgaattgaaatggttagtttatacttgaataaaatacaagtgaaaattgtttcaaggttggtttggttaatgatcagttggaccaaactaatttatacttttagctcaatcagctagaccaattggaaacatttaagatttctaacctaaaatttaatggatgcattttaaacctatttagttcacttctatttctagttttgggccttttaaaggcattcctcttagtgttatctagctcaattggcttttggtgtgtaaatcgaaagggtttggacatccttgagaggagcttagtcaaaacttgagaagatgacatcattgtatattggtttgtagtctgaatctcttgtatagactccttgtatggtagaggaggtcaatcatattttgaccagcttttttgtatggtctctttatataaacaaagtactttattggacattgcaaaatatacatactcatgtatataaactcatccaacatcaagcaattataaatcacaagaaatacaagtcttggaacatgggtttgtttgatttggttctatcgattaggagataaggaaacctgaaactgaactgaccaattttgttcctgcaatttccaaagaaaccggaaaccaaactgaccaattttgattctgtaattttgaaacagaaccaagcttcatgattgttgataatggaaccaatctggtcggttttggttgtgttggattagttatatatatatatatatatatattttttttttttttgatcagaaatgaagaaaaatatattaaaagaagaaaagatacaagagaaggaagagatacaagagaaagagaagaaacaagagaaggatgagaggtcctttccacaaaaacaaaaactgaacaaaagagaaaacactcaactttagaaaactaaatacaaagaaaaaccccaacactctcaaacttttgaaatgcaaaccacagtcgtgttgagtagtaaaacactaagaggaacttcgctaaaagttgcagtacaagaggcccaaagagaggaatagaaaagaagcaagtcccataacatctcttccattttccccttatcctaaaaaatcctattgtttctctcttgccacaccatccataacaaagtgagggaagcaatttgccaaagtgtcttgcctcttaatgaattccccaaacctttaaaggcaataaccatcatggccacaatactccttggagggacccaagctaaccttgctagattgaacagcttgtgctagagtccaatggtaataggacaatgaagaaaaaggcggtcgattgattctccagttcctttgcaaagaatgcaccattgaggacagaaggatttgtagaggatcttctcaattgcaacttgtcattggtgtttaccttctcatgtactactaaccaagcgagggccttaacctttgagggggcttttgaactccataaaaacttggccggaacgaacaagataggatttgagacttttaacaaggccaagaataaagatttcactgaaaacaaagggttgtatgaataactatgaagcactttcttacttgggcttgacaggattgttattagtcaggtaggaggatcacttctgtgatgctgtgtaaagtgtgcttttgagactcttatcatatcctactccttttttccctttttgttttttccccttttttgttggggtgggggaaatatggaggattgtgatggtgcaatgactcttttgtttgaaaatatgtggttgaaggagtagggagttgttggaaggtacaagactgatggaaggctgaatggtgcaaagttttcctagttgttcttttgccagaatgcttaaggcattaaagaagttgcagagatgtagtaaataggtttagattttgaatttagcaaagtaggatgttggaggagattagttctatagaaaaatattggaggagatactgagattgaagttggggagttatgtggttgaaaggtgacaaaagacgggtatttcccatcaggtttttaatgcaaggaggagaaatgatagtaatgatgggttgaaaggtgacaaaggtatagttgtgattgatgggttggtgttatctaataatggagagactatgaaggaaggtttggtttctaccatatcttcaatgagaagatgattgtagatggtcaaaggtcaaccctaggttagattttgacacttttgttgtgtgtgtggggatttcttggaggcaccctttggaggaggtagtggtggtggtgatggtgaagtggagatgggtttaaggcctcctaccataatggaatatttttgtttttttaccataatattttgctatgagggatgggtaaggggttctatcaccatccatcccaataattttttgactccttgaaccatttaacagaacacccttcttgatttatgttggaaggaggttgaagtgaaatgattaaacatatggtttgatgttctatatcatcctcaaattggtaaaatggagaaggcatttgctttcaccctaatcaataagcaggtgagggaagggtctttgttatcaggtaagaggccaagcaatagcagcctgctagcttaaactaaggaacaagaatgggaaaaaatagctccaggttcttgagtcattccagaatggccccatatttgtttctcttgctttatgaaaaaaaatatcttagttcctagaaacattgtggtgtttatttagtccttgcgtgtgtagtggtttttcttttttcttttcttatatatatatagtttggtggaattggacctaaaacttccccctccctaccccatatccttgtctagggggcaagcattaattttatttatttaaaattccttcgatgttttgttatttcatttcttctaacaatatgatggacatttaaaaatctttgtgttttctacttggttcctaactttattgtacttttgcagaatattttcacttcttggttaaatgatgcttaagatgaggttaagttgtgtttagattcttgttgctatatattttgattttgggttctaatttccttgtccttctgtgaaatgcttctacttcttgcttgaacaggtagacaactaaaattgaagccttgtcagaagttgaacaaactcttttcaaataataaattatgcatattgagttatgagctttcaggctctatctttttgtgaaacctaattattttctcattaatttattttaattttatttttgattcataaatgatgtgataatctagttgtttctattaatatgagctgatctttctgaattaccaattctatggtcaattattgatcctaaaactgatttctggcagtttattgaat

SEQ ID NO: 13185 - DNA, 11837 bp, Vitis vinifera
  Intron number 6 from transcript GSVIVT01030703001 (locus G SVIVG01030703001) derived from phytozome v7.0 (chr-ID chr1 4; pos 14000569 to 14012405)
aggtaatggagtatctattttcgagttttattacatgtcttgagatgtactcattttggctacttgtggattaacttgtgattctagcttacataatcaaatgtttggttgactaatatgtcaatattaattaaaaattcatgattagtagagcaaaaaaatatgattatatttaaacttcaactattggcaatgatcttctatggaatcatataatatgcatccatgaagtttatttccatttcactatgatgccttcagtgaagtggaaaagggaagaaatgccttatgagtgtcttgaaattactagttacattagagaagttttgtttttgttatttttacttttttctttttttctattatctttttatataattatatttttcattttgtcaactcaattttaatatttaagaaagttcttttacttatatttattttattttaaaaagaaaaggaaattaaaagaagatgtttgagacatagagatcatagatgaagggtagtatcacataagaaataatgcccaagcatggatttaaaaatactctagcaagtacaattgctcaaaattggttatttgttctttcttagtcacaacaaagatagtcttagatgaagaaagggtcttctagcttacctttgtgtatggtcccatcaataactctctaagagaggatttttcaatggagctaacataattttttggtttaacttttttgaaacggtgtggagggaggaatggattttaatgtcataaggagaattttggagaagatggattgtgttttcattcagatctagaacccttttttgaaatgctttctgctcccttttttgtataggattacatatgaatatatacagaataattgtataaaaatagcctaggaaataatgactacgatcatgctatcaaagataaataagttatctgaagaatgctaagaaaggaaaaaatcctaggagattctatgtacaactatacaattattacaactcatatgggctagaaaaatggtcaacacaatctgccagaatttccaactggcagattttccaacactccccctcaagctgaggaataaatatttctcattcctagcttgcttaagatagtttgaaactgccaagtaggaagcccctttgttagaatatcagccaactgcccctttgtaggaatataaggagttcaaatcagcccatttttaagtttctcttttataaaatgtcggtccacttccacgtgtttagttcgatcatgttgcactggattgtgtgcaatgctgatggctgacttgatgtcacaatagagtttcataggttctttccatttgattccaaggtcacttagtattatcttgatccaaagaagctcacagattccatgtgccatagccctgaattccgcttctgcactagaccttgctaccactgattgcttcttacttctccaggtcactatgtttcctcctaaaaacgtgcaataccctgatgttgatcttcagtctattattgacccagcctaatcagcatctgtgtatgcttctaagatcaaactccctccccttttaaaatgaatgccttggccaagtgaagactttaggtactttagcactttaaatagtgcttccatgtgcacttctctaggatcatgcatgaattgacttaccacactcattgcataggctatgtcaggtcttgtgtgagctaagtatatcaatttccccactaggtgttgatatctttctttatttattggagtccttccttttccttcatttagcttgtgagattgttctattggggtctctgctggtttgcaaccactcattcctatctcctttagtagatctagagtgtatttctgttgtgagattacgattccttcaatggagtgtgcaacttcaatccttgggaagtatttgagcttccctaggtctttgatttcaaattccttagctagttgcctttttaatttctccatttctgcagggtcatttcctatcaaggctatgtcatcaacatatacaataagggctattaccttgttcatttctgtttgtttgaagaataaggtatgatccccttgactctggttgtatcccatactgttcattgtctttgtaaatcttccaaaccaggctctaggtgactgtttaagtccataaagagccttcttgagcttgcatactttgccttgttcaaatttttcttccaaccccattggcacttccatatagacttcctcttctatgtctccatgtaaaaaggcattcttgacatctagttgctgcaatgaccaatcaagattagtagctaaggacaataaaatccgaatagtattcatctttaccacaggtgcaaagctttcatggtaatcaattccatgagtttgagtgtacccctttgccactagtcttgctttgtatctttctagtgtgccatcagccctaaactttgtggggaacacccatttgcaacccaccttcctttttcctatgggaagaccaacaacctcccatgtgttattttttattagtgcactcatttcttccatcattgctttcctccaattgtcatttctaagtgcctcttggacagtttttggtgtctctatggaatttagttttgagacaaaggctttgtaagaaggtgatagtttttcaagggaaacaaaatggctcaaggggtgttgagtatattgtcttttttcaagatcaatagaattagtacctttttctggttgaatgactgggacatgtggagtttctggggccagttgcttcctccttgaatagaccttgagtggcacttgaagatcctccccctctgaactttgcatataggattcaaatctgggtaactcagggacagcttctggtgcagtttcttaggcattctttggggcaattgcttgggtattttctgaagtaacagctatagaaaaatctggcattactggttcagtgtttgaggcattttctggggctgtgtttttggtattttctggagtgactgctatggaaaaatctgatcccttagtttggacagttttggtggagttctctaggataggaagagtaggtaggctaggaaagaattccttatcttctgcaaaaggctccccctgaagataaggactagaaaaaaaaggttgtttttcattgaatgatacatccatagtgacaaaaaaccttttagaagctgggtgatagcacttataacccttttttgtaggagaataaccaacaaagatacatttaagggctcttgggtcaagtttagttctttgatgagcatatatatgtacaaaggccacacacccaaaaatccttggggaaaggtggttgaaaccatcaaattttggaaaaaatctagacagtgtttcaatagggctagaatagttaagaatctgagagggtaggctatttatgaggtatgtagcagttaggacaacctctccccaaaatgactttggaacattcatttgaaaaatcaacgctctagtgatctccaatagatgcctatttttatgttcggctatcccattttgttggggagtatcattataggatgaataatgtatgattccttctttttggagataaggtgtaaggtattgattaaaatactcttttccattgtttgaccttattcctgagaccttggcatcaaactgattttttagcatgtcatgaaaaatggggaaaattgtgctaacctcggatttttgtttcatgagatatactcaagtaaatcgaggacaatcatcaacaaacaaaacaaaccagcttacttcagaaatgctataaactttagtaggtccccaaacatccgtatgaatcaaactaaatggaacaaaacttttcttattacttaaaggaaaagacacacagtgatgtttagcaccctcgcaaacatcacaatggaagttttgaacatttagtttttcaaacatattaggaaatatttttttcaacaataaaaaaggtggatgaccaaggcgaaaatgggataaccaaacttgttcctcagctggagtatgatgttttgataagtacgtatgaggagcaggacatgttgtgccactttcagcttcaaggagaaacagtcccccttcttctctagcatgctcaatcactttcccagtaagaaggtcctgaaaagaacattcagattgtgtaaagttgactgagcaatttaggtccttagtaatttgaggaatagacaacaaatttactaatagttttggaacatgtaagacatttcttaatgtcagagaagatgttaagaagacatctccttgaccagccacagtcactaaggtaccatcagcaattttgatcttttgatttcccgggcaaggaatgtaattagaaaaggcttttgaagaattggccatatggtctgaagcccctgaatcaatgatccaagggctggaaaactgaattttagaggcactcaaagagaaagaatacttacctgtttgagcaaaatgactatgcccctcaggtttttctagcttggaaatgaatcttttaagtttgtcaatttcctccttgttgagctccatttcttggtcaaagttttcttcctgttgttttcctccaatttcagcaagattggcttgtgatttatagccagaattaaccccttaacccccattccccttgaagaaatttaggggcttgccatggagcttccagcatgtctcccttgtgtgcctatttttcttgcaatagctgcaccataaggagtctttctcacttgttttcttcccttcatttctaccagagtttgcagcattagccgcaacacttcatttccacttggttttgagatggctaaaacagatctgtccatggtgtttcccttttctaacattatatttctccttcgttcttctcctctaactattgcaaaggctttgtttagagatggcagtggctctttcccaaaaatttggactcgtacttgatccaattccacattcaaacccgccaagaaatcatacaccctctctcgttcaatgaactcttgatgcattgttgcatctatgttgcacttcattcttaaattctgatattgatcaagttcaagccaaagacttttaataacattgtagtacttagttacggaaagaataccttgtttggtgttgtgaatccttgtctttagttcatacatttgggctgcatcccttaccttagaataggtatgacacacggactcccaaatttccttggctgttgagagaaacatgcatgtacgacttatatccgattgcatagagttccaaagccatgacatgatttgagagtcttcttcatcccacatgacaaaccttggatcatccttactcacaacaggtccaatgggatggtttaacttccctttgcccttaatataagtctttaccaattgtgaccactctaaataatttcccccattgagtttgaaggatcctactatattctggaattcagcaagtggtgttgattgttggattgtggtttcgcttgatattgaagaatcaacttctgaagtgtttgacatcatgaggggaagaagggatatgaaggtaaaaaaaataggggcaataaaggcctaatatgaagcaacgtttctaacagaaggtcagaaactaatgggatatgatctgaaaaaatcaaagtttttaaaggcgtttgtgaggcgcgccctgaggcgaggcgcggcgaaaacgccctgaggcgttaaaaataaaacgaaatgcttgaaaggcgtacgcttttccggtgaggcgtgattgaggcgcgctttgatcgcgcctttcacgcttcaagaagaaggcgtacgctttgtcggatctgatgtggcaatgaacagagatttaaaaaaagccctaagtaatccctaaaacccgactctcgactgaaaacaagcccaaaatgaaaccctacctccaacgactcaagcggcgacggagtgctcacccctcggcggcgaccaatcgcagtgcgtcttctccggtggcgatcactctcgtacatctccaggtatgttgcgaactccctttggtttctccctcttcgtttccctctccgcaatccacacgggcttcgtcgggttttcatccaattttttttttatttctttattttatcaaatcagttatatatatatatctatctcctatttaaattttaaaccccccccccttttctctctcttcgggcagtccacacttccggtagtccacatttttctctctcacaataggcttttcatctttttttttttttttttttttttttttttaataaagataattatttgttaattttgaattttttatttgtggtttaattttaattttcacctcgattttctgtgtataatttttaaattcctttaaaaaaaattggtttttttttaatttaaaccaattaaattttgtatttcatttttaaattcctttaaaaaaaattggttttttttaatttaaaccaattaaattttgtatttcatttttaaattcatttcaattatgctttgttattattttttagtcaattatattgttatatggaaatttgaatattattattgttgatttttttttagaatgagttcctccgattcgaaaaattcaagaaaagattttgtgtggaagtatatgattgaagtttttggagagcaatatttaagatgtaaattttgcaatcaaagatgtacgggaggggtgaatagattaaaacatcacttagccggaactcatcatggtatgaaaccatgcagcaaagttagtgaagatgctagattggaatgcaaagaggcattggccaattttaaggatcaaaaaacaaagagaaatgaattgctccaagaaattggtatgggtccaacttcaatgcatgagagtgccttgtctaaaacaatagggacattagggagtgggagtgggagtggggaacctattcctaggggacccatggataaatttactacttcacaacctagacaaagtactttgaattcaaagtggaagcaagaagaaaggaaggaagtgtgtagaaaaattggtagatttatatattcaaaaggtctcccattcaacactgtgaatgatccttattggtttcctatgatagatgctgttgcaaactttgggcccaggtttaagcctccatctatgcacgaattgaggacatggattcttaaagaagaggtgaatgacctaagtatcattatggaagatcacaaaaaagcttggaaacaatatggatgttcaattatgtcagatggttggatagatggaaaaagtaggtgtcttatcaattttttggtgaatagtcttgctggcacttggtttatgaaatcaattgatgcttctgatacaataaaaaatggggaaaatatgttcaaatatcttgatgaggtggttgaagaaattggagaagagaatgttgtgcaagtcatcactgataatgcctctaattatgtgaatgctggaaggaggcttatggaaaaaaggagtagattatggtggactccttatgctgctcattgcattgatttgatgttggaggatattggaaagctaaatgttcatgctactatactttctcgagctaggcaagttgtgaagtttatatatgggcatacttgggttcttagcttgatgagaacatttacaaaaaatcatgaacttattcgtccaacaattacatggtttgctactgcatttcttactctccaaagtctttataagcaaaagcaagctcttatagcaatgttctcctcagaaaaatggtgttcaagcacatgggctaaaaaggtagaaggtgtgaaaactcgaagtacagtgttgtttgatccaaatttttggcctcatgttgctttttgcataaagaccactgttccattagttagtgtcttgagagaggttgattcagaggaaagaccagccatgagttatatttatgagttgatggattcaactaaggagaagattgcatttaattgtttgggcatggagagaaaatatggcccaatttggagaaaaattgatgcaagatggactccgcaacttcatcgacctttacatgcagcaggctattatcttaatcctcaattgcggtatggagataagttctctaatgttgatgaggtgaggaagggattatttgaatgcatggataggatgttggattatcaagaacgtttaaaagctaacattcaattggactcatatgaccaagcaatgggtgaatttgggagtcgtattgcaattgattctcgaacattaagaagtcctacaagttggtggatgcgttttgggggttcaacaccggagttgcaaaattttgctattcgagtccttagccttacttgtagtgcttcaggatgtgaaagaaattggagcacatttgaatcggtaatacttctatttttgtaaatttttatacatatatttctatttcaatgttagagaactttatttcattttaacacataaaattgtttcttttattatttgtagatccatacaaaaaaaagaaatagacttgaacatcaaaggttgaatgctctagtgtatgtaaggtacaacactagattgagagagcgaagtctacaaaggaaacaaaatgttgatccaatcttggtagaggagattgattccgatgatgaatggattgcggagaaagaagatcccctcctcccccttgatctttgttggcttcaagataatgaattattcaatgttgatgccattagagttgtgtcatccaactcccaagagatgcaagcatcatcggatcatatggtttcttcacattcctacaaaaggaaacataatgaagtaccaagtaagtactcaaaaattgaaatcataaatttgattaaatttaataaaaaaaacttttaatatttacacataattaatactttgtgctaggtacaagtggaggcaaaggcaaagagaaggaattgaatttgacaccaattgatgaagatgaagatttagatgaaatggggatacatgatagtggacattttcctactattgatacattggatgaggatgatgatgaccttggagaggaggatttaagttgaaaaaatttactctagttgttatttcatgacttagttatggattttttgtaaaagtttagaactattattatggttgactctattttctatttcatgacttagttatggctttttgttaaagtttgaaactattagtatagttgaatctataatctattttatgaatttgttatggttttttgtgaaagtagggaactagtatgtttttttttatgattctaatgaattgttttcatgtttttatttatgctattttattttatatattttaaaatattaattaattatataatgtgaggctcaaaaagcttacgcctcaacgcctcgaggcttatgcctcgcctcacaaacacaaaaacgcctcgccttacgctttcgcctttaaaaactttggaaaaaattcctcctggcaatcaaggtatgggacattggaatgctagtgattaggcaaagaaaattctagctctgataccatgttttcattcagatctagaacccttttttgaaatgctttctgcttccttttttgtataggattacatatgaatatatacagaataattgtataaaaatagccttggaaataatgcctacgatcatgctatcaaagataaataagataagtgaagaatgctaagaaaggaaaaaatcctagaagattctatgtacaactatacaattattacaactcatatgggctggaaaaatagtcaacacaatctaccagaatttccaactggcagattttccaacagattgttcttgattttcccttagcatgagagactttaatgatttcattagagcaagtaagttagttggccttcctcttaggagtgctttcttcacctggtccaaaatttgcaagaatcccttgtttgtaagggatcaaatagatttttattttcaaatgagtgggagcaaaatttccctcaatgcctctattcccttaaataccaatcattttaagtgaggtccaactctttttaagtttgaaaacatatgctacacctagagttgaaggaaagattcaatctgtgatgtaaagagttttaggatgaaggatgggaaggtcataaattcatgaaaagattgcaatatgtcaaatcaaaattaaaagaatggaataaggtttctttcgaggacttgaaagagaagaaaaaaatattctaaaaaatatagcctctgtgagcattgagagccctttcaatgggaaaggaaatcaaatagatgatagaagaaaccctagaggcaataaatcttctcctaaaatgtcctcatgcacattaatcaacgcaaacacttaagtggcaaaatgaaacaaagtgcaagaaaaccaatgccatatcaatagccagaaatgtgagatgtaaccatcttttatcgtccatcaatgcttatcaagaagaaggtatttaactactatgactcacttattataaatgggaaatattcttttgtgaaaaacttgcacattgaaggatctatcttagggaaccacttcaggattgactttgttttttcaggtacacttcttttagtgatcaattggaggcaacacattaccagctccaacaatattgagatggatgtttcctatataattagagatgtatggatgaagtacattgtgcataacaagttttgtgcaattataattaattatcaatgaaaggcaaaaatttttggtgatattaggctgggcaagctttgtgtagaatagtggtcaagaacaattattccataaaattaggtaattgaaatggatcatgaatgattgtaatgcatgaaaggattttggatgcatttatgaaaagcttgaggtagcaccattaaggataagatgggactggtaggttcagattatttgttcacttataattaagattattaaccatgctgaaaagatgttgactttgttcaagttgaaggcattgcaagagcaagacgaaggctacaagtagggaaggttgaagtttgaagaagcaacattatgacttaagatagagtttgctatgattcttattgtgtagagtggtgaaaatgatttgtttaggtgaacccaagtggtttatgtaaggctttaagttctggtttgaggttatgttgtttttatgcattatcctttgaacattcctactttattttaacatagattgttgggggattcatgaaatagctatatttttgcctactcagactagcaggtacgttataggatgaactgtttcatgactcattgcattccttccttcttgtttattctgataatatatggaagcattgtgacctgtgtacttttccaattttcttgtatcctttcaggctttctcatgtacatcagcattctctcctttctagcattgttgctatgcttacaaatactttctttacttgctgcattccttccattttgtttgttgtgataatatataatcgttgtgctattggcagtttcagtttctgttcatcctttctgcctttctcatattcatccacactggtttattttaaagatttcaactatgcctaggaataattttggatacagttcttcagttgattgctttatgatctcatgctcttggttaaggataaattttagtctctgttttaagagattttagtccttttgcagctttgatagtttatgtactgattgtattctgacgttattgtttctctgctcaacaattccttggacagcgtgctttaaaggtatatctgca

SEQ ID NO: 13186 - DNA, 1740 bp, Vitis vinifera
  Intron number 1 from transcript GSVIVT01011201001 (locus G SVIVG01011201001) derived from phytozome v7.0 (chr-ID chr1 3; pos 9394393 to 9396132 reverse strand)
tcagctttggttttggcagcattggatatacttatgtgagtacatcttcaactttattttcttgaaaacgatatagatggataaagtactgttcttactctctcaatagagtctcgtcaataacactattcaaatagaatgatcatgcactatccaaaaattaactattaccgacccacttagatttatttttacgatggatttaaactattacaaatttatgacacacttactttgttgcaaattgaattattgttacttatatataactatttattgatggtaattacaacaacaaatacttatcaataaaaatattattatgatgaatttaaactattgcaaatatttaacaaatatactttgtcgtaaaaacaatttagtcatagaaaacaagtaaattttcataaacaatttttttaataaaaattactacgtacttattaaaatagtgttattataatgaataataatagcacacataatttgttccaaaagtaattgttgtattatgaatatgaaatcttttcatcataattgtatgataaatatgatctagctcatttatttttttagtttcaacaatatttattgagaacatggtttttttttaatcataatagttttaacattttaatattttttaattacttttttattgttcattttagaaagaaattaatgaaatattgtttatatatatatatatatatatcaattttttacaaatcggagactattctgacacaaaatatcggtaaaataaaaattgatcaaaacttgtaaaaatgttgagataaattctaaataaatgatataacaagtaataataaaaattttgaggttattttattaaaaaaaataatatatatatatatatataatttgagacatttaataataatattcaaaatttaaaatatattttagagagatttatctaatttaaatatattcaataatataaaagaaatgataatacatgtaaaagtattttttattttaaaatgttgataattttatttggaaatttatttttaattattatacaaaatacacaagaattaagattaattaatttattatgattttattttaattaatttataatatatatatatatatatatatatatattctttatatttcaaataacaaagttgactttgggtataattgcttcctatcaaattttaggttattgaattatctaaaagcaacaaatagtgtatattaattagaaaaagtaaattttttaacctgtaatgtagtgctaaattttaattgaattattctccttagtttatggtggactatagagttgaaaaaaacatgcaaacgattacataattgaagataaataatgaataagaattaaaaaaatattttctttaattcattacccttattcaaatattacaaaatattttatttatagatacctattctaaataaaattggaactcctaacaatatataactacttaaataaaaaaaaaaaaaaaatcactcaaaataaaatattttctttaaattttagaggctcaagctgattctagtttttagaaactttttatatctagtttaagtttccaacattttatatgtctccatcaccatcacataagaaagatcttagctcatttgtttcatttttgagacatgaatgacaaattatattgattttgctaatctttcatgtaaggcgtaactataaacatagatcgcgcctcggattgg

SEQ ID NO: 13187 - DNA, 10970 bp, Vitis vinifera
  Intron number 3 from transcript GSVIVT01031675001 (locus G SVIVG01031675001) derived from phytozome v7.0 (chr-ID chr5 ; pos 19997430 to 20008399)
gaggttggtatggttactattaatgtctgtttgtaataaataaaagctacaatattagtttctatagttgagctattctataaagaatattcattgtttgataacttctatcaattgttttttttattttatgtttttgtgttttaattaggctacactgaggagagagttgaagttctttttggtgaaattcctattatactttttcatatgaaactagcaaatattagtaaaaatggaagcctaaatatataattggaagaaatattcttaacaaagccgcagctaaaccccaaccttgaatgcatgacatttagaagcaaaaaggtaaaaagacctagaaaaagtactcctttaaaaggaagatcaaataaccccccaatttagcaagatcatactataaggggtgtctagaaatcccttgaccatgatgtccaaatagatgtcaaaaaagtaaattaaatgccttaactgttcgatagatttctgtctatccttgaaaatcttaccatttgtctcatttaaaatcacccataaaatagcaagtagcacacaaaaccaaaagattttacccatagcatcccttcaaaatccttaaaaagcaatagctagcatatcttaaattattttcaggatcatcctttgttcacttgccaaagagaaaagtaacacaacaactcattagcaagagggcctttattgcttaattggaaccttttgtacaaatccaagaggatgtttgtagaaattcttcatttttgatatcgcatcacaagggttgagttaagttcaattttgtaggctcctttttcgcaactagggattcatggattattaagggatacattgtgtacattttgatatgccctttttgaggcattgttaatatattttattttattgcccatgccataaaaaaaaaaagaaaaaaaaagaaaaaaaaaaaagaaaagaaagaaaaaaaaaaaggggatcatggggaataggtgcatcaatactccctaagattttaatcaattgtcaaaaattgaactaacacaaggaacgaagcttgaaacttgaaaccattgagaaatagctcctagtttaccttttaggagaaagtctaaataactagtgggccatttacctagtttcataacctaaagaggaggctagatgtcttagacatgtttgattggcatttaatccaaaaaaaaagagctcttcttgtgattgatcttgggacttcacaatatgtcaaagactcttagaaggattgtaagattaaagagttctgatgtagaagtagatgtaaagatggttgtaacatatatgaacaagagatgagagatcatggcctactttctttcaacacgaaagcctttcataaggctaaagtcttcaaccttaagaatcaatctactaaaattttatggaaaaaaggaatcaatctagcaagaacatcaactacaagggtgaaaagaaaaggagatggtggatctccttgttgtagactctagaaacctcaaaatctatccttagcccttccattaattggaatcacaaagctagcaattgatagtcattcccttatccatctatatcatctatagccaaagcctttatgcaaaaagggatggtcaaggatatcacaacattttctaatgtttccttaaagtctactttgaggatcaatccttcctttttaatcaatttttatgggaggcagatagattcttgatgcaactttgattgcaaatgaggcagttgattcgaggaagcgaagttccaatgtgggtttattttgcaaattagaaatagaaaaagcttatgatcatgtaagctggaaattccttctctcgatcttagaaaatatgggatttggtcctaaatggagatggtggatccacttttgtgtatcttttgtgagattggcagtacttgtcaatggcatccccacaaacttcttcctaacctctagaggtttgatgcaacgaaccctctttcaccccatccttttgttttggtcataaatgcccttagtaacttaattgcaaaggccaagtagggaggttccattaggggctttaagattgaggatagagggaagaagagatttaagtctcacacgtcttatatgtaaatgatacttctcttttgtgagaagaatgtgcattgattgaaatattggaagtggatagtcacttactttgaaatggtgtcgagtttgaaagtaaattttcaaaaaaagtgaaattattcttggaggagaagtggaggatgtggatagagcgatttctctttttgggtgtaaaggaaggggaattcctacttcttatcttggtttaccccttaaggcccctcataagttttggggtttgtgggattcaatcgaggagaggtttgaaaggaaattggttgcttggaaagaatagtacctgtacaaaggaggaagacttatccttattaagagcactctatcaaacctccctatctattttatgtctcttatcaattcccataaaagtaaggattagattaaagagaattcaaagacactttttatgggtagatataggagaaagaagaaagatccacttggtgaattggttaaatgtttataagctaagaagtatgaagggctagggccaagaagtttggagggtcttacttaagccttactagggaaatggttatggagattttcttttgagtgggaggcttctggaggaatattattcatggaaaatttagggagatgtagatattattcacagtttaaaacacatttatatggttaaaaggaactcatacatatataatattagaaactttttcccctatctgatgtaggatatcacaattatccttgtaatgaaaatataatgttctcgttgtgttccatgggattgcggggccaaatagacacttccaagattgggagataaaggaggtgatccattttttggagcttatttacccgttaaaagtgcaagaaggaaaggacgctttactttgaaaacatggtaggagaagaaacttcaatatcaagtcatattagtaatccctaagtgttgagaataatttagtactctagctaaagatttgagaatcccatgctccacttagaatgtgtttttttgcttgggaagcagtttgggggaagatacgttaaagaagaggggatgccccatggtcaatagatatagcctttgaaaagatagtgaagaattagtttatcacatcttgatgcattgtgataagacaagagtgttatggatttttttgttagtggtctttagcttgatttgggtgtttttggccttagtgagaaatatgctccttgaatggaaagagaatgatagtttgatgtttgactccaatttgcttattttggtgtatttggaaagagcacaactataggactttcaaagatgaagaactctcagatcaaagattgaaggagttctccattaaatcacttttaaagtggtcccatgattaattggaaatggagaacccctctatcttgaatttcttagatgctctttcttgtggttagctttgtcctatttttgtgggctaaccttgtatttatttgttgcttgctttaggttgttttgttcatactgcctatatacgtagggtgggctccttttttggtgttttctaatacacgtttttgttgtctatcaaaaaaataaaaaaataaaaaaataatgcctgtcaaaaaccagcaatgtaaaagtaggtatagtgttgtgatcaatcggtccccaagaatggaactcaaaagctttcacaaggacctcgtgatggggatgagtatcctacacccttttgagaaaaggaaggaagaaaaggaaaatgttatagttttttggttttttcttggttcataatttgtaagtaattatttaattgaatcttatttacaatttggaaaaaaattggttggaaatttcttctcaaaagaagcttctatatttccaaaatttttattgtctaacaagtcttctttaataagaagagctctacttttacaaatatgcaagaaatttcctttggaaatttcttctcaagcgagaagtttccatactcaaaattcctattttctaaattctacttttgttagaaatttcttcttagaaagagactttttttcttttctttttgaagtttttatttgagtcggttttataatctagaaaatttcctttagtagaaacttctatcacaggaagtttctataaagctttggtaactgtttttttaaaatggttttttattcttgaaaatagaaaacagttttctaacttagaaaacacatttgatagaaaatagtttttttagaatttgttttgaaaataggtggttctttagaataaatttaaggtgtttttaggtttattttttattttttatttttgttatttttttagtgttttgagcaataattaaaaagatgaataatactttgaaaacttttgcattacttataaatgcacatcaacttcatgagagaataactgtttttcatgtttgacttcctaaacaaaattttgttcttgaaaacaattgaaaaatatttaagaattgttttcaacaattggcttttgagaactttttatataaacattgccaaatgggccataagtttctagttttgagaaagtttttatttttcttataattccatttatttagaagattttagagtttaaggaaagaaaaaagagtcttcatatgctaatatatggattgggtttcctcctttttttttttttacttttcttttctcttttttttttttttttttttttttttttttttttttttttgtagtttgttaaagtctatttgatgcaacttagtgatttatggatgtgagtagtatcaatacttcttcttgaaacttgtaacctccaaagatgagactattgtttttcttctaggtgagatttctagaaaaccttagtgagattctaaggctttatcttattccttcatcatcatctctctctcttttctcttttaaaattttactttttcgagcgaccataacttttaatcatatttctattgcttaaaacctaaaatatagtgaaggtctagcccacatatttgattgtaaacatccaacctagggttgtcttacctcacctcttattaatcttctggccatcttggtaaaaggccatagcaaatacatattgactgagtgatttatttggatccaattaaaagattgcatctctaatctcattctcctagaaaggtctctctagccaaaccatcttccccaaaaaaatatgggaccaaccaaggttctctaaccataatctttgagtggtagaagaatcttaacaactctttttatagagtttttatcctttgagtcacattcatcaataacatggatggatttgacttctcctttctttttccagttgttgttggctaaaagagttcagaattctacaactcaattggattgaggtttacgtttcaaaagtttgaagattgagagggtttttctatgtttttagagttctattgttgggagttttctcctttgttcaatttgtgtaggaaggacctctcatccttcccttggtttttttctctcttttttttttttgataagtaaaggaaattcattcaaaaggcaagacgccataaagtatacaggggggtatacaaggcaactaagcctcaaaaacaacaaaacaaaaacaactcccattaagtggaagccatccactcaagaaaccctataagggagaacgcctcctcacctacatacagtttggcccaactccacaagttacaaacaaaaatattctttaacttctgaacgttcaacaccccctccctaaaagctatcctattcctttccttccacaccgtccaaaaaatacacaacggagtggcttcccaaatctttttccttttctttcccacaaatgaacccctccaactaactaaaacatcctttacagtttttgggaaaacccatttcacatctactaaaccaaacactatatcccataaaactctaaccactgtacagtgtatgagtatatgatttacactttcttcctcacaaccacatagaaagcagcgatttggaagttgtaaccctcttctttgaagtctatccaaagtcagcaccctcccccacgtcgcctcccatgcaaaaaaacaaactttagttggcacccttgtcacccaaatgcttctagaaggaaaacctgtatcctcagatctcaccagcaaattatacgcttcctttaccctgaaatgcgcccttcctcctttactccacaggactgagtcttctaccccagagggtttgtggcccctcaaaatctgaagaaaatctccaaccaaccccaactcccaatcattgaagtccctcagaaaatttagattccagtttccgttacccgaattttgatcccacatttcctcaaccgttgtgttcctttgtaccgccatagcaaagagatgaggaaaacaatgggacagcgctgtctctgcacaccacacatctgtccaaaacctgattgtgttgcccttccctactttgaagaacatgttattccagcaccattctgattctttccaaatctccttccaaacccctactcccaccgcccccttagtcttctttggcctccacccgaaatcctcctgcccgtacttcaccttgatcacttgtttccaaagattatctttgtcactagcatacctccatatccacttgccaagtaatgctttgttcaacaaggctagctttctaatgcctagcccccctttggtcttatctgtacatacaacctcccaattaaccaagtgagttttcccctccatctgtcctcctccccacaaaaaatccctttgcactttctcaagtcttctagccaccatcttgggcatcctgaagagtgacatttggtagattggcatgctagccaaggtgctttttattaagataactcttccccctttagatatatattgccttttccaaagagctagtcttctcctgactctctcttccaccccgtcccacatataaggcgctttattgagtacccctaagggtagacccaagtactgagaaggtaaagagcccaccttgcaccctagttcaacagccaactcctccatccccaccacctctcccactggaatgatctcactttttgcaaggttaatctttagacctgaagccgcttcaaaccaaaacaaaatccaacttaaatgagttaagtggtccttcctagcctcacagaatatgatggtatcgtccgcaaagaacaaatgagagatatgcaatggagattcactaccgccccttatgttgcaccctgataagaagcccccctccacagctctcctaataagaacatccaacacttccattcccatgacaaagaggtaaggagacaagggatctccttgtctaaggcctttggtgctaggaaagaaacctgcaggcactccattaaccatcactgaaaatttagctgaagatagacaactccacatccaccccacccacttagacccaaagcccattttctgcaacaccttcaataggaacttccaattgatactgtcataagctttctcaatatccaatttgcatataagacccttttctcttcgtttttgccatgaatttatcacttcatttgctattagagaagcgtcaagaatctgtcttcccctcacaaaagcattctgagaatttgagaccaccttaccaaccactctcttcaatctattggccagcactttagccaataacttgtagagaccccctaatagactgataggtctaaaatccccaagatcctcagcaccacatttcttggggatcaaaaccaaaaaagtattgttaaggcttttaaggaaagagctatgctcaaagaattccttgaacatttctataatctcctctttaacaaactcccaacagctttgccaaaaagtcagagtaaaaccatccggaccaggggctttatccccattcatctccattaaagccccctgaatctcctcctctgtaaagggcctcttcaacatctcagcctcttcttgactgatctgatctagctgaagactcccaatatccgccttccaccccatatcttctgaaagaagttctttaaacgcattagcaattctttctctaatttcctgctcctctaggaaccactccccattaatcttaactctttccatacaattatttctatggtgggcacttgccatacgatgaaagaagcccgtgtttctatccccctctttcagccatatctccctagaaagttgtctccaatgagtttcctccataatcacccattttttgtaattttcctttgcctctttcttcagttctacttcctccatagtcagaattctgtcattttcctccctatcccaaaattccacctgttgcaaagctgcagatttgttgctctccagcttaccaaaaacttctctattccacactttcagcttctgtttgatttccttcattttagtggccaacttgtagctagcactacccctaacatcgattccttgccaccagctgcgtacaagctctttaaatccctcagccttaagccacatattttcaaatctgaatggggtcgggccttgtcttatcccaccccccactagcataattgggaaatgatcggacaccggtcggggcagcctgcactggttaatcccactgaattgatctatccaactaggagacaccataaacctgtccaaacgagcccaagtctgattatgtagacccccattccaagtaaaatctcccccctgcagcggaagatccaccagcccaagatcatccacaatttcagcaaagtttctcattgctgagctaatcctcctctgcccactcctttcccttgagaacaaagtaatgttaaaatccccccctatgcaccaaggatcctcccacagccctctgatcgccccaaactcttcccataaagcattcctctctaccttagtaaaagggtcatacactcccgtaaaaacccatacatttccatcttctatattacaaaatctgcaagacaaggtaaactgaccctcctcccaatctagcatgtctagggcccttctatcccaacatataaaaatacctcctgatgctccctccgcattcactgctctccagcctaggaatctccctgatcctatacttctcgcaatgctatccgtcatacactgcacttttgtctcctgaatgcacattctctttctcttgtctcttttatctctcctgtatttgttcttatattaatataatcttcttcgtttctaataaaaaaaaaaaagagttcagaattgtagtccacttctttaatcctattcaacctcaattttggcctccaactcatttacttgtgaataatgttttaaaaggctaaaggaaatcttagttgttttgcctaaataaggccagacctaacaagatgtaggctttagcttaaacaaaatgatgaaggaaagaaaaatatcaaaaaattaaataaaaaaaaaactaataaaatcaataagaattgaactataaaaagaccataaaattagtgataattgtttgttagtgccaatagtttctaatttaattcatctttttctcttttgaatctaattctttgtcgtggcgtaatcaaataattttgtgctttaccatcattttgtttaagctaaagcctacatcttgttaggtctggccttatttaggcaatgctacaaagaattataatagtattcaattgctttattatcctccctataagtgtttatattcaccaattcttcttcttcatccatcaattgcaatgacatttttccttttattaatcaataataaaataatggttatgcatgagcttccattgtagtacctagccattcctctattcttcttaatctctcttttcccactcgatttaaggactcatttggagccaactaagcccttagtttgtaaaaggtttcctcaaaccttaaacctaagacaatttgtaaatctattccaaaacccatacaaggataaaatcatttgttgattattgaggcttaagtctcttgtaaacatctgccagaagcccacaaaggccacataacctcattacaatccattgaatatttgagccttaagtctcaacatccttgagtctatagcctcaaggctataatagtgtgaggtttaggccttagttagcttgtgttcatgctatatctcgtaatgctaattcacaatgcttggcatctagactagcctcattatccatttaaaacactgcttgtgaagcataatcacctcacaatataagagatgttaaggtttatgtcatttgaccaagggcttccagagtgttgatatattctatgcccttaagaacaaaagctattcttgcccttggatcgtcaagcctcctaagactagacttaagtttttatgatcctcctatcccttgatcaaaccctcttctcactagtgcttgattgaagaacaaaatttgaatgttttatgttcttaaattggaaagcaatgacctccacttgatatgattagaatccaagatcaccaggcaatggccagaaattggtttttataaagttctctgcatgatactgggaagtctaacttgttccaagttagatgtgtttggtgacttattcataaatgactatcttattcttgttctttatttatttatctattttgagtgcactagatttgaagcatttatccctggcaagagtatttttaaaatttggattactttgtgtatgtcatttaccttcatttattaatgtctagcagacacacatttcatgtgtatttccatgtatatttaagtcctagaaaaataaattttttaacgtaccaacattttgtgtatcatcatgactttcaggtatttctcagtgggtaa

SEQ ID NO: 13188 - DNA, 3991 bp, Vitis vinifera
  Intron number 2 from transcript GSVIVT01014471001 (locus G SVIVG01014471001) derived from phytozome v7.0 (chr-ID chr1 9; pos 4195897 to 4199887 reverse strand)
atcacatttgagagcttgaggaggaacaccattctgctagggttgcaggacatgggagatgatgagcttgtgtgcatgttgagcgagggagacttggatggagatggggctctcaatcagatggagttttgcattctcatgttcagattgagtcctggtttgatggacggacccaagcagtgggtggaggagatgtacatatgaagcagaagatggaagctctagggttttagcttggctatgatgctcatggcttctttcatatatctttacattttcatcctcttcgtcaagatgctgggagaataaatgtgagtcgatcgatatggtgctgttactggatatcagaataatcatagtagagttccttggcttttcctttcttttcttttcttttcttttcttttcttctctagcaattatttattttcagttggattgaaaaattattctatgatatcaaacatatctgttgaatgcaacttaaatcaaatttgatgcaaattgtgtcgattcattcagaattacaatgcatttcagtggtagtgcacgaattttcccttctgggtaatctactaattccctctctaagaatgtgtttggttgtctagaattggggggaaaccactagtttcagcactggggaaacaagacttccccattttagtcccagcagtgtctcaatttgccatggaatttctttgaatattcattttggaatgatttggcaactagaaaatggtagaaaagtatcattgaatcaaatcattccctcatgaaagaacccattcatgcatattcatgatgaagtactgagttaactcgatcacccaactcaattatccaatcaattccttcatggaagaaactgtggtagaaaagtggagtgggtgaggaaaagtctttttagtttttcagaagaaagacagatgagatttctcaatattaaatcatgaacaataatcttacacatggctcaaactttaattcaactaattatttgagatgacatggaccatcagccagccatggaatttttctgtggtccaaaatagaaaaagaattagaaacagaaagaaagaacaaaccctagtgatgactgatgagtactgggtcatgacattcagtagttgttaattggggtatgggtataaagctgacaccaatctcctttaaagctgaggaaaaaacaacccatgtgcattcattcttcaagttccatccactggttaatacagttagggttcttggagtaacataaacgatgaagattcttttgacagaaggatcttctggtgtgaagactaaaaagtacttccaaaaagttcttttatgaaagcacttcacttctgactttagtaaagatgggttttaggcttgtgatagaatgtaaatgctacatagaaaacagtttcttaaaattagaaagttctaagcagtcaaggaagctgtgagttaaagtgttacaattcagaaactttgcaatggggtcacaaatgagcccaacccaggctggggctctgtgggcccattgtcaagaaaccataatggagccaatgtactggactggactggactggactggactgggctgcttgcagtactgcaagcccactttggaaaagttcctctagtcttacgactcttatccaatttttacttttattttttcagaattttgaccattttttgtcaaacatgtgagagaaaaatgccaaaacttgtctatccaaatatgaaagtaagcaggcaatgcactcaccctgcagtcctctttgacccactgcagcttcctttttatttatttatttatttatttatttaatttgccttttctcttcaaagttcaaactcatgctccctaggccccaaaaaggaaaggaaaaaaaaaagtagtaattaattaataacccacttgacataattttgatattatgatatcatttgatttttttctctatttttaaaaatagaaaagtataagtttttggagacttactttaaaaatatttcaaatttaaaaattgtttttaaaaaatttactatttcaaattttaaaatatttttttttaattgcataagataagttcatgtttttatataaaaattattattattatttaagacagcaaaatggaaaaggtctccaaacatagcttcatgttcgggcttcttggcctacttttacttaaaaccaatttaaatatgtgatatttgaagcaacaactcaccgtgaaacattttaattaacatttgtttggattatattctgataaaagaactttgagcttctaccacttttattgataaaccttccacccaaaatacttttagaatgtttttttaattataaaatatttttataatacttttggtaatatgtcccataaaaattatttatcaaatgttaattaatgaaattctctatatttttaaatatctaggccttatttagtaacagttttcaaaaccaatttttgaaaactattatttgatgtttcgttgaataaatatcgaacttgaaatgtcttttaacctattttctatatttttaaatatattttagtgttttatttttaatcatttttcatatttatataattattttttaaaatagtgataaaagaacaagtaaaaacaattacaagatattgtaaaaaaatattttttattttttattttttatttttcaaacataattttttttgttttttttctagataactaaaaatggttttaaaaaatagttattaaacggatactaattatttttaaataaaaatatttccaatattatcaaaatcatttttaaatatcttataaaattattgttgcaagtgaaatatttcaattaccacccatatttagaggtggataacgattaaaatgtaatataattatatgagtaggtatcatagaatagaaatttcatgaaaataataataataataagaaattggataatgatggatatatatatatatatatataataaataaaataataataagaaattagaatgtggagaatggaaaatggagagtggagattaggtgtggggcacacaccacaccagtgtggacatcaactttgagtagtcccatctttggaatttgaaacctgccatgccatgcacctgtctgggtgcatggaacctaacatctctccccctccacacaatcccctctgcctctccatctcccacacccacacattcttcatttatttctctccctctctctctcacgtaaccttccagttccacctcaccactcctcatgcctactctcaatcacctcctcccacgtaggactccttcacgtgctttcgccacgtggctaaatttcgcaatccctggaagatgccctgaacgtggcggtgctgctgccacgactgtctgcccagcccgccagcccatgcctgtggagttttttattttttatggaaggggatagagtataaaatttggaaaaaggaaatgaagatttgaataaaggaattattgacggccgaaagacgaggtgtggtgtggataacagtaagggtgggggccacgggtacacgtcggatgctgagtggaggctcaggtgggtttcacgtgggtatcccccacggtccacctgcttaattagtaattggaatttataataaagtttttatgggcaggcaaagcagatattggattgataaaatatcaagagaggaggattatgagtaaaaacatgatggaatagtaataataaggttgtgggaaaatggtcatgtgcctggcacatggcgtgcccaaaatcaggctattgacccctttgaacaagtaactgactctgaaacagccgctgagatttttattcccaaatggccaggccatttaatcccttgcataccgcgtaattaacccatgtaaaatttgggagaatctaggatatttctgtgaattgaggaaagcctcttctttcatcttggagttacagacgaaagcggattgagagag

SEQ ID NO: 13189 - DNA, 3692 bp, Vitis vinifera
  Intron number 5 from transcript GSVIVT01005677001 (locus G SVIVG01005677001) derived from phytozome v7.0 (chr-ID chrU n; pos 21146809 to 21150500)
tctaggtcgttggagcaaggttggtacccaaccccaccccaaaatccatccactctgcttcttacttaaattctttttaagtccatcaaacccctcttgacgtacagcctgcttcaaaataagtgggtgtcgttggcagactccctagtcttcccattttgtattgccattctcttctctaataaatgacgaataatgttgtgttggagattgccagctttctttatgactggtaaataggaagtggtggcatttaggaaatatttagatgatttgggcctttctaacttagagacagctatattagaaagaggaaattgttaagaactctattaatcacaaagtgtattgaaattcaggaggaaacgatatttaaaatctttcttatcatgaatccacatttccatgacaacgaactcatgaggtctaattgaatgtgaaattatttatacctgaattcaaattatacatcagagtttttttttaattatttatataagatgaataaatacttttaaacatgggatttgcgttcagaaaggattccctgttaatccaagtactgtgctgaggatgatcactgagcgagcaagcttaaaaaactcttttgtgcactagcaaatgttcataaagatatctttgtgctctcacttaatggttggcgctgagagctgtcacagactgttgttctatgaaaattagttggcactgagagctatcacagactgttctattaaaattagtttatttcccaattccttccccccactcccccaccctcctctttctctttccttctttccctctcaatgtagagtctccaaaattactttaccaactttctcaattgcagaaaaaattgtaagaggccacccagaaagggatcgtgttgcatattgtgcaacaatataagtggtccttactgatgaaaagcctgataagtggtttccatcatggcgtaagttttcatagtgttggtttctatcaaaatatttctttttcttatcatacgctacttcacagtgcatgcattacttctccaatttccttatttaacaaaagaactaagaattgtgttagagcatgaattgtgaacccaaatcctataagcttgaaaattgatagttcaatatggtattgaagcttggtttaatgggaggtctcgtgtttgagccacctttctacaatttgtatatttgtttccccatttgcatatttgtaagttcaaaaggactatttgcattttttgccttcaggcctatgtatctctccatgtgcgggtatggggccgcacatgagggagagtgttagagcatgaattgtgaacccaaatcctacaagctcaagtttttaggaaaattggtagttcaacaaaatgtatattatgttttctttggtgtgctcatgtatacttcctatgtacttggtctagcctttatttttggctctttaatatatcttttgctcttttgcctatcaataaaagtatattacacacatgcacactgacaaagagactgattagaattaaattttacaactaactattagaattagaaaatataacctccatgagagtaagagggatgaacacacaaattttgaaagtcttgaaaaaaaatacacaaaaaaataagaaaatatgcgaacaaacttatttgtgttaaaataatattggatacaatcctttggaataatattctatataaaagaatatttttctttgattcgatcactttgattacaattttgatttgatctctttgataacaatagaagggatgacaatgtgagtatttccttatggttaaagttcaattgaggacctagcatgacttgttcctaagtgacttattgacctttgagattgatgaagagcaagtgtgtagtacttcatgtgttttttagacttgcaagggcatttttgtgaagcctttcggatcctccaacattgaaggaggtcacttttagttataggtagagttaaggaattgaatttgaaatcccaaaatttgattgctcaattcaaggactttggttccttgatttgaacaatttgtctcctgtatttagaaaatttttcaataagagagtatttctttttaattcccttttaactttaattaatttgatttttttcaagacttgattttgtagttatccaaattttgtcacatgtcaccccttgaatatcatgtcacgtgtacaatgtgtatgacttaacacttatcaaaaccagatttattgaacgaagaagtcagaattgagatgatcaatttagtggtaatttaatcatctattttttttattttttattttttatggtgtacttgagtattgaactttttattttgtttttgctctttgatgggtaacatttttcccctaaatggaattgctctcttttctttttcttgtaggagctctatgccattatcaccttttctccctaatgcaaaaggaataattcatctattgtttttggtccactttatgaccttcactttgctatattgccatttattgatgttagaattttttaggagataaataacaaggtaaaaacggaaatggatcgagtaatctattcctttatccaagaaaagttatttctagtctgcatggtccaatcattgatcccaaaaatttcgacaataaattagttaggtcactggtataattccctacccacgggttgttaggggggttaccgcttaaaactctctatattgagccttttggccttgtacaaagcatacttagagttaaaccccttttttagtctcatagtttagggggttcaggggtccctccgttgggaagagaagaaccactaagaactactaagctagcgagtgagtgtcccttgcggataaggggtgcaaatgataaaaggtaagttgtagaaggctgctattcttgactccaaattgggaatagggtaaagcctgtagccttgaaaaaaaaagcttttttgcataatttagagctcaagagcctaaaggttatttaggaccttgagtttcttcctacaacttctcttcctcgaaggccactattcctgaagggaatagagtaaggcctttacctaataaccaaagttccactattctgctaggaataaagtaagggctttaccgattattcttacccttctccaaggtcgctattcctgactgaagggcaggaatagtgttaggcctttaccaaaaaaaataaaattaaggctgttcttagtccaataaaagcatttttttagtaagagttggaacaaacgaagtatttcataattgacatgaaactcagtatcccatttatcattcttattggagatttcaattgaaaaaataaccagacatttatcccagcaaagatgaccttctgtccgggtgattttttgttgcatcctgacaatataggttttaattctggctgtaactcctgctcagcacactggtggtctagccagttctttggtgaagctttgaggaccctataaataagaattgctcatgtgtatggtttttgtttccttaaaaatcaacctgaagagtactaggcttcttttttagtgcaggatttatattgttgagaagaaagtaatgcaaacgtgtgttataatgacatgctaatattgtctttcactcctggttgcagacacctggtgcttctgagctatccatcaggaactt

SEQ ID NO: 13190 - DNA, 4823 bp, Vitis vinifera
  Intron number 6 from transcript GSVIVT01017471001 (locus G SVIVG01017471001) derived from phytozome v7.0 (chr-ID chr9 ; pos 8885012 to 8889834 reverse strand)
tacttggagtaggaggctttgatttggagaggttatttctctatcttctctttgttgtagggcttaaacatttcccttgtctataagctaacttatttcttaggttgcggttgatttagtgtattttcatttctagcacttaagataaaaaaattccatctttgatttgtgctttatctatttgcttgctactggtgatatgcttagttgttttacattgatagctttcatttcttcacacatgccaaccaccaccccacgccccccaaccaaaccacccccccttttcctttctttttcatttctttgtgtttcatttttcttaatacacttttgttcaaaggaaggaagggggttatagagggcctaatcacataaaatgaactgaatgctctatttttgtacagttgtttatcctttaatattatctggtaaaaaacttagttttctctgagagtagttcagtactgatcaaaaagctatccttaattgaaatcatcagataagagtcatttgcatgtggatgaaagaagtttgagagcagtgttgtatttgaggtgtacctcaagttgcttccatttgatttccttcttcagtaatgcatgaaagctgtagttgttaaagaaagtccaggagcgaaaaaagcccagggtacagggaggtgcatgtgaagtgccttgctttgcttcaagcaagcgtcacttgaggtcctaggcatagttgggcagagcccaaggcacaaggaaggcataccttttattttatgctctttattatttatttcatggataaacaagatagttgatggttcataattaacatccacaactaatatccgaaagttccagaatccaattactaaaacagacatcccaaaatccaaattatgggtagcacaaatccttttgttgagcagctcccaagtcctatctcagaagcctgctcagtgactaaccccaactcctcatcatatcacttcttgcctgactgctctttattacaaaatattttcaggggtgaggctgcaacccattaacaaacaataatccaacagggtagagcaaacaacagttcaagatggtgtccaaaataagacatggccttttgtggaagtagaacctgttagccagatatagattttcaaagcatatgtcacagccatctaggcaatttaacaaattctcagtgagtttaaagttcatataattccaaaaatcatgttttctcaaaatctctagtttttaagacaaatacccataaaaaggtcttaactacaattcattgagtcctaacggacataaaaggcccagaaaatagcatcttgttggctaggatcaaatactgtagctagcctagtgtttgataacaaatggtgcctgaacagatcacggcatgggtgccttaggtcaataatttaccacctattggttaggcacaatgtatggtaacccccattaagagatgtaaaggttggcagcttgcccctttctccccttgcccactaaggtgaaacaggtaatccacacagagcatattcaagtgattctgacgctatttgttcaaataaacatattctcagaagccaagaacacatgctcaaagaagtagcttgttgtacgttttcaggttattaaaattccatatgtaataaaataggctaaactatatgatttccttcacagtgttctcaaagaaaagttcttaccaaaataacaagctatattacaaccccttacccttcactgtagttgcaattctaaggattttcccttgcttttatctctgggcgacctttcccttaaagttagacatagaactaatttagttcacaaatgctttcacaatttctgatctcaggtcctcattttggtaatggtggattttttccatgtccattaattgaagcgttggttcaatccattgaaattcttccttgatatcaggtcatcatctcattcaatcaaactggacaaaattctagatcaccaatcaagttacagttccaagaatctgatttcatgtcccaagtgtccaaaatcaagttattttcatcccatatatataactaaaggctttggtgtcttattaacatggattaacactgaataaatgatttgagacctaggtctagggactgaattcaacttattttcttactttttagacatgcgagtttcctacctttttctatggttgatttctccacctaagacttctaggtctctggattatgaagaaaggaattagtttacttaccatgtctcaaagtccattgataatgctcaaggaaagtgagttctctctgtcggtctgtctgtctctccctccctctctctctctctttctctctctccccagaacaattgtcttttaaggagtctgaagaccctatttttgcttaagctcattttaggttttctgtacattccgacagatttgccaaagtacctcttaagttttatttaatttcttcttagccttgatctaaaagaaatcctgtaataaccttgaataattcaggatagaaattcccccttctttatggccccacagttacataatacatatatccttcattattagcataaccaagtaattaatttaccatgaaatccagaaatttgggttcgaggtattgcatcatcttttcattttgattttatagttgatgctgaccaaaccttctgcaaggttgtgaggggaaagaagaaattgttgccggttacttgattggagagagagatttgtaaactagatcgcttggtcaattttaatcgctcacctctctcagcaaagggaagagggaggggcagtgggatcacagtctccttctgtacgaggttcttttatttttttccagttgggttgcagggattgggatactggaggttcatgtggatttttgttaggcttttggggtcttttatggtttgagcagtgtttttaagcaatgggttgtttcagggggtaggtattttcccccctctctttcttgccttatggcctatacggtatacgccatgtgtacgttgccgtgccattgtgctagcgctttttaatatattctatcttttacttatcaaaaaaaaaaaaaaaaaaaaaaaccttttgcaaggcaaagtggatgcttgtcatctaacatttgtcattatggtgagaagtgaagttggttaacgccattttcatctacaatgtattttggcagatggatgcagactctagttactctgttcctcataatagtttgtgtcaatctccagcttggtattggtaaatcagtttcactatgaaggtaaaagctgtcgagcagatgtgggagcttgaaaggaacaaaaacatgcctctcttggacgattatatccaatgggctcacttgtgcctcctaggtggtgcttctttggagaatttggcaggatgtcataacaattttggatattttttggtggtatcccattttggctaaacaagggatctaccctgtttattatttggtttctgttttctgtcctctatagagttttagtagcttgttgatgcttgaaagaactcctgatctggattcttattaggttcataattctctctgcatatcatagttccctggccttattaagttcccttggaacataggattttattttattttgtttcccaactttttgaatagaaatagtgttttagttgatatatcctcttgatggctgggaattaggagcaggtagatggatattctcagtttcactcagttctgaatagttgatgggaaaagagccagatactgttgtaatttttcatgcggggatactaccttgatgtatatttttcaggacttgtttagtattgtgctgaatgaggacacatgatgtgtgattatttggtgagggctggactggcaatcactagtcccttgttatcatttggagctttaagggctggtagctagaggagttggttgagtttatgagtctgctatatgagatattggtgggcagagccagaaaagatactatcagttggaagctcaatatggatagaagattctgttaatatgcttttcaggaatatgttattgaggtttggttggcagctgttccttccaaattaattttttgagtgagaagcagcttggggtaaaatccttaccatggccaattgaagcagaccatatgagtgtaacatgactgagtaaaaatattcttgcttggtggtaaagaaagttcctgaacaagaatgagagtaaagatcggagggtgcctatcaaaaaaagcaaaaagaaaaaaaggttggagagttcctctcttatgtttgttttagtgccttaaggagttaacatgacagagaagtctactgagtacgaaagtggaaggatagcctagtcaaatccttatttctatggatctcatcctcatcagtagcccagagagtttccttgtaggtttttatttctgcctgttctgtgcaggagcagcttgacctcacattttactgttttattttagtttctctgctggtgtcagtgtttgtttgtttgtgtgcttggttttgttttgtttatctttttttttttttttttggtctacttatggcctcatgtatttacctttggcattgggatttacccatgaaaaagggacaatgaaacaacaaagaagaaacggttctatgctcttgacagatgaagtactttactgtttggcttcatgaagacttctttgctctctttctggccttttgagcatctttttgtgacttggggttgtaagctaacatctggtggaaccttgccaggattgagagtgctgtcaattcagaaggtgtgaagg

SEQ ID NO: 13191 - DNA, 6495 bp, Vitis vinifera
  Intron number 2 from transcript GSVIVT01035767001 (locus G SVIVG01035767001) derived from phytozome v7.0 (chr-ID chr4 ; pos 4138790 to 4145284 reverse strand)
ggaaaatcgaaggttttggttaaggtagtgttcagttaaaaaaattacttatatatatataaaagtaaattgtagtttaatttggaaattagtttgctcgagaatttttttttccctttttcttgatggctttcaaatttttgcacctgagatggttttcatatgttccatctagcacatatccaaagaggcatatggtatgttttaaggctaaaaggaatgatgatggcctatgcccactggattgtagtttagccctttggcaaagaaccaaaggtccaaagtttgaaccttcctagtatccaagtgttacagggcagaggagtgggcccatatcacctaggatttgctttgctcgtagtcaggataaatgccttactattacttatttaattgttataaaaacgaaggaagggtgatgccatatgatgtggcaacttgacatgagtaggagtagaccataatggtgaaactagaatacgtagacaattgcccaggcctctggtagttaaaataaatgccctcttgagttgagttccatttagttaaatatttcacagtaccagttatatcagttcttagattgactttgtttctcttcttctgattggttgtactgtggcaacttgcaagcatttctaaatgaactggcatttaattggagatcagttaaaaaaaaatagagaaacaattaaataaactgtttcttagtttagatgttgagctatgactggtgttcacatacaggcaagcttatgaacttgaataattctatcacctgtgcagacatgttgttggtagaaagtttcaggtgttcgattgaagaagctcctttgcattggcactggtagtagagtgaagcactgttacccttagaatgggtttactacaaagataagatgtatggaaactaaaacatgaagaatttgaattggtcttgttaggcagatttactggttatgggaattttttaagaaacttgaggtccaaattttactattaagacttctaaagaaagtattgggctgtttgtggggaacaatgttggaaatatcctttgatgattacaagagaagggaaggttggttccaatgtttaagccttaatttgggacatcaatgatgatttaagttcctcttacgacttgacatattttaggttgattcttttgttaagtttatattttaggtagttgtttacctttttgtctagtttttatttcttatatagtctttttgtcatattagaaaatcttttaattttttagcttgtatttgattcttggaaagtactaaggaaagaaaaaaatgttaagaaaaattattttcacatatttggttcaccatagaaaatgtgaaaaacaaatcaaagataattaaaattagttaaaaacttttgtatttttaatattaatcttattttcactttctttattttttctttttctttttatttccttcaccattttctctcaaattttccaagaatcaaatttagtgttaagttccttataaaaaattatctatttcttttcctgtaagggaagataaaaaaaaatacattcgttgcctaagactattgtttggtacaacgatgtaaaaagtttatgggctggttttggagaatacatggaagttgctgaatacgtttatgggctggttttggagaatacatggaagttgctgaatacttaatttcttttcatcattccagctacgaactgatgtctaacgttattaattgtagctttcatgatcttttaagatgcttagtgggtgaccgtgttggcaattggtagcaattactttctatggcataatttgcttataacaattacataaatcggatcacagtgcttttgaagttattactggtttgtagcttggaaagccgattgatttgagtcttttgccttcaaatgcaagagtgcagcggaggaagcttttttataagtcacatgaaggaagttcatgataaagtacaaaggaagatagcacatgggaataaacaatacaaggttcattctaatcttaggaaatgttttgctgagttaaagggagtaaatatggttatgattcatataaaacaagatgcttattagaagctacatcccaagaatgttgatcaacacaagcatatgaaggaaatcagttctcatgcttatgtccttgaactgctggttgatatgtctattggtactgtatttaatgttgacaacttgacattatatggagaccattgtgatgaatccttttaatatggaatgattattcaattgccaccggtattgagcttaaaggaagacattgaagatgtgattgatgactagagtgtatccataactgagggaggctgcaaaaagtatttggttatgtggggaaatcaccctcttttttattgcacttggattgcatccaaagaatttgagtggaaaaatcatgaactttatggaaatatcattccttttttcaggtggtgtctagttcttacaaatcaagagatgatgtataacaatattgaaaacattctttgaaaacttacaagagaaggggaaaggatgttagaggttcctttcattgaggaggaagtttttgctaccttgtctagttgtgtgaataaagctctagatggtgttttggcacaagagttgggactttgtaaaaaccgaggtgatgagtttcttcaaggagttctttggtaacaactcctttgagtgagttttgattcctaagaaaggtggagttgaggatataaaagatttcagattcattaatttagttggggggttgtataagctattggctaaagttttggctaatcagctcaaaaaggtggtgggcttggtggtttcaatttaccaacaagcttttgtggagagtaaacaaattttggatgcagatggggccttagatttcaaggctaaagagcaccaatggtaggatcatttgaaagctggacattgaaaagacatataatcatgtaaattgagacttcttgctagtagttttggaaaaaaaaaaagattttggtcaaaattgggtgtgatggatatctcctactcacttcatgttggcaatggaggttctcaaccaagttctaaggagggccaatgaaagggagtttcatcttgtgattcaaagtgggaggaagaggtggggaaggaatggaagtgtttgattcgttgttcactaattatgccttaattttctgtgatgttactaaccaagagcaattggagtatctaagttgagctttcatgtggtttgagacaatatctagtttaaggataatatggagaaagtaagctaattttgataggtgatgtcgtaaatgtggagggtttagcctatgcgttgggagtgtacctactacatacttggatttgttgttgggttctcctcgcaagtcaatgagggtatgaaactcgatgaaggaaagatttaagaaaaatctagccttgtggaagcgacaatattattgagaggatagagacttaccttgataaagaacacgttatcaagttagtcaatttatttcatatctctttttcgccattctgaggagggtgagcttaagattggagtagatccaaaggatttcctagggagagaaggagctcttgagagaaaaccccatttggttaattggtctattgtttgtttgggcaaaaatagatggggagattggcataaaattctccacactcttaatagggttatccttggtaaacggagctagagatttgcttccaagggagttcctttggaaataggtcattgctatgaagtatgggacaaaagaaaggggatggtgctcaagggcaatgaggaatggctatggggtgaggttgtggaaggctataagaaactagtgggaagcctttggaagtagaacttgcctcattttgtgtattggcagaaggataaaattatggaaagatggatggtgcagcaaaaattctttggaagagtcttttttggtgttattttctataccgttgataaagactcttgtatagcttgaaatgtgggaacaagttggggaaatgggtcaatggagtccctgctttcatagatagttcctcaattaagcgttggaaggaggtctttttttgaaggccacaatcaatctcagttagaaaggaagatgaggaggacaaattgagcttgaaagaaactaagaatggcaagttgcttgcccgatttttctatgcatccttagcccaaggaagaagtgagccttccttgcaagcatagtatggaaccctttagtgccattgaaggtgaattcttttacttgagaagctatttgaggaaggaatttaattcttgatcagctcaaaagaaggggttagagtatgtgccgagtaaatgtaaaggggatgaagtgttggttgatcacttgcttctcccctacttcatagcaaaaatcttgtggcaattggttttttccctatttggaatggcatgggtgatgtactcctttgttgaatgcaattttttgagttgacatgtttcttttgtgagaaagaagaagaagaaagcttggagggcaactcctttatgtccattttaaacgttatggaaagtaagagagaggaggtcttttgaaggtgtagaactttcagatcgaacaattaaatcttcctttatgtgtatctttttttattgggctagagtgtatatagacaatcattctatgttaatgataggctttgtagattggttgagcttgaagtaaggagagggaggttgtttttgtttttccttttcttgttccttttttcctacatgtttgggactaattgtatacatcgtatgtactttgttgtgctcttttctttctttatcaatatatattcttgtttgcctatcaaaaaaaagataggagaaatggaaaccatgtatgattgaggtgataaaggtttgtggttgattataaatttcctcatatgagtaaatactagttagagcaaggcagagggaacttgtctatattgagtcttttctaaggttgtctctattttatttcacattgttttttaatttaatttactacattataagggatagtttgtgaaaatgagtgacaaatctctatgccttctagactgtaggggatggtagaagggtgaaattttggaaggacatttggtgtggaaacactcccctatgtgaggcttttccttctctgtttgcctttgcggtatcccaagatgcgtgggtagaggattgttgggattatatgggggatgcggggggatggtatccttgtttttctaggtcttttaatgattgggagcaggaggcggtggcgagtctcctttcggtcctttaaggaaagaggctcaatgttgggatggaggatagagtggtgtggaatgcttctaagaatgggattttctctgtaaaatccctttacaatactctggattctggtggtgcaatcccgtttccgtggagaatcatatggagcccttgcgtgcctactaaggtgggtttttttgcttgggaagcttcttgggggaaggtcttaacccaagatcatctcaaaaggaggggttggtctctagcaaacagatgcttcttatgttgtgatgatgaggagacaattaaccacatccttattcattgccccaaggcgaaggtgttgtggaatcttatgtttacgatgtttagggttaattgggtccttcagctcacagttaaagacactctccttggttggtccgattcctttgtagacaagaagcgtgggaagatttggcgggtagcccccctttgtttattttggacgatgtggaaagaaagaaataggatagcttttgataatgaggctttgtcgatccaaagattgaaaacctccttcgtttgtaatcttttctcttggactaagtcttgtttagatggagagccccactccttaattaattttgtagattggttgggttctaattgagggttggtgagtgtatgcttccttgtgctttttgtttttggggcttctcgtgtatacttcctgtatgcttcgggttgccttcttgcttccctctttttaatataattattctgtgtttatctatcaaaaaaaaaaaatctctatgccttccaggacaatgaaaaggcaaaaaaggacaaccttaatgggatggaagaagtagacgtttaagtctaacaaattcttagtagggatcaaaaaaataatcaagaatacgtagcaccggatagtgaacttttctattaaagaaccacgggaattgggtcaaaaatattaatttgtagaaaataagtattcaaaactctggaatttattatgattacagactctttttactttcagtccaacttttgtttctatgtggctttgtgtgtactgaatttctctaccattttcttttacggctgaatttaacaatgttgtgatgtatgaaatgtgagttcagatgatttggctgataatattttccttctttttaggttcatccagaagggaagt

SEQ ID NO: 13192 - DNA, 13111 bp, Vitis vinifera
  Intron number 2 from transcript GSVIVT01013898001 (locus G SVIVG01013898001) derived from phytozome v7.0 (chr-ID chr1 6; pos 6422209 to 6435319 reverse strand)
ccaggcatacctttagtggctcgtgaaacaatgtaggtcctttaagatggtatttatcgttacttctgtattttgtatgggtactttcaactagggtgatgctaatgtcccaagtaactgttctctttatctacaccatgatctttagttttcaaagtctcattatcttgttcctacttttgggagatatttcggcattaattttgtccatctttcccatgtaattgaattccaatgtagatattaagaagatttccatgtaactttcctcccaaagcaggtgactacatctattttacatgcttatgaaattttgcatgcgaaaaagaagacggtagtccttaaaatttaaaccaaatagcaacagaagattttgcatcaccaaatctatctcccttcatgtgtatgtgctcatgtgggcatgagtgcttgtgcaaatgccctttgcaatagattttgcctactctcaatctttgtctattagaacatggttgatgatgactcacttgggatgtatcagttgtacccttagaaagaatggtacttgatgccaatttacctccttggtctatctctagccaaatatgttgctactcctatggtacatcttcttcctcaccaagatgttgcacctcttcttccttgaactttttttgaacatttgaaaattgtcttaactatagattcgtaaaaattgaaactcaatcctttgttcaattgacttgtgatctacttgtttgggattcatcaatctcaatttgaaatgattcaatgttttgtagataaggagtttaaaaacaatcacaccatgagacatggattggcatggaaacctcatccagaggaaaaaccacaaacatccagtataccaagcagtcaacgataggatgatcacttacaagagcttagtcttattgaattccaattgatcaagcacttgatcatacccaatatgtgcctgctctttgtacctcgaccattcaacttcacagttcccaactaggtactcatttctccataaagacttatggacacaccttgacttttcaccaaaacacttaatctgtaactaagattttcttgaactttaaagtttctacaaaacacatgaagtcaagttaagatttcttcaaccttttgatctcttgcagaatcccattgaaactagattgaactactcacaatctctcggcctctcaagatctgatctatcacaacagaaaaggaatatatatataatttcttcaagaagccatttcaataggaatgcgacaatagaagaaatgtgggaccataattttggagaaggaggatggaatttgaggttcattagggattttaacgattgagaattggatatggtaggcaacttgcttcatgagttgaggggtcacggtataactttggaggaagattcggttttttggaaggaaggaggtaatgggcagtttagagtaaaagaagtttacagcctgttggataggcctttgacggtcgtttttccgaaaaataaaatttgggtggagagagttccaactaaaattgtgttctttgcatgggaagccacttgggggaagattatgactcttgatagactccagaagagagggtggcagctccccaatcgctgttttttgtgtgcttgtgaagaggaaaatgtaaatcacattctcattcattgtacagtggctagagtgctgtgggaattagttttgggtttgtttggggtgcagtgggcatttcctgaaactgtaaaagaggttttatttagttggaggggtttctttgtggggaaaaaaaggaaaaaactttggaattccatttcgttatttattttttggatggtttggaaggaaaggaatagactagcttttagggggggggggagttagtaattcagagaattaaacattcttttgtatgtaacatttggggttgggctaaattgtatatgggtgaggagcggaattcccttataggatttctggagtggttagcctccagataaggggtggtgggtttatttttggttttttgcttgtgaggcctttgtagccttgtataccccctgtatactttgtgacttgtttgcctcttttcaatgaattctgtgcttatttatcaaaaaaaaaaaagaagccatttcaaaatcaacttggtttcaagtttcccatcttcaacctatgagtctcaattaaatcttgaataaatgcacacaagttcctcagacgatactaatcgaccaatttatagatcattatattaaaaaatctacaacaactcttcaatgctgaatctagattctcttcaatgaacttgatttcaatgcatatgcaatcaagtcacttcaagcacacacaagacttgaatagcttccttaacaaacacgaattctaaattctatcttagatgatggagctctcttaacctcacaatggagaacaattcaaaacctaaatttagagaagaacctaggaattttctcacttgaactctatctaagatgtatgtgttgatttctttggaatgatatacaagtatgctatttataggcaataccagttagagatgagaaacacgaaacaactcaattggacctttaaaaaccaaacacatgaagttcaatgctgaaaatcattgtgcatctcaataagcactcatcttggtcttgtggtttgaagctaaattatcttgaacatacattagctacaatgcccttcaaagtaagttccattttcaattgagtttgaccaaatcttgaaccctaacacatgctaagtctttgtgagtgatcatatggacttaagttagtcctacacctatacacaagcttgtaatgaaacatgccatgaaattgctaacttaaaaccacacatttacacatttttccatcttctataaaactttaggcttaacttcaccctccccttcataggtggttctttttttcccctagtaacacattatttcatttaaaattcaataaggcggccactccctattattagaaatttagagtattggcatcaaatttgaggagaaacatgaattctttcatatagtggaaaatgcccatagaaggaggaattttttagttaggattaaagtaaatggaatatggctttttgaggaggaggagataaaggaggggtatctcaaacctttcacaacgttttatctggccttcatgattggagactaaagtattagtgaattgtcattgaggaggttgagtagagatgttggtgagggtatggaggtcctattttaggaagaggaggttttgtcagctcttcaattgataagcggggacaaggtgccaggcctgattatttctctatagctctttagcaacattgttaggattttgtaaatgagtttctttagggagttttatgagtatgtatcttttgaaagaagcttaaatgccaccttttggtgttgattcctaagaatggaaggtaaaggacttgaaagactttaggcctaatagtttggtgggtggttatacaagtggcttgcaagggtcttggaaaataggttaaagaaagtggtagcatcgattgtttctatctctcaaaaatgcttttgttgaaggaggacaaattttggatgtggagctaatggccaatgaagcaatagactcaagactaaataatgggttgaatgatacaatatgcaagttggatatagaaaaggcatatgaccatgtaaattgggcctatttgctagaaatccttgacgaaatggggtttgataaaaaaatagatggttagattcaatctgtgcatttctacagtgaagttttttctttttgatagataaaattttgcccttgtcagaacttgaacttggaaaaaccttccctaaccctttgccacttgagtggggccttaagaactataatgagatttttggtgttagtgaatgaaactttttccggtttctttcaaagttctaggggtctaaagcaaggggatcccctttacccttatcttttggttttagctatggaggggcttagttattttgctgaagagggcaaaggagggaggttacatttcggggtttaagttaagtggtaagggaggtaaagtttttatttatttatttattagaatcaaatataagtttttattggtaagtaagggaggtaaagttaaagaggtatctcaccctttatttgcatatgacactcttattttctataaagtgaaccaagatcaagtagtttacctgagttggatctttatgtggcttgaagttatcatggtcaaagattaatctgcagggagtaattctgctgggaaatgtttctaaggaggaaaaggaagctctatctattgtgtatttgggcttctcccttagggcatcctataaattgacaacatgttggcatttgatggaggagagagtccgcaagaggctggcgatgtggaaaagacggtatctctctaaaggttggagtcttactcttaccaaaagcaacctttcaagcttactcatttatcaagtgttttttttgtcatgcctaaaagagtaagcttaaggcttgagaagatttagagggacttcttgtggggtggggttctttagaaaaaatgcctcatctaatgagatgtgatattacttgtagggagaaaagaggtggaggctttggtattagaaaaattttcaatccttagtaaggtgtaaatgggaaagtggttatgaaggtttgcttaaaaaaatgagcctcttggaagagggttattgctaggaagtattggggtgggtgttggaggggcattggtgttcttagaaagagaggatggttatggagttgggttgtggaaggccattagtagtgggtgggacatcattagaggactctttataatgtgtaatggtagaagggtgaagtttcagaaagatatttggtgtggtgattcaactataagagaatctttttccttgttatattccatatccttgacaaaagaagcttgggtgggggatatttgggactgtcacaaagagggtgggctttggaacacccatttctcaaggaatttgaaggattagtagttggaaagggttgaggagtttctctcaaggcttcaaggaaagccgatgagaaggaatgaagatgatagcctacattggttggatgctacgaaggggaagtttatagtcaaatccttgtactcttttctggggtaggaaagagtggttgctttccctttaaaggctatggaaattgaccaaagtagttttttttttgtttgcatggaccaactgcaaagaaggggatggtcttcgatgaatcgattttttctttgtattaaagagggatggatggttaatcacattctccttcattatgcttgagctcgaggcttatggaatttggtattctctttgtttggtgttgcattggtgatgccatgttccgtaaaagagactctgttagggtgagatagatccttcttagttgaaaaaggaagaaggtttgaagggctgtgtgttttttggacaacatagaaggagaggaactaaagattttttgaaggctccttaatcatgttagagattattgactatttcttgaaggggcaattggtttttgttgcccctttttttgtttctattttggcttcctttgtatatgacctgtgttctttggtccacctttagttaactttttatttctttattttgtttacctatccacaaaaaaagggattcaatgtaccttcattagttgtgcaataaaaaattctcgaactagtataactagcaagggaactaaataatgtcttaggaatgtcttagaactaagtggttaagtgagatatatttgcccagtaacatgatgaatcaactattaagcccaaagtcctttgaaaatcccacatttgaaaacttgcattgtgtgggacaatcttcagttttgtggaactcattaaacttgttcactcgcccaaattccatgttgttgttagttttttaagtgcttaaactatttcttagtttgcttttaaagtatggcttttaatcacttggcttcgtaaagacatcattcttccaccacaatgtgactcaacccaagatagacctcaaattgtccccctcttattcatacctaagaggtttatgccataattttttttttcttattcgtaagtaagaaaatatatgagaaatgcctaagaagagacgcaccaaagtacacatgatgtatacaatatgcacgaaaaggttaaccaagaaaagggaaaataaaaagcaaactccctctccttacttgaagcttgaccaatctacaaagtttatcaagaacattgcatggcccctatgtacactttcacattcccaaaaaatagacataaaataagatttgctagcttggtttggctactttacttcattaaacaacctcctatttctttgcattcataaggtttaaaacaagcacaaggagcaactctccatgcattcttcctctttcctttaaatgaaccaggccaacacaagaggtttcctctaactgtagaatgcaacacctaaatcactccaaaaagagaataaattagttgccacaacattctttctttgggtaatgaccaaacaaatgatcaacccatttttcatcctttttacatgtataacatccattcaataaactttatctctccttatgagatgatctagtgccagtattcttctccaaaccgcttcccatgtgaagaatccaacctttgttggtacccaaggatttcgcacaacgattatgggtaaagactctttacctcccctttgtagggatgtgtaaaagggatctaaatgatcactcttagttttcttgcaacacaagtcatcttccttatatcttcttattgataaagtatgcaatttcctttaaaaaactctccctccctcacattctcaatcatcaagctgttttgagaatttgggactccaactatccccttcttcttgacttgctcccacgcctttgctacccaatcatctttggaggaaattatggaaaatatcacatggaacgccttttccaagaacaagtcactgcattatctatctttccaaaattttgccctcttgctattccatgggacctgctttttataacctcaaaccaatttctgattgcattctacatcccaaaccaatggccgtcttgcatgctttgggaacaccaaccccctttgtcttctccaatgttctaacctatttttcataaggactttgttaggtttatgtgctaatcaacttaatgtaatcacctaagaggagggtgaattgggtgacaatcactttttataaaatttaacaattctgaatgcaagtgataattatatgtaataatataacgaaaacaatatataaactattgcttataaattaaatagagaatagaaaagaaattgaaactcaatattttatagtgatttagcgtaacccaacgtacatccactctcctcaatcttttaaccatgttgagggttccagtaacaaggcttccaacctaagccttcaaactttgtacttggattatggtttggttcccagggacccttacaataacaagacttttagtgacagagttttcaaactatctcccttgaattatggttccaatggaccctctcaagtgatacccccattcttaagctccctaaaacttggtaatcttcacaaggttaacaattgatagaaaattgattttataaaatcctagtacaagtttaagctcaaattcatacaagataaaattagggttgagttgtactaagttgaaatgcaagttttgacccaaagtgctctcaaagtattctttaaggcttaattaatgattgaagaacaatgtagaataattccctctacaataaattaagtataagaaccttatataggagttgcataagtaaaccaaccattagtataattgtattgtaggggatcgttgggccttgtagcttaattggtagcaccaacaatcaccgctagcttcaactaattgaaccaaccttaattggttaagtctttaactttactgcctaaaatcatctcaaccaattgaaacttatggttgaccggtttgatcaattgtttttttttttttttttgatgaataaaaagcaatatattaaaagaaaaaggcacatcaaggatgcaccccaaagtatacaggtagtatacaagagagaaaaaagaaccccttaactagagcctaactaatctacaaaatccacaaagaggggccagagtaaaaagaaccccttagtccatgcccaaagattacaaaggaaaaacgaattacacccttgaaccaaatgccccttattttccaaagccctattgtttctttccttccaaacaatccaaaaaagacacaaaggagctgaaaaccacactttcttcctctcttttcccacacaaggcccaagccaccccacctattgtggatcaattgttagaatcccacaaatcttgtaagtttaagcttttagaaaaattgtttgtctaacaacttggtcaaatatataaaaaatatagaaaattgatgtacaaatgaccgttaacaactcatattatttcaatatgaaaatttaagagaaaaactctttttaatgataatatgtatgtcaaaacatgagcttttattcttgaaataatcactctcatttttcataaaaatcattaaaaaaaattgcataaaaacttttgcatttctagtgcaatatccttttggaaacttggctatatacactccttatcattttgaaaacctttttaaccatgaataatactaatcaaaggtggtttttatttaaaatgattattcatccaatttataaaagaataaaatcgatttaggcatgtggatgattttgtgcttaaataaaaatgtaatgcattatgaacctagtgcaccaacaaccctacaaaaaggtcctagaaagattaacttggaattccatctccttgaagtcttcttgatttccttttaggttgatatatcttcttgattgcctatttggaaacctccaacttgattttccaagcaaagccttgtttatagtagaaagattgcgaaggccaagtctcctccccctttttgcgaaacagaaaatggaacaattaaccaagtgaggtcttttctctggagcaccactaacctaaaggaaaattttttggatctgctccaacttgagactcatctttcttgaaatgacaaatagagacatgaaatagatcggaagagaggcaacatgcttttaatcaaagtaattctccctcctttcgaaaggtattgcctcttccacaaagtataaataagacatgaaatgcatcttaatttaacctttcctatgtcaacaacatcacaaactacatcaatgattgggaggtagtcttggtggagcagttgctcatgacaatccaaggaaagagagttagtgcaaaagtggagggtagggtttggaaaaagacaaaaagtgggtttttcatagttaagtctctttatagtgctggggagctgggaagtacagttcggtttccaagaaaaataatttggagtccttatgttcctcctagagtgggttttttttgcttgggaagtctcgtgggggaagttttaactttggatcaactcaaaaggaggggttggacccttgctaatagatgtttcttttgtctagccgaagaggagtctagtaatcacatcttaatccattgcatgaagactagagtttgtgggagttattattcgctctctttggagtgacttgggttcttccttgcttggtaagggagactctccttggttggtttgagtcctatgtgggcaagaagcgcaaaaaagctctagctcctttatgccttttttgggcaatgtggaaagaaagaaataggataacattcgacaatgaagagttttcagtacataggttgaagtattcttttgtgtgtagtttatggtcttagacaaagttgtatatagatgctgaccctttatctttaattgacttttttgattggttgggctctaggtgagagcgggtgtggtttttgttttccttattattttgctctttttagccttttggctcctactgtatacttcttatatgccttgggttgcccttcagacttcctttttctaatcaatatattctcttttgtgtttacccataaaaaacaaaaaaatatcacaaactacgtgaattctaataagaaccttcctaacatctattgactcacaagtcttgaactattccctattaggagaaatgatgcaacaccttgaataaagaatgcctctttacctgagttacctctagtaaatttagagaaatgctttcgtctatgacttttatattacttgaattagaggctttcttcttttagtttttgtaatgctttgtacaatttattctaatgcgccattccttgtctcaagtgtaacgctcgacacttgaaaacttttgggttcatatgaacttatccttctttgctatagttattcccaaccaaaccttcactacaaacataatttgtatactcataggccattttcttggacttatttgagtttaaggttgtccatacatactccatggggagtctctttatcatacatcatggtatccatagggtgtttatagaagtttggtagggagtagataaaaaagtcatgccttcttctttagatatataataacagtgttttaaaaggctattaaggcttatgccttggggcttgccttaaggcgaggttatgcaaattagccttgaggctatagcttgaatagaggataatcgaggcttaagcctcacccaattgaggcttataaccttaaggttatagctcaaggctattgaggcttaagccttaaatattcaaaacattttgatgggtttagggcctttttgggctttttgtatatataaatgaccaaaattatatgtaatcattatcttattattgatggataaagaaaaaaagatcactataattatggataaaaaggaaatttgagttgacattaacattgatggataggataatagaacaattggatataattttgattcattagagtatcctactagcgatagtgatggtagttttgaagattatttgataaatgcatgagaagaagttggattttagaaaaggaaaaaaaaaaaaaaaagaaaacttaaattagaagctcttaaaaatgacataattaatttgattattatacatcgtagaaactattgaaaatgacatgcaattaatttgattattatacattgtatggttttcttaggatttaattgtaatgttattttattagtatttttctgattttaaatgtttttttctttttattatcattattatttttaagtcgaggcttatgccttgttttgcctcgaggcttatgcttcacctcattttggcaaaaacacctcaagactgcctttagccttttaaaacattgtataatagttgaaataaatttattaaaatgatattgagtgtaccttcttgatcttgaaagtgaacaatagcttctttaaatacgaataactcacaagagacttcatcttgtatagactctttaagtttgtcttaactagacaattgtttcttctttttgtggccttaagaagagccatattactcaaacttagtagaaaaagagagtggactttctctctgagttcatctttcacttgggcatttcaaaattaatagagcatgcgtcttaatgccttgttaataaaatttctctctctctctaatcaaacttctcaaccttaattttgttgttgttatagacctaaccaccttagctatcacccattttctgggatagtagaatccttgttgcaacaaaatttgtttctttactctttaggacttagttaggatgtcatggactgcaattgttgcttgagcataggacaatgcatggcctagaattggcatgagccttactttttcccagagttttaaaaggtgtgcttaaagtgtgccttggcctaagccgcacctacttagcgccttgctggaaaggtgtaccttgtccactttattttaactttttaaacactttcattcttgaaatttcttactgtatattgaaatttatataatttaattacctttttgttgaatgcttcttttaaatttttggaattttaaagtcttcatttattatattagattttggataatatttttttttgatagattaaaatcttcattgttgaatgcttttaaatttttggaattttaaaatcttcactgattatatttgattttggagcatatttgtataattgatatgcatcctaagtcatgtttcacttcactcaagtgcctacactgtgttgggcattgcacataagctgtaggagagttttgcctcttcggtgtgctttgcgctttccaaaactattcttttgcctacctaattgaactatgccaagttggtattcggccaaaccatgtgttgtttcccaagcccaaccaaccaaatcattattcagaggcccatacacttataatattatttccaagtataaaattaccttatttaggttaatttctgatttgcttgattttggcatccttgcaaaattaggaaggtttcatacccatgtaagatttgagtttttattttccttttttcctattccttggggatgaagataaaaggaaggtggaaaacatattttatttccttctttatttataagtaaatcaatttttataagtactatctcaaatgttgttatgtatatttataagtaaatcactttgttgtctttttatgcggttttgtccctccatggtttcttaatgtgattggtgtgcctttaaagcaattaatgcaaaatatttcaagaatatagcaaaggtcttgacttcttggcatctgagtggttgaatgatagagtgctagatacttgcaatatggttgtttgaagtacaaatggaagtgtaacaatttggtccttttgcctttttcatttgatgggtcatttcatcacatttcatgaaaagaaaattcatgtttgcaattgcagctattctagaagtgcagatcag

SEQ ID NO: 13193 - DNA, 4020 bp, Vitis vinifera
  Intron number 5 from transcript GSVIVT01020170001 (locus G SVIVG01020170001) derived from phytozome v7.0 (chr-ID chr1 ; pos 9469084 to 9473103 reverse strand)
ggattagaaatagtggtaagttatggacttttttgttagtagtctttggcttggtttgggtgtttctggccttagtgagaaatctcttattagaatggaaattaaaggggttagattttaagaaaagggcggtttggcgcttggctttgatttgcttattttggtgtatttgaaaagagcataactgaaggactttcgaagatgaagagctttttgataaaatactaaaggatttctttatatgattgattttagagtggtcctaggattctttagatttggagaacccttcgattttgaatttctttttttgatagacaaaagcttgtattaagaagcacaaaaaaaagggacgcacccaatgtatataggcagtatataaaaaaaaaacaacctaagcactggaaaagaaagaagaaacctagaaaagagtaaggctagccacaataaagagtctctataaaaatcaaatgagagagaatctccaaatccaacaattgtttggaccactccacaagggatctaaaaaaaagaatcctcaacatttggtccaacaattcttcatcttcgaagatcctttggttacgctctccctaaatgcaccaaaataagcaaattagagccagccactaaactgttcttttcttcttccctagtcccttgaatttctattttaggagaagatttctcactaaagccgaaaacatctaaaccaaaccaaaagttgttaatagcaatgtccaaagttgacttgtcctatcacaatgaatcaaaatatgatcaactaactcttcacaatctttacaaagaatacatctattaaccaagggccatcctctcttcattaacatatctacaattaatatcttcccccacactatttcccaagcaaaaatatgagttttgagaggagcacctgatccccaaacctctttagctagaaataaaaaattgttatcagccctcagagaaatataataaaacttgacactgtacttttccatcccatcattttcccaaattaaagtgttcttcctttcttgcacttttgaagaagagatgtgtttcaaaaaccgagacacctcctatagctcccaatcttggaagggtcttctaaaagaaacctcccagcatccacttccaccccctcccattccccataaatatgccactgttgcattcttgtggggagaaagcttgaaaagagttgggtaaacatccttcaacttaatctccccaacccaactatcctaccaaaatcttgtgcatctaccatttccaatgcggatgctggttctaagagtgaacttttctcggccttttctaatgtctttccaaagacttagcccgtaagaatccttcacctctctaatggtccaacccccctccaccttcccaaatttttcaagaatgattttcctctaaagacttttcctcgtaagggagaatctccataaccatttgcctaacaaggcttgattaagaccctccaagtgccttagccccaaccttccatgcttcttatccttacaaacctccgcccaatttaccaagtgaaacttcctcctctcttctgtatcccctcacaaaaagttcctttgaattctctctaatttggttctcactttcttggggattacaaaagtgacataaaatagaccgggaggcttgagagagtactcttaataaggatgagtcttcctcctttggatgggtattgtttttttccatgcaactagtttcctctttaatctctcctttattacatcccaaacaccaattgctctggggctcgaaggggtaaacctagataagaagtatgaaatctccccactttgcacccaaacaggacaacaactttgtctgtatcctccatggccccttttggaatgatttcattttttttgcaaatttatcttgagtcctgaaaccaactcgaaacaagtgataatccacttccaatatttcagttgattttcatcatccttgcaaaagagggaagtattgtctgcgaataataagtgagaagcttgaaccccttctccccctctaccttctatcttaacacccctaataaaacctccctcctcagccttagcaattaatctattgaatgctttcataatcaaaacgaatgggtaaggtgaaagtgggtccccttacctcagccccctatgtgtcaagaaaaaatttgtgggagtgccattaactaaaacaaccattcttatagtagaaatgcaatagaggatccattatctccatttggggctgaaacccatcttctctaaaaccgatagaaggaattttcagtttacattgtcgtaagctttttctatgtccaacttgcagaccagccctgcattagacctttgtttccatgagtcgatcgcctcatttgctaccaaggttgcatccacaatctgtttacccccccacaaatgcattctagttgttcgacaccactttgccaatcaccctcttcagtctattagttaggacttttgcaagaattttgtagagacttcccataagactaattggcctgaattcctatatgtcacttgtccctcccttctttgggatgaggactaaaacagttgtgtttgggttgctaactacgacattttgcgaatggaattcttcaaatacctgtatcacttccccacctactataggctagcaaaacttctagaaagccaatgagaacccatccggccttggtgccttatcaccccccaattctaacattgctttggtcatctcctactctaaaaatggacccttcaatccctcattatccatggcgtcaattctcattaatgactctaaagccacattaggtcttctcgcttggggttcttcaaacacaagtttgaagtaggagttaatcccctctttcagcttctctttttccaagcgaatccccctaacagtaaggctgttgataaaatttccttttttcctttcattagccatgcgatgaaaaaacctggtgttgttatccccttccttcaactagagggcccttgatttctgtctccaagaggtctctgctaggatggctaaacgactatactcatctttagctgacctttgacttctcttatcctcttcaaagaggggtcttagcctttctacattatcccagtagtttatctgttctaaagcagcatccttcctagctgaaacatttccaagcacctctttatcacacttctttaggtcgattttcaaagcttgtaatttcttggcaagcacaaagcttggactgcccctgaaattgtaagtctgccaccattctttaattctatccgcaaaaccttcaacccttagccatgtgttttcaattctaaatggactttttccttttctcactcctccacaatctaagaaaatggggcaatgattagagacgggtcttggtagcaaatgttgcatcaccctagaaacaagatcctcccaatcgccagagaataagaaatggtccaagcgagccaccttgccctccactccaaggcctccccccccccccccccctcccctcaggaggcgggtctacaagttcaaacttattaataaagctagagaattctctcgtagcagatgtcatctacctacaattactcttttcgactggaaaccgcaccacattaaaatcatttgctaatcaccatggctcatcccaaagcccccttacaacggctaactcctcccacatctccctcgattttgaatttcttagatgctttttactgtggttagctataccctgtttttgtaggctaactctttctttgtttggtacttgctttgggtagttttgtgtatattgcctatatacgtagggtgcgcttcctctttttagtgtttattaatacatgatttgttgtcttgtcataagaacagaaatagtggtaagttaagacttatcctctaagattttgaaagtttatgctctttgttttatattcttcctttttggcagggagcagttgaatcaagacctattacaactgatcc

SEQ ID NO: 13194 - DNA, 4677 bp, Vitis vinifera
  Intron number 29 from transcript GSVIVT01037993001 (locus GSVIVG01037993001) derived from phytozome v7.0 (chr-ID chr 10; pos 12158651 to 12163327 reverse strand)
cagactcttggtggatgacatgtccagggaagcatttccagaatcctgatgtgtaaaggtatagcaggagggatggttggagagttgcaagggttatgtcgcctactcatttgaggtttgaacttgatgtgctagcattctctgatgctactttaataagggtttgggccactttgctcttcccccagtgaagctgtgaactgccatctgtcacttcctcaagtcattataaccccggtcgtggtcttctctcccgtgctaggtctctcagacttcctcagggcatgcctttttcattttgcctacttcctatttttgttactattattattttcatttctctttttattatattaaatttatttcactttttattattattattattattttctttattattattattattttatccttgttgttttcaaaataatccatcaaattccagctttcaaagggttttccaaattccatttttataaaatttatttacttttaattttcatctttagtttttttagaatccctcaaaaatctcatttcaaataaaattcaccgccattttttgttttggccagtgactttcacaattcctctgattttcaaaatgttttaaataagctagaatcgaattccgtaattcctagtgatggaatttatggaattaattcatgcaaaaatgaattgggctttggtgggggccctacatatgagatttcatgattgattgactgattgattgattcattagctatatgtgattgatttactctgtttcttgatatacacattatccttctgtgtttgttcactaaccctgtttctgatagcgtgttacgactcgtggcccaggtacgcactctctatacctattctgtttttttataagtgtaagatggatttgagtatccattgatttttccattgattgccatgtcagcttcattctattagtagagacccgactttagggacttagaggggtgctacggtttttaccgtgccttcccgataagtaacctgacccccgaacccgacccggtttttcacagaccaccttttccaaaacaaggagtcacacttagggtttttctttcttattttgtttaccctttaaaaataaaacaaaaataagtggcgactccaagtcattttcaaataatcaaataaaaatcatttttcaaataaaaattcgagctcgccatcgagtgggaaacgcattcgagcaaccgaaatgcggggtccacatggacatattcccatattgcaaattgggggagaacaaacaaccataaacaaagaattgcaaataggggaaggggagaaacaaatggggaaacaaacatgcaagtaacctcatactcgtacatgaagagatacatatattgtaaattaggggaggagagaagcatacaaagaattgcaatttggggaatagaaaaaaaaatggggggaaatgaacaagcaaaaaattaagggaaaggagaaccaactatagattaagaattataaattgggggaggggagaagcaaatggagaaagatttaaaaattgaggaaggggagaaaacaaataggaaaacaaacatgtaaattgtagaaagcatgaagaggtgacttgaatgcatgacctcttgtcaaaataacctcttataccctgttgaattatcaattttttcaaaattttaaatttgtgagatttgcatttgaattcaatatgcatatcatgttccttaataaaggtatgatccattgagaatatccatcgtgttgtgtcatagatacaaaatttaatgtaagtggcagggagtaagacttagggataacatccgtcaaataaatttgtatcttattctttcaaatgatagatttgtgattaaaggtctctaacctcgtagttaagtttttatatttgcatatctttagaagattgtacgagtggttttaaaaaatcctttgtgtcttggtctttgattattctttttcactttcctctattaaaaggacaaaattagttaaaaataattaatttttgagttaaaaaaatttgaacacctattcacccctttaggtatggactttgaatatacatatgattaatttttatttaaaattgttatgattttatttacaaatttatactatataaaaaataataaataaataaaattccttgaaaaagatgatttgtatatttttcaacaagtaatataatggaatttgaaaataagataattataattatttatatattatttttttgtagcataaaaatcttatttttaaaatttaattcaggatggatgtaaaattatggctttagggaagataaaataagttttatatattttttgtgcatcattaccatataaatgaaaactaacttagtgataaagccctcacgtgcctcacttttaatttaaatagccaattttttttatgctattaggggcatcgcgacattccaactgacaaactttggtggtaagtcaaaattcaaaatttcagcaagaatattggctaatattcccaatttgaaatttctgactttttaaaaccatgctgacaaccgtctacgctgtcatttatttctctgaggtcggtcttgaagctttcgataaccaaatttaattgaatcttgatttctttatttaaaagatacaaagaatggccaagaaatgtagatgagatatagacattggagcttagaaaaaaataatttttatagaaaattaggttggttaattaggaatagtgatacagtggatcagtgatggttcactttgtttcaatcccattttgtatatttatatttatttttattcttataagaaaatagacgagatattggtatttccctattaatttttatttttaaaatttaaattatgtgaaaaataaattatatttataaataaatattaaaatatatataatttatattttattagaaatatagaaaaatgaaaaaaaaaaaatacaactaaaatacatttattaggtggttggtgtgggggttccctccatgtgtccctctcaagcctaagacctcttcgtcgtctaggataaacatgtaacccatctaagatcatttcgtttaaaccaagataagttccgtctgacaccagaaatgataaagtttccttctcctgcaaggccagacgggattgacagcctaaacttgttggattcttaagcgggaagatcattccagtcaagtccttaggatctctagtatgtgtgataaatcacacctgacatttaggcgacagacgggaccctatttatacccacaagtcaatgtcaattaattattatatacaattcgcagactaaataaacagtcaactgcatggttcgagattctagcatgccagtaaatgacaccaattagtcgcccttatctaatataattgcttagctatcctatgggcaatcatcattaccataaaggctagagtacatagtcagcactacaataacggtgccatcagtcttatataaaccgcttaaaaaacatgaacaaggtacgcatgcacatatgctcattttctcttgcaaatagactctggttgacaggaaagaagtccgttttgtgtcggacactgttgaatggactccataagaagcacgaaaaagggaagaagttcgcctaccttcaatgaaattgaacggactagcttggttggctcgacaccaataggtgggattggctttgtcggtgctgagatgaacatgtaagttgcatatataatttcaagggttaaagaagtgggacaaaaaaaatctgacacggatataagtgaacaagatttattgtatttagcctgccctctaattcattgggactcctcagtatgtcacaaagaaattgagtattggatgaaaattcatcttcttttaataccaattgttgacgggcgccacccaaaagtcaatttgctcccaccttttttagcaagcaagttggtcgacatttctctcagtttccacttatactaaagggtcattttcatatattcctttattttttttcgttcatttgtacatgactcatccatgtagtcttctcccttgagctacaaccacatgtttaaattgaaaaataataataataataatttgtgccaaaccaaccacgagtaaataaatcaaacggcaaaagcagagggaaaatacaatcatttatgtgtctcaaatataggtattacctgaaatatttttttgtcttattatgattttatttcaatgctcacttggcatgggctgcatggacggatccataaaagtagtctacggcaggggtacggacccaagtctaatatgtaggtggtaccgtggtggattggtgcatacggagggcgggcggccgaactctcttttgtgattccggactctcttcctgaatcacaaacccgtaaaccacgtgatagttatttaatactctggctgcgcaccaaaggtcaacttagacctcagtcattttctaactacctgcgacttgccgttcccatcttttcctcttttcctttcttgtatatttcttctacattctgagatgcgaggaagaagttgaagctgcggcggcccaaatggctctctcctcactcttctcttctttctccttcatcctccttctgtatatcctttcatttcagaaatccaccgcccaga

SEQ ID NO: 13195 - DNA, 4308 bp, Vitis vinifera
  Intron number 5 from transcript GSVIVT01032593001 (locus G SVIVG01032593001) derived from phytozome v7.0 (chr-ID chr1 4; pos 28657409 to 28661716)
gaagataagctaaactcagtgttcagtgaacttgaaagcatagtaagcgatgtgggtagttctccaacttccttctcagagccaagaatggaagatgaagcattagaaatgtcagcagtgccatctagagaggagataaggcaagcacaagttgccctcaaggagtgtcttcttttagaattctctcagctcaagcaggcaagagtgagagccaagttcattttagctctctcaacgctgagcatcgcggaagggagtctttcacaagaacaaatggacgcaacccactattttctgtccaatttcaatgtcctaatgatgaagtttgatcgtgcagaaaggcagttggctgagtgcaacaacttcttgcgcgacaaaaatcgagcttatgatgaattgagggtgattaatgagtctaatcttgagctcaaagctcgtatagatcagcttaatgaagaggaagaagaacttttgagaaggattgaggagattagagggatgaaaaccaagctagcgaacaagaggatggaattgggtgaagagtccaagtctgcactctcaaaatggaatgagtttggatcgcttgaaccagcagctttgtcgaggcagaagaaatttgagaaaagaagacgtgagattcttgaagattggtccaatttgaaggcgttgtttgattgattaaattgcattttgtttgtatttttttttttttggttattatgaggtcatgtcaatgatttcattctccgaggcattttgtttgtaatttttttggtcatcatgaggccatgtgactgacttcattctgcgatggcctgaggtatattttggttattaaattattaagaaatatatttttaaatttttttattttgcataaaataaataagacccagaaaaaaaaaatcttagttttaaaaaatccacaaaaaataaatattgtaaaatatttaaggatgaaaaaaattatttaggaatatagtttattaattttttattattttaaaaaatatattttccctttttcttctctttaaatttttgtttgcttaatcaaatattgcataaaaaaaaaagtagtgagaattgtgttttaagatgaaatcaacctcaaaagtgataagagatccttatatcatgcacatttaagctcaagacataaatcaagtataaaaattaagttgaaagatattatccttcattaatccctaaaataccattcacccctatataggcatgtagtgattgtgaatttcaaattttttttttcccttttctattcctataacctatttctaatttcttactttttttttttttttcttccaatctatatttctattttatgtcaaataaaaagcaataagttttttttttttcatttttaaatatattgaatcattttactcttattataagtaaggataaaatttttgggatttttcatacaaatatctttttatctttttgtatttatcttttagtttcattttcatttttattttaaatttacattatccttttatttatatttttatcttattttttatatttttcatattaaaaaattgactatcacttcacttttattatatatgttagaaaaattaaggttaatccaacctatgataatcaccttaaataggggggagggaatagggtgatgatcaattatgtgaatgtaagagacaattatatgcaattatataataaacaatataaagacaattacatataaattaaaagagtaaggaagagagaatgcaaacacaagattttataatggttcggcgcaacccggcctacatccactctcttatagcttcaatcctaagcttgaggttccactaattcaagacttccaaaccaagccttcaagcaatacaattggattatggttccaattcaccctcttagacttttggctccaagcaccctttacacttctcaagagatatctcactcttaaacaacctctcaagtgataccacatacttgagaaacttcctctcaaagatttacaaataaatgatcttagaaaattctaatacaaaaactttaagctcaaatgatacaagaaaactaggattgaattgtacactaaagatatgcaagttttagaataatggtgcactaaaaaaacactcttccaatgttcaaatatattcaagaaaggtttgggaaggttaagttaataaaacaatgaagattgaagcatttttatagaaaaaaaagtcaaattagccgttgggagatcgatcggtcgagatgggggtcgaccggttgactagccgttagcatttaatgcttagcatgtgactgttggacctcaaccgaaccttaatcgaacttcaaccggttaaggttcaaccttgactgattgaacaactgttctagaagaaaaagaaagtttttttaatcatcgactagttgagctgggggttgactcggacctcgattgattgagctggcggtcgaccgattcctcgtacggttcaactagttgagccgtttttggctcaaaataaccagttttttcaacttaaaaccttttaaacaagttggaaaaacatttgatataaggttttagttgaaaacatgaaatcatccaatttttaaaatatttaaaacaaaataactcttggatgattttggtgcataagtaaataatgttatacatgaaaatcctagtgcaccaacaaccttacaaataatgtaatgcatgaaaatagtggaaagaaagaacattgctaaaactacaaaatgatgacaagaaaagaaaagttgttcaaaatgtacagtcttgtacacctctcatacaattaacatatttttcttgtacaattagtgtaataaccttgtaaaacgatataaatttcatacatatacataaattatgtgcatatgagtgtgtaaactatattcccaatggtttgacatttaaaataattaaaacaaataaaacattattttattttatttttaatgcaaaatgtaattaaaaataaggtaaagaaattacttaaaaactattatttaagtcaaatttatttatttatttccttttattcttggaaataaagaaaaaaaaataaaaaatttatttaaccataagaaatataaatataagataggttagaaaataccaaatttatttatttatttcattttatttttggaattaaagaaaataattaaaaaaaatatctaaccgtaaaaaatattaatataagatatgatagaaaataaaaataaccccaaatttatttacttatttcattttatttatttaaattcgaaagtaatttattttaatagatcaaaatgtgcacaattaatctattactttattaattatgattatattaaaattttctattacacaaaaaatagagaaaataaaattaaaaagagtaataaatatatataatttagttatttaattatttttcatgtaaaagatagttacacaaaaaacacataattgatcaattattttgtttaattgtaaacatattatatttttttattttttttattaaaataactaataaaaaataaaaatggataatcaattaatgaaatttaattctttttattatttttatataaaaaataaaaatcatattaccatatttttttagaaagtattttttaaaatagtttttgaatgtaattttttttatttataatttaaaatagaaaataatgatgattttcaattatttataaaaaaaagttttaaaaaataaaaaataaaattcaaataattaaaatagaattattcaacagtagtgcaattaaaaaaaaaaaaaaaacttatgtaaaagtgaattgatattttagttcattatcattttatattcttcaaatcaattagtggtgatgtttgcttgcatgtttggtcaattttgagcccatcctatcccaaaccacaattctccctcaaaaagtataagctaaaaagtggctcaggctgagcgccacaatttcgaagaatttcagacgtggaaaatgcactgatggccacgtgtaagcatgagattgacagatttggccccacgcatccaaaaccagaaaatccatgacatcgtggcgcggaaacgcaacggcttggctcttacattcatcatctttcatttggattcgtagacattagattaagatttggatcctgctttcagaaaacttttccttatctcatccaattcaaaagcgtttacctcgatcgatcaaatctttttgtggtttcgatatctgatatctgatggagttttttcggaacgcgaaaaccgtaaggctgaggag

SEQ ID NO: 13196 - DNA, 1601 bp, Vitis vinifera
  Intron number 2 from transcript GSVIVT01029882001 (locus G SVIVG01029882001) derived from phytozome v7.0 (chr-ID chr8 ; pos 915094 to 916694 reverse strand)
attggtaaatttcgagcattaccctgattatgctcctaattttttattttttatttttgtttacttgttgaatttcagatctgctgcattgcaatttgattagtgtcttagtaaatctttattagtaattgatttaaatccgggtttattcttgttctgttgtttgacttcttgtgaattttggtgattcaaggaaatgaaaatttgcttatcagtcaatgccattctcaatttttttttttttgttttcacgaattgatttttgttttgataccatttattttaatgttggtgatgccttggcatttggcgattccgttccttctatcaatgccaattttctgaattcactttgtttatgcaaggtctgatgatgaccactcatgggtgttccatgaaactaaaattgcatgataatttgctcaagttatgcaaatgtcttcacatttcaacggcatcaattaattccactgtgaagtttctgaaattttctccaattctgtctcttgcagtgagctcaatttatgctaataccaagtataaatattaatgggtgtttttttacgagttgtgtttgttctttagattttggttgtcttcatggtcatccacctcatgagctcaaagcaaaagatatttttagttgaaagttaatgttgagttatgcttgatttaatttttgggtaatttcaagctcttcaccatgcatatttagggtagggggttaccctgaactcaatttttagcatcattttggcaaagatgatgttgcatatctattatttcattcagttcccaagtggaactccaatcttatacaaaagtgtattctgctaaaatgcagatgtatgtacattcatttaattgactccataatagatacgccacttggtctcaaccttttccacaagtgaaacttttgatgattggttaatgatgttccttttgctagttctgattacttctttcggaattccttcacttttgtggataaacaactctctgagccaccacctataaacaattcaacaaccaaagcacatggcaacaaactgttaaatggcggatctacaaaggattgatgcttcttccagttgaccagtctgaataaaggggcattctctgcctggaaaattgataatctttccatttatatatatttagtaaaagtgtgaaaaaagaaaaagaaaatgctgcacatgaaatcacaaatagatggactgacagaagaaattttaattccaagagctggtatttgcatctccacccaattaagttagttcacacttctcggaatattgaatttgtttctgatggatgattatgaaaatgaagttcctgcatggctattttttcatctttgatgcacgagatgtttattcaacgcctagtggaggttttaaaataattttcatgctttactcatgatgtattgaagttcagcttaatggttattatcaaccagaagatttaattacggtatgatagcttgaagttggactagtatttagggattactctgtgtttctttgggtctgcctgattgatctttttatgtttgattaggcttcttactcctcctggaactcctctgtttcctt

SEQ ID NO: 13197 - DNA, 5452 bp, Vitis vinifera
  Intron number 1 from transcript GSVIVT01037226001 (locus G SVIVG01037226001) derived from phytozome v7.0 (chr-ID chr1 8; pos 27716012 to 27721463 reverse strand)
agccatgtaaatcaaaattgactaaattgaaagaaatctgatctagctccattcctttgtccataaaaaaagttgaatgtaagccaaagttattcttcaatacttagccaaactgaatgctcaggtaacatgaaatgtaaattaaagaaaatattgcaagatcatcataaagcttgcaagactaagaaaatccaacaataaaacaccaaacttagtgcaaagttttagatcctcaaaggttaaggctttgtttaggatttttttttttttaaaaaataattcttacaaaaccattattgaaaaaagttttcaaaaatagttggtctaatgttttctaaaataaaagtctatttagaaacttagaacgtttttaatatattttttgtatttccaaatatttcttaaaaataacttttatttttagttctttatttttcatcattctttatatttttaccattattttcttaaaacaaccctacaaaataaatgaaaacacttgaaagcaattaaaatatgttattaggagataccttattttcataacaagttctcaaaaaactataatatgtcaaaaagttaccaaacatggctttagtctagaaaataggtttctatttttaagaactggaaaattaattttaaaaataattcttaaataggctttaaatttcccattggaaagataaattgggtaaagaaggagaaccaaaaagccttagttaaccatagggcctaagagctagagaaaaacacgttttggattttgagagtggctactctagttgtatgacatagaacttagatcttccttgacttttggactcatagaaggagttggttgtatttgggaaaggtaaaagcaacaatgaacttagagtctttctccacgtttgaacctataaagggaagtttggttgtatttggggatggttggattacatataaccaacttgaaaccaaaaggtaccatagaaggtccaaatttacctatgctcaaggagttactatatattgagggattgaaagcaaacttaattaacgcaagttaaatttgtgattgtatgtgctttgttcattttactcaaaattagtgtctattcaaggatgtgtgttggtaagaaatagaattttttatattgtttgttatgcctttgtacgcctctctacttcttcctcatcatctagtgcacatagttgtaaaatgtgaaatttacatccaaagacatatagcattatatgatagtgcatttaaactctaatgatttgtctaggattacaaataaagaactaattaaagcaagtcccatttaggaaagcctaaaaatcctatttattctatctaggaaaatgaattcagatgagtgagagaaaaagacgattttctcttcttctaggatcttaaagatgttgcatgtggatttaatgggtcctatgagagtgcaatgcctaggaagaaagaagtacatcctaagattcaaagtgttatgctttcaaatgatgaataaaaatggattttcaataagaaataatagaggaaaggagtttataattctgacttctagagtttttgtgaggagaaggaaattaaagaagagctttcaacatctaaaacttcatagaaaaatgaagttattgaaacaaaaaataaagtgctctgagagatagcacatattatattgtatttcaagaacctatttggttatttgtgttaaaatatagcccttgcaagcaagacatgatgtaacaaatttaggcttgagtttccactaatttatctttgttcacattgatattgatttgagtatgcatgcatgcattagtggtattgtacatgactaaaatgcattaggagttacgcggaagatttaagtcatgggttccttgcaagatttatgatttgttcatggttggttgatggatttagacaatccatttgagattataatacactaccttctaattggagggatgacttgtcttagtcattgggatgaggtttttaaggtgagtgcatttgtatatatgattacacattagacaaaatttacaatgaatcatgacattagctattgaggtacacttgagatcctcttgctatcaactatgcaagtaaagaaggtattgaagaataagcaaatgacctacttggctatattaaaggaggaaaagaatgatacaataagggaactcattcacaaggtaattgaggtggtacttgaagagttctagtatgtgatgccactagaagtgacaattcatgttggtggatcatgttcacaatgtgtcaaagcaaagacacttgattaaataaatcaattcaaacatgacacaaaaataataattaggttaaaagaatgaactcgggcataacctaattattaaataagtaacatgtcatatagtccatttaataataatgtcctatttaataataatgtcaagttagatcttgtttaagttaatatgattaacttcccaatctgacatgtttatgacttaattaacctacttattcaaaatcaagttttaaatgagtcaaatgtgggttaaataggttatggttataatctagttaattaacatcattattacacaactcaatttaggtgaaatttgtattatgtagtttgactaaaaaaaacaacctatttattaaacaagttatttaggtttacacaaatttgacctaaacatgattatactcaacccaaacccactaaaaatgcctcaggttcaagtctggttgacaaattgtatcaaactttgccatccttagatgctattaaagttacataagaaactcacataaataagggaatgggagcacaaaattgacttagagccagaagctaagccccttgccataggggtcccataggatggcactgcctaatttagaagaactaaggaaacaacttacagagttgcttaacatgggatacatccaacaaactaaagcttcacatgtcacaccaatattattctaaaagaaacataatggatccctctgaatgtgtatcgattattgaagactcaacaaggtgaaagtgaaaaatatcttattctgcttgttaacaacttgtttgatcaacttagtaaaggaagggcttgacaaagttagatttgagattaggctactatcaagtcatgattgttcgaatggaacaaacctaaaactaggtgtccaatatggttcctataaatttcaatccttgttcaaatttcctttttccacaaactttcttgcaatacgaaattaccttttatttgaattatatatgcaccactctttctctaataaattaaaaaaataaactattaaataagtaatacttatatattaaataatttatccaaatactatacaaaatagtcattaattagagaaaaatagtttttttttattaaagtacaaaaaacatttgatattgctaaaggatgaaaaaataactatttgatatcttattttaaaatgtgagtttaataattctaatttgaaagatataaacgaaatttataaaaatctaagaacaacatataaattttaaagcatacataccattttaaaattttgtgataaaaactttatttattaatttaaaaattgtaatgaatacataaaataagaataaaaataatttacaaaaaaaaaaaagaaaaaaattgtttctcattcttgacattcataatttttttttacttttaatttttttttctcatttgtatagctattatagttgttttgacgattcatttactaagaattttgatttcccttatattttatttcaaataactagtacatttttctaaatattttattctttataatttttaaattacattttttttaattataatttttttttaaaaaaaaagaaggatgtaaataagtgttgataactttacaaagtttgttttgattttttttttttttgttaagtttttatttattttgataagagtataaaaaaataataatagtttataaattcaattaaaagtttattatacctccttaaacatcaattaattcatggaagagatgacgaatgtctcttcaaattgtgatgataaagttaaggatcataagtttaaataatgagaattatagtttaatataataattattaggaagttaaaatgtcctcacatgctttttttattcatggataaaatgaattaacctttctttagcaaattctgaaatttctagtgtgaatttccactaggatttgagggaatgttttagttcattagacgctccaccttgaaacttgcatggaaaaaagccaataagtgtgtgctacatgtatctcacctcatgggattaagagaaacatgaggagaaatttttctgtgagtttttaaaacttgagcgaactttgtcttcaagattttgagagttaagttgaagctacaattctaagatctatgaatctgtatggagaagaagctactgcaagtgaagaagagatctgcttattctactcactttcggtttcagtttccactcacttccagtttccagacttaatcttggcattcactttcatgttgattgattatccgtcatctaaaagggatattaagtagattcaggagcatagatcaaagaaagttaatactgggaatcaatttatcgaaaactgataacaaactctctcataaaaactcacataatggcagacccactggattttcattgaccttttgtgcaggatttgaaacacgagagcaattcaaatggagtatttctcgctgattctcactacaatgaccatggaatctgtattgttgttccgggaagcagtggaattcccaagtggataaggaatcagagagagggatatcagaccacaatggagcttcctctgaattgtaatgaaaatgatgacttcttgggaattgctatatgctttgtttatgctccacttgatgaatgtgaggacataccagaaaatgatttggcacatacatccgagaatgaatctggtgacgaagccctaaatgaatatgatgatttacttgaagctgaatcttcaatctccactgagttaaaatgtcaattgtcattgagtgaagtacatggattttcttccctacgtgtgcgacatctcagttttcgcactgcttgtaaatgctaccataatggaggtgtatcagaacaaatgtgggtgatattctatcccaaggctgctattctggagagctgtcacaccaatcgattcatgtgtcttgaggctctatttatgggctctcgcaatcattttaaggtggtcaagtgtgggctccaacctatatacgcccaagatccaatagtacagactggggatgtggatgctagctgcttggaatgtcagaggaacgtggaacaccgacggctttgtttaaagggtcagacaatcagcctactacccattgagcgtgcctctgaatttgatacctt

SEQ ID NO: 13198 - DNA, 21123 bp, Vitis vinifera
  Intron number 7 from transcript GSVIVT01038087001 (locus G SVIVG01038087001) derived from phytozome v7.0 (chr-ID chr1 9; pos 17853726 to 17874848 reverse strand)
atcatacagactttacctccaagacagaacaggtataggaagttcttatattgccttttcttttttctatcaagaagaatagttggttgctgttataaattttttgttcatctgtagtatacatatggttcttcttcaacaataataaatctaaaatggggaaaaaagaagaaattctggcactgctcaaagacatttttgaattttgtttttcttgcctctgttttctaatttgaaattgctttttggtttttccttactatagttatttagttcttgttcaatcttgtagatgaagatgacatttgtttgataattttgccttgacaagttatagaatatttgatccattggtagttgtgcaatgtgttttcttagaaaaagatgggattataaactaaaactcgcaacaagatgtttcagatagagtttaccttcaactttccttacttttgagagaataaaggtgaaaaatgctttactgttgggagtgcttttcactgctttatgattgtaagggaattatgtttgtttttagagcttttcttttatatatgaaattttctgttccttagctaggattatgatatgcttatgataaaagagtcttttctgcagaagttcactaaggagaatgggatgatgagttcagaaatttcaaaattgcatgggggtattccaatatgcaaaatgtgcctttatactcaaaatgactatttttcctttctaatttttttcccctggtggtcacaacttgaaaaatgccaagctgatgttgaagagaatgagctgttatccagaagtatgtataggcttgctcctaggatctttcatatacacacatccaagctcaagagagatgttcgaaagtattataagtttattgacctatatcttttgattcaaagcttgaatatatggagtttgtagttattatttcaaaataatgaaattagaatagaaaattgttacctagcatttataaaggtttctttccaaatggtggttgatcatgttgagctgtcccaatttttttggagagttgagcaaagtgagaggtgaaaatgagtttgtgagactaatagctcctccttgaagggtctctaccggagatttcagattttggacttgtgaaggggagagactcaattatagaagatttaaaatccagacaaaacatctagtccctgaccacaatattgtaccaaaataccaaacctaattacgtagcaactctagtcaagaaaaaccaaagaaggaattactatgacttttgcaatgtttcagttatcgttctcaaggtttgatttatggaaatggtcaaaactaggtcaaatgagttgcttttacctaaattcaaatgtgaaaacagtatatgatttggttttatgaaatagaattaaatcaagaaaactaatttaaaaattgagcaagtattgattcttaattcaaatgatttgagtaagggggctccataatccaacttcgagaatagaagttagagtgaacaagggtttctcaattgtggtaatcttatggtttttaggatccttggtcattcgagatcaacttgagtttcataactcaaagttgcatccaaaatctaatttccctttttaatttagattcctaaacaccaccaaatgaatgaaattaatttcaagttcaagccttggctcttttatcatttataccctttgtagctttgtagctttgtcttagagtagataacattggggaaaacagggataactagtgattaaggggtgttgggaatcgctagcatcaagtaatgcacttttgtatcatcttctaatatgactagagatctaaaacttcatgatttataacctcaaccattcattaatcttatttttatccttatttacccattgttttcttagttcctaatcctaggtttttatactttactccctaggatgcctttttagccttttatgggagtgttgtcacatgcacaatccatcatatatcaaaatgtcatgtatggaattaaaagaaactaaaaataatgtattaaatcaaagctaaaggaaacaagcccaacagttatcttcttttacaaaacttcaaagcttcaaagcttatctctaagatctctaaaaacctaaaactaagagagtttatatcttaaatgcataaacttattatgtggcacactctaattggtcatttattccaataaatcataaacaatctaaaaacttgagaaattacaagttctaaatgactcttgctcattttgaattggatggaggcatttggaacttattttgttgtatttcgaaagctaaaactcgatgtccagaccctgagttcaaaatggaagtgaattcgaaatcaattttgaacttataagtgataaaatcaggtgagttcgaaatccaagaggtgagttcgaaatttcttgcttattttgaactcatccactgcacatcgtgtttctccatgttttggagttcaaaatgtgctgcttttgttcgaaatagatatggagactcaaactaagccattgctaattgtatctttgcattcctttgagttctaagtggccggaaaaccatttagaacccaacttgtcaaatttgaactcatcatttctttctgcattgttcgcttcaaatgctcaaatcttcctcatttcagctttgattcgcaaactgtttagagtgttagattgctaacttttcgagctttgaaaccatatgtagcttgctcaaaatgatgtgctttagaattcacctcaaatttaggatttgtgctgttgccggatttcaagttccaaattccatttgaacttgattgcatttgcttcaaacctccgcttccatagtttcatctattttactccataacacccatttatcattttttgtgcccatgacttgctcattttgcccttgcttggactcttcatgcttctcaagtcttcagtctcccatttatgcatattttgccctttttattttaccttggttggaaatgacttgcaaaatagcatttttttcatcatttgaacttgagattaatctcaaaatagaagttagattgtggttagggtctaaggatcaatttgggttaagttggttgatttgaacttttcatactacataagttatagcatttatgtgccattggaacacttatttgagctccagtcagtccctcaaatccttcatggtgacccttatgcccatttgtagatcatttctttggatgggagccaactatgctaaaagcatcgtgagcaaaaaaatggtaccatatttactgctagtttgctctttttggtaagaattgcattgacagaaatacgtgttctatgatatggtcaacttttttttttcttcctcatttgaaacaggctagggtgttgtttgatccaatcatgtatcagtggaccttatctttagccaccaaattaaaatcttcatatcattctaagtacttgatggtgaggcaagttgtacacaaaatgttggtgcatccagtttatttgaccttcctatcttcataatgactgaggtaaagatgaaacatttggagacagtccttggaggtgtaccctcttgatgcaggagaataggacagtacaatcagcaagtgaagatagtgttctctcttttcggttgggccctttttcatcatatatgtcttgtgtgatatggtgatttagaggaaaaggaaacaacggagggatccgaatcggacctccaccgtggaaggcccctcgctactcacgtctcgtcaccacatttgttcagttgggtcaccaaagctgcagtgagggggtggttgggtgaagatacagaaataagttcccaatgtccccttagcaaattggagatgtggcataaactcatctgtagtcaccacacctaattcatcttatgacgtgaatgcttctatcctgatatggttaaaaaaactcctcttgacacttgcagtagatgagtatccatgtcttgatggtgttgagaagcttagttatccactccggaagcaaagcattttcatgtactcactaggttgccatgatgtcctattgtgagaaagggaactaagattctggggctccagaggtcaaatctttcttctgaaatgaccagtgatgtgattacccaagaacctatgaagccacttgttagttttggtgcaagaaaagttagcttcgaccacttgtgtctgggagcaaactgtggagatgggacagcatgtagcactcttattaattattctgcatagagtactgataccatagctacagcagttgaagggactgtggtaggtgtttcctttttgaattattaggagcagtggccattttgatagagcagtggtaacaatggcagagaattggcatcaggggcaagatcactagcattataactgcaatgagtggtaccaggctggaggagcagaaaatgtctattagggtggcagtaggaactaggactagatggtgtttgacaaggtggttgcaactataggtacttgtgctagttgtgggtgatattgttaataggtgagagggctgtgatgatgtgtcctctagagatgcacccatcttgttttatcatgatgattgtgtagcatatatttatgagtccatgtgcatcggtaggtatcatgtgcccatctttattgacatttatatagcatgttaaacagctctgcaacttaatggtgatggttggcattaatggatattggagtttctcattggttaatgaagatcctattatacaatagtatggatttttaactgattcaggtgtgtaatgcaagaatttggtgaataatattggctctagagtaaattaatttcctagtttacatttcatcattataatatttttgtgaaggtaaggggaagttctagatgtgtccaacttctgaagcatgcattatccatccaagatttcttgtgattttgtacagtcattgcagctaaaattataaaactaaatttggtgatagtggattttccactctgacctcctaattatcttggaggattgaagtgaaacatcattccctactttttaattctgttctcaagcctagagagtctattctacacaaggcagaataggctgatattgttgacctttgtaatatacaattaaatagcctttcaattttaggataagacattctagaaacagttctcattgctctgtgctggtttgcatatccttccattatcttcataagagttccatgtgtggtcaaagaaaaatggtaaacactgcagttgagctactatgattgaaggaagtcaagtattgtagttattaagacagacgtataattgaacctgaagatgagctaatgaaaattccaagtagttgattttgtgcaaagctggttcaagaaaaatatcagatccttcctttaaggcaagggattgtaccctttttgggtttttttattgaactgttgcatctgacttgtttctagggtttaaacaaaattttcatttgtataaggctgtgatttatggagagaataattgttgcattctgacaccaacacaaggtggtagagacatgattgtaattgtgcatgtgtaggctttttacatcaatgacatacatgacatagatttatgttttctgcattatgtatgcacacaaaagtaagcgaataaagtagtgaagaaagtggcaattgtaaaatttgttccatgacaataagatattggtgtaggacgaccttaagatggttgtctataattaaatagattggctagggctttaatcttttaggatttaaggagatgaatgaggaatggggaataaaaattatggcagtggggaaaagtaaaaattaaatatagggaaaaaagacaaagaagaacaagaagaagagatagaaatcatgaagtctcattaaggctttctaggaatctcgctcaaaagaaaaataatggactttcacctatggggaggcagggctttggagaaaaagctgcatttattgaattgacagattgtttgtagggataagagtaagggggcttgggcattagatgccttttttcctcttaataaggcactcctttgaaagagtagtaggagatgcttctaaaggagaaacatctgttggtcggacggttactctgttgaaggctacagtactcactgcattgctgagaaactaaaagccctcaagaaggatttgaaggattggaatagggaggtggtaggcaatgtctcgttcaatagagtagaggccttctcctgcctgcagtgttgggaggccaaggagaatgagaaccctcttactcctggggaggcggaggctaaaaagctggctgttgtggactacaagaaatgggcccttctggaagaaacttcttgaagacagaagtcaagagaaatctagttaagagaaggtgataaaaacaccaggtacttccacaaaatggccaatgctagggcaaggaggaacttcctgtctaaaattagagtgaatgaggtatctctctcttctattgatgaaatcaaaggaggagtttgcagagcctaccagtccctcctctcagaatttggggattggaggcctagtattaatggcctaaacttttaaggtgctgggggaaggcttggccaacagcctagaagtaatgttttctgaggaagaaatttttgcagccttgagtagctgctacggtgataaagccccaggcccatacggcttcacaatggccttttggttgttttgttgggatgttgttaaaccagatattttggggctctttagggagttttatctccatgggaccttttcgagaagcttaaattccacgttccttgtgctcattcctaaaaaggaaggagctgaagatctaaaagatttcagaccaatcagcctggtagggagtgtgtacaaattgcttgccaaggtccttgctaataggctgaaattggtgatgggggaggtgatttttgattctcagcaagctttcgtccaagggagacagattctagatgctattctaattgctagcgaggcctttgattctagattgaaagacaacacgccgggcctcctccttaagatggatattgagaagacatttgaccttgaagttgccaatatagcttccccttaaatactatttggaacttgaatttgtgacagcaagcccctagctacttcaagtaagtgtcttttttttttctttcagcttattttgtaaggttgtgatgaaacaagaagtttggtgaatgattccatttttatcaagattctttccaaggatgtttgaaaaataccctttctcattatcaattcccagaatacagatttaaattgaaactatgctggaatcattttatgaaagttttgaaagatcttggcagccttagttttttcttaaaggtacgcccaatttatacaaatatggtcatctatgaaagtaatgaacctcttagcacccgggacagttttcacaagagagtggcctcagaaatcactatgagaaagagatattgggctagattttgtttaaacctgaataggaaaatgagtgatggtgtttagaaagttcccaagtgttgcactaaaaaattgaaacactttctatttttgaataaagaaggaaacaacgtctttagataggtaaaacttggatgtcctaacctaagatgccacatttatttcattctcaatttgtagaactctcacattgaagtagtcaaggggctttttccacattttttggttcttcttctagaataaatagactgtccacctccttagcattgccaatcctcttgcttgtacatagttcctgaaattcactaggggttggaaaaaacttagacatgcaattcaagtcacgagtaaggttgctaatagaaatacaattacaagagaaggttaaaacatgtaaaactgaatttagtattaggtctttcgaaatacatatagaaccctttccaacaatagaagaaagagattcataaggattttttactttttgataacttgaacaaggaacatatgaaggaaacaatatttgatgaacctaccatatgatttgattttgttttgatgttatgcacaccaacatggaagttgcccatttgggctatattggcagaagaagaagaattaaaaggtactaaagttgtttctgattgccccatatcctgagcttttgaatggtcaacagcaacttgaaggcctcagctgttacctttgacacatccatttcctctacacatatccaatcttggtcttgatagagatccatctctttccaaagttgagttatcatgttgtagtaggcaatcacagcaaggttcccttgtttggtatcatgcattctgcactttaaatctatcaatgatgaaggctaataggttggtgacacacaacccagaaaagaggggggttttgttaccatgaggaaaaataaactgcatttccttcaagtcatgtgttgaaaattgcaacatatacagccggtttatttaacgaggagtaacaaaaatccaggttaaatgacgacaattaatgtaattgcagatgaggagaaagagcaattacaactaggaatatataatactaaagagctagaaaatcagttaggctaatttaggatgtaaatcagccttaaccaaggagaaagttcagcctttaattaaggaaaaaatctctatgcatgggctgtccactagcattgtttgttccatgtttctcaacataacctatgtagtaggttattaggacccttattcctttcctaaaatctataaaattttctaaacgaaatgagaacatactttatggaaatttcttgaacaaaatttctaataaagaagacttttagattctaaagactcaaaataaaaaatttaaaataaaaaaggatgatggtttttagttgatttaattgggaactgttagttgaaaagtttaattatggttttggattttctgttaacaagcctcttgctttgtacaagaattaatgcttgcttgcagtggttctgttcacttttatgtttgtgcttcatgtgattagttactctcactgataagaaggccatgattcttggtgctaattgctgagaaacaaaaggaattggtttttatgagagtacagatgtggaaaggagaaaaatgagacatggtgaactttaattaggaaaagtattataatgttgcaagcaagttggaatatgggaagaagactttgcatggtggaatggaagatgtttgagctcaagaagatggtgatgggaatatgagagtttaagatcttgtgttgtggaactacctaggagtaggagggggaggaggaggggtggggtgggggaggggtgtgtgtggtgttgaataggtagtcgtttattttagtccaaaaatctaatttataattttttacatgttctttgattaaacatatttgattaataagacaaagaacaatcaattccatactaaacccgcaatgtacatggaaaatcacttacaaagtttcctagaaacacttgaacctagttgctacctctctcaccagtcttacattgttcagtacctatagttactttcacctccgtgatgcagcacttctctgctctttagtgaacacttcaaagacttgagggaatgcgataaatcactgcaagcaaactcgaacaagttttgaattttgagagtgttaggaatgcgtagagataatgataataaaaaacagggcatagagttgccaaatagcacaaccaataggtgtatatataagcgaataaccttagttgactaggtggatattagaaatcaagtatcaactaaagtggatttggaaactcagagaaattggaaaaatttggaaactgggcaaatcaggcattgagtgcttgtttagggcgcttgagtgttccttcatattaaattctctatttactttgttatcgtatttttaaaggaaactaaagagcttcttggaataatagatagaagatgaaacatttcaatgaataccaaagtcttgtgattacttttaagaaaatgataataaatcaagtttccaacaaacataaatcaaaccataaacatggaattggatgaccctaggatcctaagaaatctgactccccctatatcaatgttcctagattaaagatatgacattgctttaaagaataaacaagaagtcccccccttaatttaagacctatactcaatgaagactactagcacgctaatagttaggtcttaagagagaaaaaccaacataagtagaaaaatcctgaggacgaaaatcaacatagcactaaggattaaagatgaaacactaagacaagaccgtaggttataaaataaaatgcgctattgagaagaagttccgaaagatttctttggagatgatatatcctaagagattctaaaggaatgaaattaaagcaaacaaggcctttaccttaaaagtgcagctaggttatcttttccaatgcaaatttgtctagtcttagggactaaagatgaatttaaagtaccaatatggagagcatgagtattttcatcctatgattagcttgggtgggagcttttgaaacccattgaatattgttttcttttcttattaaataggattttatctcttaatactttagatgcaaccacaaacttactaatttgcctatggagcacttcaaactttctaatgtgacacctatcactagtgcaatcattcccatgatgaaaagaatgtgtaaatggccctaggaggtgtttggataatagacattccctttttagcattaacaaagtttgtcttttcattattagaagtggtagactaatcaagataggcctctcctgttacccgaaaacttacccaaatttatccaattatttaataatttaatacttgatgtgttttattcatttttacaagccaagtcttttttttttttcaatctcaagggttaaaactttatttttattaattacagtgttatatttagcctctagaaactttgccttgttaaaaaattttcttttttcagattctaaggtaacaagctcattgagaaggttgacatttttagttttaagggattcattcacctttaaagcccaataatttacttttatgcttttagccttaatttttaggctttcttcaggaagggcttcataagcatcatgaatactattaaattcacattcagacccattatcagaatttacatcattcatatgattaaaactcagaattaatagaagcgaaaacaataaagttttcattttgatcatccttactttaacgagtattattcactttcacttgtcttggattcactctaagtagcttgcttgactttcttatttttcttagaactagcttttttctaatcagataattacttctggaaattatttattgcaagagtcaataactctttacttttatgatactcatgaaattctttttccaagaaggtagttttattagaaaccgacaattttccttcattaaagttatcaattacttcttattgcttttttttattcaaaggacaaagacaaggatcaaataatttttttttaattttttaatttttaattttttaaatatcttcctactttgataccaattgaagatttgagatcttgtatcatggaactatctagagggggggtttagggggtgggtgggtatgaataggtagtcttcttaattttaactcaaaaatctaattttaaaattttttacattatgttctttgattgaatatatttaattattaaaacaaagaacaatcagtcctatagtaaacatgcaatgaacccatggaaacctacctactgagtcccccaaaaactctacaaatttaaaaatcataggtcaattgatagcaagcaaattcactaattatgaaagatcaagtacacaaatttacctagacacaaatgttacctctcccatgagtcttgcactggccaatacttagacttatcttcatgtttgtgatgacctttgtgttctttagtgaacatctcaatgacttgataagatgtgatcaactcccctagccaacccaaacaagattttagctttgagagtgttgggaatgagtagagataatttcaataaactattaggtgtagagtctctaaatatcacaaccaatatgcattttttttttttttttgataagtaaaagatagaatatattaaaggcactagcaaattggtgcaacaaaatacccatgaagtatataataaaggccaaaaggtaagtaggaaagataaaaggaagaggaaataccaactaccctaacaagcaatcaaatccctacactttagagagaaagaaaaataaaaaacacccttgaagcacttttgtactcgtaacccccaaccaagctgagcaagaaccatccttgcaaaaaaggaacttacaccccattgctcctccctctctccctaattgagagaggaaagctattgtaattaacgaagcactctacttttcgaatttccctcccaacacgggaagacaaacgttttcctcttatcccttgagatcttcatctcacacccttttcttgcctccattttcctcaaaagggaactaatttcctcttcgatgttggaatgtaatttgggtttcaacgagaagtttagcagaaactcaagagcactttcaagtttctcttaaagaaacctcttggaggcaaaagtcttaggaggcttagctgaagaaagggacaaaaatacaaatttttttcacaaaatagccaatgcaaggcatataaggattctcattgggagaattaggataaatggagaatgggtaatagagaattcaaatattccaacaaagattgttcactactccaagttgctactgtcaaaactagtggggggagtggagactgaatataaatggcctgcttctcaattcgttaagcaatgagtagtttgtcaagctggaagaggcttccatggagaaagaggtcttttgagactcttatggacttgaatagggataaagccttgagatctgatggtttttccttggctttttggaaagattgttgggagttggtgaaggaggagattttatgcttttttagagagttttttttttttaaaggggcacctttgtgaaaagtttaaactccacctttgtggtgttgattctgaagaaaggcgaagttgaagattttaaggattttagacccataagccttgttggcagtttgtataaaatttagtcaatccttgctaataggttgaagaaaatgatgggaaaagtggggccaaattctcaaaattgagtttgtggaagggaaactttttttttttttttagataagtaaactcacatatttgagcaaaggcaaacccccaaaatcttccggggattttaaagggggaggaggcccccccaccaagggaccaaaaaccaaaaaaacccccccacccctcaagggggggttttccaccccagaaaccttttaagaaagggagactcccccccttttaaaatttttccccccccccacattttacaaaaaaaaaaatttttattttttggtaaagctaacccccccccccccccccccctaaatgctaatctattcatttccttccacaccgtccaaaaaataaataacggtatggatctccaaattctcttcctctttttgcccacaaaagaacccttccagctgataatcacctcctttacagtttttagaaagacccactgggctccaaacagactaagaaccatcccccacaacacactagccactgtacaatgaataagaagatgatttacattttcctcatcactaccacataaataacactggttaggaatctaccatcctctcttttgaagcctatcaatagtaagaaccctcccccaagtagcttcccatgcaaaaaacgctaacttggaaggaacgttccccacccaaatgccctttttgggaaacaaaggggtactatggctggtcaacagcccatacgcatccttgacgtcaaacttcccattttttcccccctggaagggaaacaaattttagatgtagtccttattgctaataaagccattgattcgagattgaggaatcatagaggggggattgtgtgtaaattagaaatagagaaaacccatgatcatgtaaattggagttttcttttggaggtgatgcaaaaaatgagctttggtcagaaatggattaagttgatttaggtttgcatttccatagccaaattttcagtcttggtaaatggggttcctcaaagttttttctagagtacagtggtttgtgataggaggacccccatccccttatcactttgtgttggttatggaggctttaagctctctcttgtgaagggtggtggaggatgctttcatctcagctacagggcaggaaagggaggtagaggagtagaaatttctcacctcctgtttacagatgatacacttcttttttatgatccctgtccagaccaacttacttatatggcttaggttttactttggtttgaggcttcctcagggctaaagattaacttgggcaagagtgagcttattccaataggggacatccctaatgtgaaggagttagctttggtgacaggttgtagagtaagaaaactgcccaccacctacttggcctacccctcggtgctccctttaaggcaaaagctatttaggatgtggtggagggaaggtttttaaaaagattggccttttggaaaaggtgatatctccccaaagaaggaagaatcaatttgttcaatagtaattcgtgcaacctaccaatttacttcatgtccccttttgttattcctaagttggtggctaagagattagagaaaatccaaagggatttcctttgggaaggaggagctttggagaaaaaccccatctagtgaattggtcgacaacttgcaaagctaaaaaaggggggccttggtattaaggatttatccactatcaataaagcttttttgggtaaatggtgttggagatttgcctcgtaaagggatatgctatggagaaaactcatagtgggaaagtttggtgaagaaccaggaggttggtgctctaaggaaaggggagaaggtcatggagatggcttgtggaagtcaattagaaaaggatgggcaatttttaaagccaaaacaagattcgaggtgtggaacgtaaaaagaatcaaattttgacatgatgtgtggtatggtgattacttttaaaggattcttttccttccttattcactgttgcaacttctaaggaggcatgggtggaagatattcgggaggtaggagggatggccacttggaacccttgcttctcaaggaattttcatgattgggagatggatgctgatcagaattttattctaaaacttaataagtttggtagaattagatgtgaggaggataaaatggtttggaaagccagcaagagtggggctctttatgaggtctatgatgcattggaagcaaagggtgaagtgacttccccctcaaagataatatggggttcttgggcacctattaaagtgagtttttttgcttgggaaataacttggggagggatcctaactatggaccaactcaagaggaggggatgggttttgacaagtttttgttgtatgtgcaaagatgcagatgaattggaaaactatcttttcatccactgtgggatagctagagagttatgacactttatcttttttttctttggcatcttgtgggttctccctttttctgttaaggatttgttaaaggaatggcatggtagctttgtgggcaagaaaagaaggaaggtttggagaacaactcctctttgccttagggacgatatggaaggaatgaaatcggagaacctttgaagggggggaacacactacccaagctctcaaggcttccctcacatctaatttatatacgtggtcttgagggtttcttctaacgtgactgttagagaggtctaggttctttgttagattttatacaatggttgtgctccaaatcttaaaagtagggttctagctactgtagctggttttttggttctcacttgtatacttatgatatattgtgttcaccacttaagtttgatatatctatatatatatatatactcctatttgccgatcaaaaaaaaaaaaaattgcttggttgagcatatgcagactagagttctctaatcttgatgaggctagagggacgtaaagcaagtgattgggctagtctatgtcagctaatttcatctttaattggtggagctatgaagaaaaaggacaatcattttcaagtaaaaggggaaaaaacgcagagcactatatatactctataaaaaaatgtggataaacaaatgtgctttggaaataggtataaggaataaagtttgtttaagaaaatgttgcagagattttgggcttgaggggttgagtttgcttactttgtgaacccactaaaaagaataagaataataaaaggggtggagagaggagaagagagagagagagagagagagagagagagagagagagagagagagagagagagttgccaactttttggggttgagaggtttggccttcttattttgttaacccaataaacaaataataataatgagagagagagaacactacagtggtatgacaaggcaaatgtcaccttcttgctttagaaggtgatcaaggaaggagaccatgtaatgggattgttacaatagagctaatatgaatgcatgccataattactaatgtgctttgggaatagggttcaaagttttttacaaagagttgttgcaaagattttgggaaaaatgatatgattcattgtgctttccaagatggttaggtggaggctagagcattgccttttcaattttttggtgtgaaagtgttcttctccaagataggttaaaggtagaaaccactctaaaccccgtaagtggctttggtgagtaacacactgggaaatcatgagaactgtttgtgtacgcatttatttgtctaactaattgatgttataaaatgtcatgtcttccctcttaaagtgttctgctttcttttagtgtaccaggtattttggtagttacatagataaggggaccatgcttaggggaggttgaagccctaaatggaaattatagatatggacttgcttatcattaattagttttgtagtgttagtgtttgatctcttttgtgggcgattttccacctccatgaggaattgattttcttgctttttatattattgatgtaaagttgctacggaggaagaatttcttatcctttgtatttaattacttcgtggaaatgcaatatttgtttctggtaaaaaaaaaaaaaagaaagaaagaaagttgatgtgcaaaaggttgggtaaaggcctgcaaagggcatggataagtcacttgatttttcctctcttcagaatagcagcagatgattatatgatttttcttctctagagttaggttaatgagatataagttcattctcgtagtatttgggtcaatctctggacttaaaattaacccttggcaagagtaccttcattacttgtttttaaggcaatggagtggccactgttctactaagggcttcccttggggtgaaagttctagggcatccaaattctggaacttggaattaaaatatagaaaggatctcttatagattaggtggtatgaagaaagcatatttgtccttaagtggaagaataatacttgtataattgtttgtctcgcatttccccccattttctctattatgtcttggaagtcccgtttaatttcacatccaggatcaacagaccagaaggatttcccatgatatgatctcaaacttctcttgaatctaatcttttggcaaaatcaattaaggtttgatcaatgggatggttttcatgagatcaatatcttaaaaccacatattctccaccttctgcctaacagtgtttggaatcatccaacctcccaaacaaccctttaaacaccaaagaagacttcaatctctatttaccaacttacaattatttattagcaaacttccttacctgccaatagagtaacaaattcatcataaaaaaaaaagcatgaaagttggggtcattacatgacaaccataaccttcttcggctttggatgtaagggctagagtagagagttctttggtggttgctttatgcccattattcttaattgattcagctagggagaaatgaccagagttttaaagatgtctgtagggtcactatgggagtcaacattctccctctcctctttttagcaattagttactacagcatgtcatgggtcctgatgcttatcatcattttggattgaagattagtatatcaaataggactgtggaggttctctaagagtagcctcctccaaagggctacctaagctcaaccatgatgatctttgctaaacaacctaagataatcagggatggaggtgtttcaaagatcatagataatatgcagtaagagccttcttgaagacctataggggtgggttttgatcattggggctgaaatccttatttcactataaggcctgtgttttctaaacttgtcagacttcaacaaccttatgataaaagaagactcattgttggtgttagcatgagtatttgttgaggagcataggcaagcaaaattagattagtgattggacaaatcgattcactttcttcaggctttgaaatgcttcttcctttgtatccataggttggccaacaacattgttttgatcttttgactaagcaaggatcttatcatttagagccttttgtaaaggatttttgccacattgagtttgtagctcttgtttgaatgtgctttcctctccttatccatatttggttttaatgtagttcaatgttgttcgcactcactccctcgctcccttgctccctctctatttatttatttattggtggcggtgggggggaaggcaactcattcatcttgtgctgttgtattcctatgaaatcaattgtttgctttccattacaaagaaattccaaaggtattaatgtagtgcaattctaaggtagcttagcttaaaatcaaataatggtgggtcagggtttcattcataggatttatggttaggaatgaagaaatggtttatggcatcacacaagaaaataaaagcaaaaggacaagaaaaaaaaaaagcaaaagaaaagaaaagaaggagaaataaatattaaagttttagtgaggctctatgagttttagttggaagagaaatgacgaaatctcaccattaacaagaagaaataaataaataaatcctgggattctatcaaggcttttcaggagtctcaactagaagagaaaaggagcgtaagcattaaatattgcaatttgaaaaaagtattctcatgcattatttttgcatttacaaaaattattattattcataattatttttctctttatagtaataaactatttataggcttttgaaaatcctaaaaaatttaaatgagatggtaatctattaggcctaattcttttcctaaaatccattaatttttgtttttagatttggaattgaaaatagaaactaattaaagaataaaatcttttggaagatggaaaaatttttggaaaataatttcgaaaaattttataaagtagatgctattagaaagtagaaaatttaagaaaatcatttttgttttgaaaaatagaaggctaataagaatttatagtaaagaaacaatttcaaattttttatataacttgaactatcaagcagtactaactttaatcctaaaaaacccatatctacaaatttactgagatgcccctttcctttttgtaaataaatgttgaaagagtttaaccccttgaagtattggtgcattactgcatgagatcaggcatctaaaacaatgcctccaggtttgtatttgtaaagaagcaaatccaaaacaagctataactttaaatgaaaagaatcgaaggccataatgataaatttcaaaatcagattgagaaggttctcttgatcaattgagttggcactgttgatcaaaaaacattctgattgagcaagtgcctcaatcaatcaaagaggaaatttcacttttgatcagttgatgcagtccttggatcaattggatggctagaatttcttttcttaagctctgatttttgcaacagttttggtgattaaaaccaaatttgagaacatgcaaaaatcatttttgagatttttcaagattgaaagtagattaagttagggtgagctgatgtaattgaaaacacgatgaggatgaatctccaagatatatatcaagaaaggggattagtattagttttaattaaattatgattaaaacatgatatgataagggcgcacacagtaactcctagagccttaagttgtggagtgaatgactggaatttgaattagagatataaacttgcaatccattttggagtggaattgccagcacaatattttatgacacaaaatcttaatagaattgattctttttccaagtcaaataagcaacattgaaacaaactctgataaaattctaaatctggtaccagaattggtcataaaaatggtaagagagggactgtctattatgttgagcagttgattgtggagtgttcttgtgttgggattctagcttcatgttctgtgtagtgcctagtgctgaatgctaattctgttatgcaatggtgctaatttgaagaacctcattttttagcatcacatacctctttggctgagaattcatgcagtggggaaaatttattgaagatttgttttttgaatgttcggtaccattcctaagcatctgccaatagttccaaagaaataaatacatctgttcattgatttcttctttttttttcttccttttttaattacaaattttttgtacaacgatcaaatttctcttgttctggccatgaagtgaaatttagcttacagctccaaagttctattgatttggctctgtttttaacaagtcaattagatgtgcttattgatttgcttggtatgccacagcattataactaatttgattgtaaatgcaggg

SEQ ID NO: 13199 - DNA, 17716 bp, Vitis vinifera
  Intron number 17 from transcript GSVIVT01031064001 (locus GSVIVG01031064001) derived from phytozome v7.0 (chr-ID chr 14; pos 21675664 to 21693379 reverse strand)
cgaactggagatttgagttccagcatgtaaagaaattatcaatcatatataacctataatgtgtgtggggttattctctagcactagcatgctgtatattctgagttgtaggatttgcttttgttttttcttgtcttcatatatataaggttgtgatcttaattaagaaccatgagttggttcatagttttcttatgacagaaccccgacaaccttgctagagacaagttatagttaataaaattatatctctaaaacattttaagatttaggaaaagcagcaagaggaagtttagtttttttccatccctagattagttatactttaggatagtcattctaattattaacttagaaataaacagagtttagccatagggttaggttatatactaagaaaaaaaaatctactttcatgcttcaaatctagacaagatttatcattcagttgttctctatattaaatgaactagttgtttctatcaataatttcaattcaattgtatcataaaaatttcactaatattttaaatgaaatgtgagatttaagagggtgtttattgttattattaaatcagaaacaactatattttcattaaaaatgaatgtatgagagaatgatgagaaatccttcactacaagaagggattgtgggtttggatgacgaggaacaagaagggatttttactcctgaactagcagtaaggaggaccttaagcaagagggaattggaagggaagttcttaaaggaagaggtgtcttggaggcaagaatctagggtcaaatggataagagaaggggattgcaattctaaattttttcatagggtggccaatgacaggtggaatgggaagttcattaagtccttgatgtcagaagatgggatagtcttaaataacattgaaagcattttagaggagattaagtgccattttgggaagttattctccaagcctttaagaggttcttagaggattgaaggtttggattggtctcctatctcaacaaagagtgccgagtggttggatcaccattttttagaaaaggagattcataatgctgtgttgcatttaaataaggaaaaggctcccgggttagatggattcacaattgggttttatcagcagtgttgggagacgatcaaggaggatctttgaagagtatccttagagtttcacaataatgggataattagtcaaagcacaaacgctaccttcattgctctagtgtcaaaaaagagtcaaacaagtaggatctttgattacagacccatcagtttggttactagtttgtacaggattataaccaaagtattatcaaggtgattgcataaagtccttcaagacacaaggcgcttttgttgaggggaggcagatttggatgctgttttgattgttaatggggtgttggatgagaaagggagatcaagagagaaaggggtagtatttaaaatcgattttgaaaaggcttatgatcatgtagattgggattttttttttttgataagtaaaaaggaagtatattaataaaaaaaaggaaacatcaaaaaccagtgccctcaaagtatacagggagtatacacaccaccttcccttactaagagtctatccagtttaaaaaacttacaagagaagaagggctcaaaactaaggaaaccttgacccaagaccaaagattacatacaaaagaatatttcaatctttgaagcgaaaactccttattcccgaaagctaatctattcctctccttccagactgaccataataaacataaaggagccatttgccaagcccttttgcgccttttccccacaaacactccattccatccaagaaaagtttccttcattgtacacgaaagagtccaagacaccaaaaagggagaaaagaaggttccacaagacccgtgtgttaacatagtgaagtaagaggtgatccatcgtttctacttcagatagacaaagaaagcacttgtttgctaaagaaaactccctcctttgaagttgctccaaagttaagactttaccccaagatgcctcccaagaaaagaaagttacctttggaggcactcttatcctccaaatacttttgctagggaacatagaagaacccccacgctccaaaatagaacaaagagacttaattgagaaagttccatcatttgaagctgtccagatcactctatcttcctcctccctttgtacccgaaagacttggatcttatgcaacaaaagctccaccatctcgatctcccaatcattaaacacccttgcaaagagaggagtccagccatccccatctccagcagggtaccaaacctccgaaacccaaacattcttaaacaaggagatggagaaaagagaggagaaggactcacaaagtggctcatctccacaccacttgtccgtccagaatctcactctctgcccactacccacatggtaggctaacctactatctaaaagcgaccacttcttcttaattgctttccacaacccaacaccgtttctcctatttacttctcgagtgtgccatcccccctcctcttcgccatacttgtgacttatgacacacccccaaaatacctctctttcatttgcatactgccaattccacttacacaagagagcactattcatcagagctaaatttcacacacctaacccacctttctttttatccaagcaaaccaagttccacctgacaaggtgtggcttttggacgagagctcccccaccccacagaaaatccctctgaatcttctccaatctcaacctcacttttcttggcaaatagaatagagacataaagtatataggcatgctagaaagagtgcttcggattagggtgagtctccctcttttagatatatactgcctcgtccacatagcaagccttttacgaaaacgctcttcaaccccatcccacacaaccattgaattgaaaggtgcccttaaaggcaaacccagataataggaagggagcccacccactttacaactcaattccaagtccaaaccctctatatcattcaccctacccaccggggtcaactcactcttctctaagttgatcttcaaccctgaacacacctcaaaccacatgagaagccaacttagataagtcatctgatctaaagactcctcacaaaatccaacgtgtcatccgtgaataacaaatgcgagatttgaactccctcaccactcctacctctcaccctccacccagataagaagcccccactaatagcccttctcaacatacaactaaaaaccgccatagctatcataaacaaataaggggagagaggatctccttgtctcaaccctctcaaactttggaaaaaaccggaaggagaaccattaattaaaacagaaaatttcacagtaaagatgcactaatctatccactttatccatctctctccaaaacccatttttttaagaactgccaacaaaaagctccaactaacatgatcataagccttctctatatccagcttacataacacacctccaacattgtctttcagcgttgagtccacaacctcgtttgcaatcaaagctgcatccataatctgcttaccctcaacaaaagcattttgggactccaagatcacttaccccatcacctttttaattctattagcgaacaccttggccaacaacttgtagaggctgcctacaaggctaattggtctgaagtctttcagatcttctgcacctcccttctttggaactaaaaccaagaaagttgcattcagagatttaacaaatctgcccctctcatggaattctctgaaaaaacccatgatctcaattttcactacgtcccaacaaaatagccaaaaagccatggtaaatccatcagaatcgggagccttgtccttgcctagatttgaaaatgctgaaaacacctcttcttccgaaaaaggaatctccagcccctcgacctcattgctagctaacctcatgaaagacaacccctcaacacaaggacgccactccccttcttcagaatacaacttttgaaacgcccccaccacactattctttaaatcattctcctccgaatgccaacatccattcactttcaacttggacaaccaatttcttttgctatgggcattcgccatcctgtgaaagaatctgatgttattgcccccctccttcaaccacagttccctagacttttgtctccaagaaatttcttccctcaacactcaagtcttataagactccttagcctcctttcttgcttcacaatcttccagactcagagttgaatgtttctccaattcatcccagtgctccacttgtctgagagcttcactctttttagtgtcaattaaaccaaaaacttctttattccaattctttaaaatatcttttaaggctctcagttttgcatccaaaacaaagttgaaagaccctatataaaataaactcccccaccacttcttcatctgatccttgaaccccctttcttccagccacatgctctcaaatctgaacggtgaaggacctctcttcaaacctccaccttctaggaggatgggaaagtgatcagagactggtctaggaaggatcccctgcacgaccccattgaacatactgtcgcaattatctgtcgctaaaaacttgtcaagcctagactgggattggttatttaactcgcctcgccatgtaaaaggacccccctgtaaagggcagtcccttagctccaaatcctccaccacttctgaaaatctcctcattgaagtagaaagcccaccccccctactacgctcctctggatatttgaccatattgaaatctccccccatacaccaggggtctctccataaaccttttattgacctaagctcctcctagaaatcctctctatccttacttcacaccggcccatacactccagtgaacacccacatcagcccattcacacaattcttaaaccgacatgatactgaaaacatcccttcttccacctccaacaattcaaccaatctgttgtcccagaacactagaacacttcccgttgcccccctagaattgattgctctctagtctagatgccttcccactcctagactacggacaagccccgttctcatttccttgattttagtttcttgcaggcaaaccacatccactttattggattttatgactgacttaataagttttctcttatcactgtcgtttgcccctttgacattccatgataaaatccttatcttcatttaaaccccgatccagaagcccctccagatgtgcctgtagccaccctagctcttttataacttactgtccactccatcttctttaattccctgctggattttgaagccgcagacttcgtctttctatacgccccgtcttagctcttttgttcaattctccccttcattctcctcaaaaggtacaaaatttcctcctcgaacccttctgtcggcataccctgacaacggctgaactttgcaaggtagttggaacaccatccttcatctctctcctcctcttccatctgaagggccatcctttccattaatggattgtcaaaacccgattcaaatgggataatagctagcttagacacacttgcaccgccaagcgtagcccgcagagacttgttctgcccttcatgggctgaaaaatcttccatcaactcattacacaacggaaccctactcctcgccccttccgctgacccaaacaacccactggaagccccctccgtccccatctcaactacatcgggccccaagaaaggagtagaaaaagaagaaacctcaggccccaaagagagaagagagagtttgtggctaaggggatacttggatgcttcatccaatagcgcctcatcggtgagcttcagacgactaagagacgaacccccgacatcggcaccttccacagctaggagctcctgctccagcctcgcagagtccccgacgatctcagagggagccctagaaaggaagggctccctaaaaagactcggttgggcctcagggatcaaaggcctaagaggcctgtttgaaacctttccccagcccaaaaccatatgacttaaggaggaaaggcccttggtcccgctcgttgcacctcttaaattcgtctcacttgccccttttaaagcctcccagcaaacagacttgggcctaggtccactcgttgaagagcccgttgcaggagctagagccggcctaccccctacaccgtctgcagtcctttgtcttctgccacactccacttgcacatttgaccccctgttttgaatttcaaaatgaagctcatgtacactagctccaacgcgtgtaccacccccactttcatccctaacctcacaccattttctcttctgtagccaggaacttagctctacttgagacacccacggggaagcttctcaccacaagctaagctcccaactagtatttctagccaccacctgcagagaccctggccatttcttccctgaagctttaaccaaaatccgagcccactgcaactgggaaaagaaaatagtttcctcatccacaactacaaaccccccacaacactctccaattctcttaaaaacctctctactccaaagatgaagaggaagtcctacaaccctcacccaaacttccttagcatggctctctttccaagcacaccccacttccggtccccacctttgcaggagaaactctctattcttgaatcatttgctccctcttaaaaacaccatatcagcttcccatttattttaaaactcaaataacacaagggccccacccagcctggaaattcttaaatcccctttaagcaaccaactttcaaccgcccacctcttcaaggaaggcagaggaggaacgaactcaagactaccaccaaaacagccaaccagacaatgccctagctgctcctccctgcaaagcagttcccggtcccctaggtgcacccttaaggaatcccctgactctcctgtatttcttttcactacttctgcaaacgaacctgactctttctctaaacctttgacactactccccactttatcagaggttggaacagtcgggaagttattcctcacagctagagtggagaccccaagagcccttaacttcttagccaacagtaaccaaccccctaccaaaccttttccttctggagtggatctagtgttggatagatggaaaaaagcttttttgtccttaggaggcaaaatcatcctaattcagttttttttttgcacattcttagctattttctctctttttccaagattctagcttcaatagctttgaaaattgagaaattacaaatagattttctatggttggggtctggggagggtaaaagggattacctggttagttgggacatagtgtgtagatctaagaagtttggtgggttagggttcgggaaaattactgtaaggaaccacactttattaaggaagtgactttgaaggtaccattaggaaagttttgccctttggcatcagtttatcttgaatatctatgggacacatcctattggatgagatgccaacaatatagtcaattggttacatcattgcccctggaaggccattgaacatattttccaagtttttttctacccactttctttgcagttggtgatgggaccaaaattcgtttctgggaagatttgtggtggggggagcaattgttatgcttacaatttccaagacttttcagagtcaccacaactaaaagcctttgcatttcagccatatttggtaatgatactagttcttgagatcttattttacaccacaacctaatggatgtggagattaaggatcttgaaagactaatgtctttacttttccatgtgcatttgacttctactctagatatgaaagcttgggttccgtcctcttcaagagttttctcaataaaatattttcttttagcctaatccaatttctcagattctactcctttctatctggctaactttttgtggaaatcaagagtctcgtctaggtcatggccttcgcttggttagtgacacataagaaggtaaatactaatgacatgctatagttaagaagacttttcaaaacctttagccctaattggtgtatcctttgtaggagtagtgagatggttgatcatctcttcttacattgtttgattactttggaattgtggcataagattttctcacaggtggggatggcgtgggtttagccaggcaatattcgtgatattatggtgatttaattcaagtgttttagaaactctattaaaggcaagactctttggaggatcgcgtatctctttttgttgtggatcgtgtggagagagaggaatgcaatgatttttaaggacacttggaagacactagagatgatgtgggatgcatttcatttctttgtttctttttgggcttactgtacaaacatttttaattagaagtacgttagctagcttgccaatctactttatgtctctattctagatgccgaggttagtttgtttaaggttggtaaaaattcaaagagattttctatggggaggtgggaccttagagagtaagcctcatttagtaaagtggactattgtttgtttaacacctttatgctttttttggacaatatggaaagagaaatagaagatcctttgagaatgtggagctcttttttcaaaggctgaaaaaccttgtatatgtgtaacttgttaacttggaccaaattgtttataggtgaaagtttgatgtctataattgattttattgatttgttgagtttggtttgagggaagaagtattttttgttttcctttccctttttttggtgtttctcaatacaatttctattcacttataaaaaaaataaaataaaattcctaaacctcctaaccaatggccttctaagggtaacaatgtgaccatctaactaaaatgtttgcatcttaaccatttggatgtgttccatagatgcttaagataacatggtgtcataaaacgatattttccttaggaaaccttcatagtcacttctttaagtgggtcttattcctcaaagaaatgctctcaacttggatccaattgataagatgatctctctttccctccttgtaccttgaccaaacgaaattcctttgcattttctcaattgtattgccactaaggatagaatcttgtacatcaaaaggaagtaactaggaatgtgaaacaaagttgttcttccactcaatgacaaaaaagtttttttttttctatttgtttagtctctttgaaattctatctatgaccggatcttagaagacacttgtcttaggatttccttgtaaaggaagagacctaaataggttaaaggccaatatgaaactttacattgtaccaacgaagccaattgaacaatttgatcccgactcactaaatttcctagcaatgtgctattgtctatattgattttaagtcttgaaatgcgcctaaaaatcagtaggataagcttatattttgcaactctttttctttggcattagcaaagaatgtgtcatttgtaaactacaaatgagtcaccttaattctgtttcccctcactagaaagctttttgggacagtctaatcaagttgcactcttttttgaaatgggagataatctagttcttttagtctcaaataatccccaggggacttagcatataattttttgaaaaaactcactatctcttccaagttactctccaatgaccctcttccctttaaaagcgattcctctaactctcctttcgttaagagtcttgaaaggtagaaaccttggagacattcctgttttgctcattggcatcattggtgactatatctctaagaatattctttttcctctcctataagagttggaatgtagccttatttgattctttcaacttaatttgacatattgtaaccttttcatgtacttatgaccttcccacccttcaatatgaaactctttctaccatgagctaaaactagccttaaagttagggggaaacaaccacatgtttaccaaactaaatggagttagtccccatttgaacaggtttgtgtctaagacaattgggcaatggtcataaaatttgcttctagtcattcgaaaataaaaacctatctaacctcttacaaacaagggattcttgtaaattagaccaagtaaataaagcatttttgagtgggggatcgatcaactaacttgctttctttgatgaaactatcaaaatctctcatgcaaggggttaatcttgaatcacctatttctctgagattctcttaatggcattgaagtccagtccccctctacacaccaatatggatatgtcaaaccaaaaaggtccaaaagttcttccagagagaggaaatgttggggctataaaccgaggttagccaaaaatcttcttctacagttgaagctagcttaatcgaaaccaaagaggatcttagcactgagtctaaataggtatatttgcttgagtctcatattattatgatccttcccaaagacccatatgtcgataaagtgactcactctttgtttctggttgtccacacactagccacaaatctcttatcacacttttctctctttgttttgtgaaacatgacaatgcatggagattcatgttagagaaaaatcttcattgctctcattttctttctagactccaagcctttgatgttccaacttatgattctcataccaacattaatggtgagctaggctttcttagttttttgataggtaaaaatatttttattaaaagtgcccaaaagtatatatgatgtatacaaggccaaaaaaaggagggatacacaaaaactaacttcctcgcctcacttatttatttattttgatagataattcccttgcctcatttataacctaaccaattaatgaaatcaaatgataataaagtggtagaccctaaatgtaccttgatccactccaagaacatgtacaaaaaggattgtaaaatagcatggtccgtaagattagaatcttcaatgacccttcggtttctctccttccataaagttttaaagaagcacaaaggagttacttttcatgctttcttttcttccctacatagcccccctattagctaaggagggcatccttgattgagaaaggtattccgtagttgagacctcttttgttctgagtcaactcacaaactcctttgccatattttattttattttatttttattagaaataaaatgtatattgataataataaagttgaaaagaaggatgagaggtccttcctacaaagtaaaaaactcgatcaaagtaagattatattcctccagtacaaggagaagtaccaataaaagcatgtacaaaatatctcaaaaaccaaaaatttttctcaaaagttatccaccccttttgaattacaaattgaaagccaactaagtagaataacattaagttgaattcctctaaaagtgacagtacaagaagcccaaaaagaggagtagaaacgaataagatcccataacatcccttttgttttgcacttttcctagaaaatcttagcatttctctctttgccacacaatccacaatacaataatgcatgcgatatgccaaagagtcttacctttgattgaatttcccaagcctctaagtgaaataattatcatatctccgatactccttggtggaatccaattcatattagccacattgaagagcttatgccaaagccccgatgttattgggtaatgtagaaaaagatgttcagttgattctttactcactttgcataaaatgcactaataaggactaagagattcggagggtcttctcacttggagtatgttaatggtatttaccttcttgtgcaccaccaaccatgtaaaggtcttgacctttgaaggaacttttaatttccaaacaaaattagcttgaaggaaccaaattggattagagggcttggacaagaccgtgaaaaaagattttactaagaatgaatcagtggaggatagggaccaaactcttgagtctatggtagaagaagacaagtgcattgaattaagtgaagacatgagtcttttgagaagttcaatttctaaatcagtgaaattgtgtcggaaattaagattccaagaagacgggtaggaatttctaaggatgcttgagatggtaagatttcttacttaaagacctatatattgtgagcataaaggttcatctctccaacgtaaatcttcctagaatcagattctctccccattccctacaacaaaataagtgtatgggaaaaagttttgaaagacttaagcaatagctttccaaggatatctgtgtgaccatctagccaaaatattggcgtcccatccattaatatgtgtctcataattgcttgaaatcatctaatgccataaaccacaactttgcctagggaacctccaaagccacttacctaaaagagcatgatttctcaaggaagtctttcctatccccaacactctaaactcgtttggtctacacactacatcccaatagataagatgatctttcttcccctccttagtcctagaccataaaaaattcctttgcattttctcgatctttaaggcttttgatgttgggatcttgaaaagagagtggaaatagctaaggatgtgagacaaataagattgagttaaggttatccttcccccaaagacaagaaagccttcttccacccatccaacctcctcaaaattcaattaaccactaggtcctaaaatcctattgtctttggattccctcctaaaggaagacctaataagacagtggccactctgaaattctataatcgaaaatcgataccaaattggaagtcaactcttggttgacattaatgccgtacatagtgctcttcactaaatttattttcaaccttgataattgcacaaaaaccaaaagaattagcttgaggttttactaaatttctagagaaactttagaaaagaaaaatgatgtcatttgcaaattgtaaaagagacactctagtcctacctttaccaactatgaaacccttaagttgacctctctccttcactttggtcatcatcttactaaagacatttgctacaacggtaaaagggaaaggagaaagagggagtctccttgtcttaattctctagtggacttaacccaacctttggcacttccattaactaagattgcaaaactcgttaaagacaagcatcccttcattcaagatctccattttgtgctaaaacctttcctttcaaccacatggtcttaaaatccccaatccacatgatcgtaagccttttcaaagtcaattttgaagaccatcccttcatcccttgacctctttttctcatccaccactttgttagcaatcatcattgcatctagaatttgtcttccctcaacgaaggctccttgagatagataaattgtttcattaagcactcttctcaagcgccctgataagaccttagctataatcttatataaatttgtaaccaagctaataggtcctttgccatcttcttcttcttctctgactattgttactgaagctgtaaatcccacattccatctaaatttttcataatcactagaatcacaaccttctccttcacctccacttttagatgaatccagtaaagataactttaatgagcgccaatcaatctttgataccttgcctcaactgttgatcagatgcatcaagtatttcatagtccacatataaaaagatattcctttaacccatatccaattccacccctttcagagggaacacaaaatctccatgtttacttgaggtgaccatttggacccttgaatctttacccctttatgaacataaaacaaatttcttctcatgaaggaattttgctttatcaatggagtctacaaagaaaacaccttgagacctaacaatgtgagaaatgaatattattgctacgccagggtctttcccacctcaaatataatcaccttttcttttgggtattcacaaaccattgcccttgcccatctacctatggtaatttctcctcgttttattagtcctccctcagccataattttggcataactcggttgtttggacttcacctaaactctttggattgacatttgcttcttttaatccccataaaacctttaactaatctcgaggcttgtacaaagacacaatggaatcctttagtttttcccatccactaccatttgaaccttttagtgttactacaaagtttgtttttcatcttgttgcgaattttgaaatacgtaggaatctacccttggcatttgacatcacttctaggtaatgcactctcaactttcctctaaatttgcgattaaaacctataaaattgagcaattccatagcaatttgatttaaatttgtgatctaaagctagagttgtttgttttttaacttaccatttttttctaaggcaattttgtctcaatggaaagattattttttttattattattgttattattgtttttaactttttatcttaatggaaaaagtaactttttctcttttcaacttttaattttattacaatattgaaatccaatttctcatacaaaataaaaccaaaataatttttgaaaattttggataaatcgtgtcgtaaaaaaataaaataatataaaataacttcattttatgcaatttggatgataaatgaaattattataaattaaccaaattgttataaaaaagtaaatataactataatagctttccttttgttcattttttcttttgtttcttaagaagattttgatataaatttttttaatgaattgttacttaaaaacaaagaaaaaaatataacatcatttacttaggataagaaattaatctaaaataaatccacaagagttccaagattgaaagtaaaattctaccacatgccaccattattgactcataactcatccaattctcaataaaaaataaattccttaaatttgtatagattccttgttaaaaaaatgaaaataataacactaaaatcattttgaaatgattactacaaatttttaaaacgtaaaatcttatcgtccaacaaaattcaaataaactatcatcaatttcaatgatttttttaatgaaaactctaaaaaattattcacgatcatctaaatatccactaaaatcaacaattcaaattaattttgaaaaataaagagtttggatttggtgctctttcctaaattggaaatcgaaaaattagtgaattaatctcaataatgggacatacatttcaatcatgaattctagtcaattaaacttaacttgtaaatttttttaacattttcttagcaatcgagtatgatgaaaaaccctaattactaaccaattatcaattttttaaataattagctaattaatcattataaagtttttattgttgtgataaattatggtattttgggacatttggaaatatgttgaattattagttctctaatattttttttcttaaaaatataaactaagaagaaacatagtaattaatcttatgaatatttttaacgtgtaaaagtaaataggtttaatagtaaccagtattaagatattaataaaacaaacaacttaacacttaacaacatttggatagcagtaaaagaaaacaacctaaacacttaatgacattcatctctatttagatttagatcaaatttaggtcatttcggatttcaaatgacaaaacaaacactacctaagtcttttacttgaaaaatagggtttcacgggaatatatctttacctgtgtgtgccacagaaacactaggagtaccggatgtcgagttggattttagtagtgcaagaagatgctccatttgctcagtggtgaaggggctggtctcagcctcattagcaataggaataatagctcagcctggtttgtcacatgtttttcctttccaattcgcaggtttcccatggattttccaacagttttcacgggtatggcgaggcttgttgcaaaaatcacaccaaacttgtggtctttcatctgatttgcgcagaaacactaacggctttattatagcctccacccgtggtaaccaaggctaaaccttcaatagcaactccaagtcccttcttgcccaacatcacattcctccgactctcttctcttctaacttctgaaaaaacttcacgaattgaaggcatgggttgtcttccaatgattctcccccttacctcatcaaactcgacattaaggccaaccaagaacttgaagatccgattgtcttccatggtcttcttatgatgacatccatcctcgacaaatttccactcataggtgttgaagaggtcaaggtcttgccagatccgcttcaaggagttgaagtactttgtgatgttgtcctccccttgttgtatgtcatcaagtttgagggttaattcaaagatctgtgattgattccctagatcagaatacatctgatttacgttctcctaaagctcttttgctgttggatagcacatgtacttagagctaatgtcttcttccatagaattcacaagccatgtcatcaccatggaattctcagcatcctatatagcatagttcggatcatccactgcaggagccttctttttacctgtcaggtagcccatctttccacgtcctctgatgtacatctgaattgattgagaccatctcagaaagttgtcaccattcaagcgaatcctggtgatttggatagagtgagattccgaggtggtaggactgatttttgaagaatcagtgatgatgggattgttcagagaaggttgaggaacaatagtggactcgtttgaaatatccaacatggtttcagagagaatagggattgaaagagaggaagaaagagggtttcggctagtaaattgctagctctgataccaacttgaaaaatagggtttcacgggaataataatctttcattgagattattctcttatagagtttacaacatatacaaatccttcaaatcaggaaactaaattattgattaaagggaaagaatcactcctaacaattactttcctaaaaatataaagattgacaactaatagctaatttacagctttacaaagttatttctttccatatcagtttcggttttccaacacttttataatagtattttaattatagatgtgtcattttctatggacactctccacaaactctgaaccttggaaaccttcacgggcaagtgctttttgtcttccctcctcaaatatggtgcttttgcgactccctctgccacctgaggttaaatatgtttctgtggtttacattgttttctgtggagaagaaaaagaatctgtgatctgggtgcagagaatcttttttttttttattccttttttaccgaggcttgttatataggatgcattatgggtggactcataacttatgcacattaccaaaacagctatactttggaagtacctttgtagtgcaaataatacaagggtgttctacaaggtttttctctgtcccaatgaggctcttgtaccagtgatgctagaattatgataggcttgtattggcctctgtttatattatttactttgccttgtaagttctatatttttgaatgggtcattatgatagagtaagaaccatcaacactggaactgattggtttgattaatttgaacacactctgactggctttggaaattttcctttctccttttttagtgt

SEQ ID NO: 13200 - DNA, 3485 bp, Vitis vinifera
  Intron number 3 from transcript GSVIVT01038252001 (locus G SVIVG01038252001) derived from phytozome v7.0 (chr-ID chr5 ; pos 24711646 to 24715130 reverse strand)
gttggctgcttgtcattctaagtaagtgccactaacctttttcccaccacggaaaatggaaattagggggatatatggttttatgttaggacacacacacaacacatggagtttgagtcttttagaaggcatcaatagtctgttaatgagacttatatggttagtatgatggattgggtgccaagattgctttaagggacacccagaggcatccttgggaagccatttcacaggatatgttagtaagaggtctagggtttgctgttagaaggatttctgctgggaagatagcaccttggatactttgtacctgcatcttttcagactactcctacaggagcccctgtcatcaatttttcatttgtgtgaaccccatgtttttttaaatttttacttctagagtaaccttagggaaggtagatgacatctaaccctccatcaatgactttctgaatgttacctctttgactctttacctggggagtcaagctggcatttgaaaattgttcacttctcttttaaattgtttttccaagggttgatgggagaggatgggttcttctccgtttccttcaaggaggttattttggaaggctaaggttctttataaagttaagtccttctcttggtaatgccaaggttagtactaatgtatacctttagagaggagaaaatcttattatgtgttgttcctattttgcattttctagtgctttttagttttggggtgcatcaatgtcactctttagctcggggatgtatcacccaaatgatggtgatgtcgaatgttatcaaaggcttgacctgtcctcatgggacactaattggttttcagatgagatggtcaaagcttgatctaagaattggtattagagttaaggatcatgggttcaagtcacgggagtatcatgttgggtgaggaattgttggggtataatgccgctcttaagccctaggatgggtcaccccaatgatgctaatgtcaaatgccataaaaggcttgacctattctcaccaggcaccaatatgtttatagatgagatggccaaagcctgatccaagatttagcctttggcagtagctgtttttttcagttggttttgatggaatggcccatagagaagcatagttgattatggtgattgaaccttgttctttggatagagcaagagagtcaaggatgcaatggtgtagatatatgggagaggatgatgttctatgtttgggtgttaattaccacagggttctacagtattcctttgaagttgactttgttttgattcatgtttgtgtctatggtttgcagtgcaggagacttttgagttggataccccccaacaccaccaccaagaagctgaagtcaattttcatgaatttggtcaagggagttcagttcagcaaagcgtactaggattattaggaatcacaatggcattattatcttctccttcttgatacttgctgagattggctttaagattgaagcagagattcaggtggttttgcaaagttttagtgaagctaccgataaaggttttatgggcatatcatttagattgactcttctgctgttatcttgtagatggaacagagggtcctgggctcatggtgatatggtatttgatgagggagattaaggatatttttcttgagtttgtgtttgtagctgaggtggattgctagaaagcaattatcaaaggggattccttaaccaggagaggagctgcgattctggaggagtttagaggagacatagttcctaattgttgtttgggtggttaagttgtacatagccttagcaacttagttttttgttccttggtattcatccttgttgatatccaattcttcatcattaaagtttcatttcatattgaaaagaatgaagtcttaagacataaagtaggataccctaccaactactacaaaacctgtgtcgatatcccgaagcaaagttgaaagtgatttgtctcaattctctttgagattggatgtggatggggactctatacacgcagattgtgctagtttggatactaattggaaatctgtaggtttagattgtggttttccactctctctatttgacctgctccaacctagcttcgctgagttaacctccgtatgttactctgctgcaccttttcttccacttcttctaagttctcttagttggcatttgtattccaagatgtgtcgtcatcgtcctctcttaagttccatcttagagatctgttgaatcagatggtaacttgatcagatgatataactaggtgtgtgaaaaagctccaagtcccattgggctagcacaaaatgtttgggcttaaacctggtgtagccctgatttgagaacttcctctgcccttcttgcacactcctccacctcagtgacacacatgcacaaacttaaaaggaaaaaggatatcctgccaaccacatataagcttagtgcccatttctaggaccaagctggaagctacttgcttctattctctttgggattgaggactttataggtctaaattgtgatagtaggatttagaagggggaaattgtagttgtttttctatctctttacctgacatcctccaatatagcttcaccatgttaaccatcctatgtcatgttgtcatgccccttatttgacttctttaattctcttggttggccttcatattctgaaaaatggcatgcagctgtagcatatgccttgtctttgtttaaattccaccttggagatctgttagatcagatggtaacttgatcagatgatcttattagggttgtaaaagtgctccaaggccagccagcttaatgcaaaatgtttggcttcaacatggcctaacctcaaacagaaactgcctctgcccctttcgcccacttctcctcccttgtattctccatctccaatgctatgcacagctctctctctctctctcccaaagccctgtttttcttcccttcctttttcctggtccccttctccttcttatctcctgctttctccacctcctatgctctgacgttctcttatcaaaaccagaagatgacatgtatatctctctgttccctttggccctcctcctcttctcatcttccgctctctctatctcttactctttcactttcctttatcaaaatcagaagaggaagtggttcctcttttatgtacttagtagagagcatagtggtccagcaatgtactcatggtacatatacaaggacttactgcccatatgagatgcccttcagaagaaattgttggatcagatatcaagattttaggttctctaaatggtggcttaagttagttttccattccagtgaaagtgatagttgattgggcaatcataacccttcaaatctgtttattttgttttgccaatgcaagattatacttttttttgggtataaataagaatgcttgtgaccatctaattgtcttgattttcatttcacaggatctactgggcaagaatcaaaag

SEQ ID NO: 13201 - DNA, 24722 bp, Vitis vinifera
  Intron number 8 from transcript GSVIVT01018226001 (locus G SVIVG01018226001) derived from phytozome v7.0 (chr-ID chr1 5; pos 12903730 to 12928451)
attttggggcacctcgggtgcagtgcgcccagcaatgaaaaggtcataagaggacatcctctatgtttggatttaggaatctgtacgcagttctgcatcttattatttttcttgtttaaaccataatataggcaattttttcgttcctgaatctcatgttattgggttacagttgtcacaaacttcctacagtagaattaaggtccaaccttatcatatacaaatcattaatttgcttaaaaatttaatggcttggggatgaaggtgattgttgttttattcggaaagactgtaattaacaatttccagaaagtctctcctcatgggtgggaagttgatatttgcatggatggctcccatcgcccgatctgaatgttcattaggggtggtgccaatttctggcctgccaaacatatgaaagtccataacttgccaattatttgaaggggtggttcatgaataggatctcaatttgctacaaagcaaagttgagcttcccacaaaaaggctttgtttgtttgagcaaccaaacactccccagaataacctattttcataccatctaatattttgaagtatgtatataccaaggaaacattctataaaatgttttcagttttcacattcaagaatcatgcactaacatatattggtataaacaatttattaaattgagtcattttcaaagagaatgttcaatcaaatacaaatttattaattttatagaaaaaaactattttatcttttacttaaaatatattataattaaaaaataaataattaaattaattatgttaaaatttatatgttccaaaaattatggacactaaatatacatattataattaaacaattaaatcattaaattaattaagatttgtataaaaattaaaattaaaattaaggttttaaaaaatagtatttttatttatttacaatgactagaagattaaacagatttaaatcatgttcataagtttagcagttacaatcttattaacaattaattatgaattcaatttatacaatatgatcaattaaacctgattcaagtcttgttaaaatgattattttcactatatttcagtttagttagtgaagagaaaattattgaaaaattttttttattaaaaaaaccatatctttatttatctacattcttcttttgtttttttaaaatgagtgaagatattttttattataactttttatatttcactttatttttaaaaattattttcaaaaaataacaattaatcaatactataaattttaataataatttattattttaaaaaataaaaaaatcatgttgccaaactcactctaataagcttaattaggttattatgcttagttctcaaaaaagttaaggaaagaaaaaaatgttaaaaaaaatgattttatcatatttggttaattgtattataaaaaatacaaaaaaaaatcaaatataattaaaataaattaaaaatttatataatttaaacttatttaatctttatatccaagaggtaaaataagttaaataaatttaaaataatatataagaataatttattattttttatttttcttccattctatttttcctattcattttcttttccttcaaaattcaaaaaacccaacataacctttaaaagtcaaatcccaaattattttctccctagaaatgaattttatactgtatccctcaaggagcacacagcatgttcctcttccatacatgtataaacatcatcagtcctgtgttgaaaacagaaaaaccctactcctttaagtgcatttcaccatctccaaaaagcatttcttcttcttcctcctcttcttctgtctgctggacctgcaagtcttcctctcaatcatcacccactcgaaagtctgctaagtccaaactttcacgtcgacaatattgacttcacccaaacacatcttgtcgcatttggataagcagtaattaatgaacgtacatttgagcattactataataatcgtcctttgacgaccattataattataatcatgtttttttttttttttttttctttcaaccttttgtttggttggaagtatcatcattctgatacatatgatattgatttggtgagaaagaagagatgatttttttcctacttatggttagcaagtgatgaatgatgtgaaaattaaaacagtagtcatgggtcccctccccccctccccacccccaatcatcttccatattttaatgttagtggctttattatatagaatttcaacaaccgtgaagagaaagtagggaggacacaagccctagtcatcatctttgaagaatctacatgcaggacagctaggtttgatgaggtttgatgattagagagagagagagagagagagagagagagagagagatgaatttagctatatattatagaccatggcctattttgaaaaagcatatagccctacatatcaaagcttgatcctgagaaaattaaaagccatgaagtgtgtgggactagcttgtcacctttctcctattgatgatgataaaataagtttcagatttccacgtcctattataagtttcttgagagagagagagagagagagagaattaaatgtttaatttctgaaatgttgtcttttattttcttttaaaagaagattctgttaattatttaattgtgcaacttgtccttatgcccaaaagaaatgaaaatatatatatatatatatatatatatatatatatatatgcttccacgttgaacaattaaaggagacaagctttttgcgggggcttaattaacaataattgaaatcaaatgagacattaattgatgcttttcaatgcaaattagcaccatgcatgttttcaattaattatttttctccaccaacccattataaccttttatcaccaaacacttgaaggattttatttcttaaatccttaaaatgtgcttggtaaagtagaaaaattcatccaacataggatccgataaaatcgaattgtctttttcttccttcaaattcaaattaaaaaatgatggtcatatgctccttatgggtaaaaacttctcataggaatggcgacttgccatatattgacgaacaagagaatccctctttattttgtgtctttcattttatttcacatctttatttatcacattttcataaaatttttatcttataatattttctcctcatgattgacaatatttattgaggcgtttcttacaaaaacagatataaagtaaggatttatgtaggtgtttgataaaccaacttaataacttaataatttaatttaaatcatgaagtaaattaagtatattacttaatggtgtgatttaaaataaaaaataattaatttattctttaagttcacatattcattttacctttttacctcatttgtcctaatttactttatgatctcttttactactccataaccttcaatattatttgacctcatttactctaattataacttataaagataaatatgttaatttgaagatttaggataaattttaaattaattttattaaataaccttaatacttaaagtaaaaattaaataataaattttaagtaaataatttaagtataatttaacttaaaatcaatttaaatcattaaataataagtattaaattttatcaaatactatcgaagactctttcttatcatcttgaccaaattccattatatatatatattataacttttcttcacatatcctaaaataaaaatttgaaaaaagaaaaagaaaataaacgttaatgacatgcaccggaggttcatgcattcatggacaagaaagcccccatctcagattgatttatatatgttccacttgagggacatttcacctggccctaggatgattctgaatgtgaaagcgactccacatgattctcaattttgaaatgcatcattccatgcaaaaaatgaggaagattttgatatacacatgtgtggcccttcttataccaacaataatgcccacaaatcactgcttttctttttggcctgatgcatttttctgttgtgaatcattgaaatgggctacatttaatgttcatggcctaatcttcaccaactcctatttatgtctgctatataaaaattcaattgcctaatattcttgtagttaattcttctaaatctttagataaaaataaataaaattgcaaaaaaaaaaaaaaaaattctctttattttcctagtattttctttctttttcattttttttgggccttaattagaaaggtcttaactagatcatttcctctacaattaatgctataacttttttttttctttaacatgaccgagagtatgtttaacaatgcttctattcaaaacgtttttagtagaaatgttttcctaggaagagtttttgaaagaatcatctataaaatatttttctaaaaaacactacaagtgattttgtaatagtacaagtgattttttagatttttaaaaatgtttcttaaatttttttcaaacatcaattttttaaaagttagaagtgctttttaaaaaatcataataaatgcataaatatttagaaggcaatcaataaatagcccaaattttaacccaagtttataacctttgatactcaattttcctaaattacatttattaatctattaaattaatcagtcttatagtatccaataatatatcaaatatagttagaataatccatcgtagaacaaacattaaatatacatgaaaaaccacttataaaatttcaattgaaacctccacggatccacggatctttgaatcaatccactaaatataaaaaaaaaaagtatttagtaatatagattaatctaatctaaatgcattcaattcccatgagactaatatgtactaccattatttacacttgttcttcacattttcaacacaacaatctcatactctcattagtgaatcactccaaaaacatatgaagacttaatggtttgaatcttcgacttttttctttgcaataaaaaaaaaaatttaagtcctcacttgaaaattttcttttagagtttcaaatatagtgtagaataatggtaaatcttttaattttaggttttattgaaaagatatgtttattttctttttattctaagccataatttttagtatggtcatattgaaaaaaaacacttgttaaaaaagaaaaaaagaagttaatttcacctcattcccttaaaattttatcaaatatctcatttatttttgaatgagaagggaagttgagaaaataaaggttatgcttaaataagaaaaacactcaagaggggggtgaattgggtttttcaaaaactttttctacacgacaaattcaagcacaatgtaataaaaaataaagagatatagttagaaaattcaaactcggattttatagtggttcgacacttccttgcctacgtccactttcctcaatcttctaaccgagtgagggctccactaacttgaagtttcaaccaagcttccaatcttcttacacttggattccggctacaataggctcttacacaatctcttcaagattcaaacctcttcaaggctttaacactcagttttaacaagaatgaacccctcatcctatctcaatgatatctcaaatacaaaacaaagttaggatgactcacaagggtgcattaaaagatatgcaagtgaggatttaatgcactaagacggaaataggatcttttaaggcaagaacaagtaggtagacaattgattgcaagtgttctctatgtcataaatgaagtggagttctcaatttataggtttctaagctcgggagccaagaacaacaaaaagcagcctcaaccggtcgagctgggggttgaccagttcactagtcgttggagcatttaatgttttggtaggttactgttgcctcgaagggacctcgatcggaggtcgaccgagaaggagggaacctcaacctggaagggaaagctactggatgagagagagtgtttttgacactccttgaccggacctcgatcggaaaagggcaactggtcgactagttccctaaccggttgagtcggttgggcagagtctcgaccagtgattactaccaaaaagtgctattttgtagacctaataataatggttttaagcacctttgagtagtaatcatattcatttaacccaattaattcattaaggtccttagtaattggttttaaccatttttgtggcaagtttacatgtttttatcagcttatgaaccaattcaagcatgccaattgatggaggagctatttgggcgagttaagcaaggattttggatgattacaggcttgaatttcaagtggaaacacgagcacaagcaatggagaagaggaaaacagagtgaagaaaacagctgcagtcttctttcacacttttggagcacttcccgaagtccattttctacatgctatataccatttgaaatcttaggaagtcaagaatccaacgcttcaaaccgtgtatgatttggagctgaaatgaggaagatatggccttcagaaggcaactgcatcatgccaaatgaccaatttcgcaaggtgaatttcacattgcgaaaatttcgcaaggagattttcttcatggtgcgaaattttgccatttcgcaatgtgaatttcacattgcgaaattcctttgaatcatctgtttctccacgcacgcaccaccgacttcccaaatatttttagcttgatattttctcatgtaaattccttttgtaaccttgtattcagccgacataaagcttcatcttgtaattttgctatatatagaggtgcacaacacctccaacaaaaaaggggatgttttggggatcgatcctctgtacattaacttagagatatataaagctttgtttttctctcttctcctgttcttctccatttctattttcttagtagccaaacagcctctgagggcttttcctcagaggatgattggctaaaacttttaatttctcaaagtatggatgttatgtgatggcttggatgcaatcccatggaaatttctcgcacctggaaggtaaggtagtcgtttttcattaatggttcattaatgcaaagtttggtttttatttcctttggacaacttccaacggccaatacttgataagcttttggatttctatccattagttatctcctacgagctattggaaagtgaggttttcaattccaagttttgcattaatccgttagaaccaatttcaatggccattgaaaggtgagtttatcacctggaatgactttgagttgccaatatttggtaagattttggctttagaccattagttatctcttacgagccattcaaaggaagtctaaggtgaataaccattgatgaaattcactaccatctgttttgccattttaaaggattaaaacttgatttgctaaatccataccggttcgggaagcaagcatcaccatagttgcaaccccaacgcgaggagcctatccttagatttccaatttgcataagagccagagcatagctatcctatctttgagaaacttgtttctacacccttttattttagtctttaatgttagcttagattagtttaaatctttctaaaacattttcatcttcttttaaagctaacatccataagaaaatcacctattttcctaatttgaatatcacttgtgtttgcgaaaacccttcccagtgaacgatcctagaaccactatgctatagtagcttggctactttagtaatagtatttaaggtataaattttgttgatacgcctttaaagctaagctaccatgagtcgcatcaaccagttcagcattttggcctctaaaacctatatttttcacttcttttcttttctaacacttaggcaaggtctttaggtaaattaatatgacaattttgaaacgttttcctaaggtacatttgataaattaaataataaattaagttttcaaatatgcatgaaaagatatgaaaactctaagtgcacccatacattcatcttacatttattttctatgattaaaattctttcgaaagtctcgatcttgtattcatttggtcatttgatgaatttctaaatttatacttgagattctttaccattcaaaccgattagtcacttaaccatggtttgttatcatcaaaacctgattaggagaacccttgggctaacaatctctctctttttcatgatgaaaaaccttggttatctaggagaagaaaaaaatctcctcctcaaatcaatcatggatcaatcaataaaaatttatgaatgtaaaaccaagataatcaagacatgtgaatttttaataggaaacaatgtaactcatgaaaatatcatatcatatatatatagtaaagtcatgtaggtgtcatagatcctacatgtctctcctcctttggcaacataaaaaagaaacgaagggggtctcgatgaaatcaaggttgaggaggtggaggtggaaacatggagcgaaggtaagctatcattttctcatgctgactctcttggtgactctcaatacactcaaatcctctattggagatgatcaaatgcagcctactgttgatccatacgatcctccatacgctcaaatctttgctgcagatactcaaactaagaagtgaagccagtctgatactgatccatggaatcctccattgagtaaaatcaagtatcactgactactgcaagctcctccatgcaagtgccaagtaagctgatctgagcaaataaatccatccaaggtgcatgatcaggagcatgaggtgcctgatgaggtgatgtcttagtgtgaggaggctcgatgaaggatggctgagaagatggtcttgttgtgtaagccgactcagacatcatcgactctgggaatgtggtctaaaactgaacaccctcagactggagtaaagagatgttaagcctgggctctctctgcacaaagcctttctgagggtctaacccaccctccatctctcgaatcttgacctcatcttctactccaggatgcacctgcccctgtccccaggcccatgttggtggtcgctctgctctcctaacccaggagtcatcgagggatttctcaaacttcatccaccccaaagactgctcatcatatgtatcataaatatcgagggcctcgaaatctatctctctactcaaatcgaccccgacatccttgaatactcaagtgaggaagtgaccataggggagtacacgggtcgtgctctcgcagcaggatatcatgtgcaccatcatcagatatcccacgttaatcgcagaatagagtccatgaataatgcctcaagataggaaacctcatctcggtgcccgccttatggcagtaggatggagcagatcatgtggtgaaggattcagctaatcacggtcaggttatgtgccgatggtttgcccatcctctaggcatctgcaaggccacacatcctctaaatggcctctctaggctcaaaacccagcatagtgggccaagccttggactcatatatcctgagtccaactggaggaatatctaaaatacgacaaatgctctccgggtctagttggatctcaacacctctaacgatgaaaataaccggtccaccaagtccatatgtcactcttgaatagaatgctctcactaatttcgaaaaaatcggctccgaaatagtcacgacgggcaaccatcccatctgtcataaaagtccctcaaacccgaaatgctgtagttgagagaaattgatacttctccctggaattactttcatctgagtgaacatctacttgtacctctaataatcctctactgaactgaagagagtcatgtcaaaccttgcccttctatgagcctctatttgagcaggctgagacgactcagtagggcgcttgccctgtgccctagaggcagtcgtctctctcctaggagctatgagaagaagctaaacagtgaagaagaagctggtaaagagagaaacgagtacaaccaaaagccctaggtgtgcggaaatgggttgtaacaggctgtgatgtgcgttgaagaaggagaaactgtcccaaaaccaaagccctaggtcctaaatccaaagccctagcctctgatcgtcccaaaatccactccaaggcttgcaatctgtccaatatcttgcccaaactggtctctggaagcataaatgtgaagaaccctgaagaaattgaggagaatagtggagaaaacaaagcgcatgaggctttttaaattcccagccccaatgaaccggtcgaccatctagttaacgcaatttgacttttctctttttgtgcgttttctcgtctcgtgatcctcctcctacccttttcaattgaaatccccaattttttatgcccaatgctaaaggaattttgatttttggtaaaaaaattgaccatttatctaagtatatgtctatatgatgcatatgacatgaaattcatgcaattagaaagtatattcatcaagaattcattaagcaatcattagatcataaagaaatcacccctagttgtcttctaatatcaacaaattgttcttcacttagaggttttgtaaatatatcggcaagctgatcttttgtgtttacaaatcaagtgtaatgtcacccttttatgcatagtctctaagaaaatgatgtctaatctctatatgcttagtcttagagtgttgcacgtgattttttgaaatatttatggcactagtgttatcacatttaataggaacatgctcaaaagacaaattaaaatcactaagtgtttgtttcatccaaatgatttgtgcacaacataaaccggctgctatgtattcgacttctgcggttgacaaagctatcgaattttgcttcttactatgccatgaaacaagtgagtgccctaggaaatgacaagtaccactagtgctttttctttcaaccttacaaccaacaaaatgagcatccaagaattcaattaattcaaagttatcactcttgggataccataagcctatgtccattgtctctttcaagaatctaagaattcgttttatgacacttaagtgagattctttaggacaagattgaaatctagcacacaagcatacactatacatgatgtcaggtctactagcggccaaatatagcaaagaacctatcatacctctatacatagttgagtcaatggatttacctttcttatccttatcaagcttgatggatgagctcattggagtcttcattgttttggcttcttccatgtttaaccttttgagaagatctcttatatattttgcttgattaatgaaggttccttcctttagttgcttgatttgaagtccaaggaagaagttgagttctcccatgatgctcatttcaaactcactatgcatgcacttagaaaaatcttcacaaagagagacattagtaactccaaaaataatatcatcaacatatatttgaattaagagcatgtcattttctttggtctttatgaaaagagttgtgtcaatttttcccattttaaaaacttttttcagaagaaatttgctcaatctttcataccatgctcttggtgcttgtttcaaaccataaagtgcctttttaagtttaaaaacatgattaggaaagttaaaactttgaaaaccgggtggttgttcaacatatacttcttcgtttataaaaccatttaagaaagcacttttcacatccacttgatataaaataaagtctttaaaacatgcaagggcaagtaacatcctaatggcttccaatctagctacgagggcaaaggtttcttcataatctatcccttcttcttgattaaaaccttgggctaccaatcttgctttatttctaacaattatgtcattttcatccattttatttctaaagacccatttagttccaataacactttgatttgaaggtcttggcactaattcccatacttcacttcttttaaattgatttaactcttcttgcatagcaatcatccaattttcatgaactaaagcgccatttatatttttaggttcaatttgagaaataaaagcaagattattgcaaatatttctaagagatgatctagttcttacctcactagatgagttacctataatttgatcttgtgggtggttgatgacaaactttcaatctttaggaaggtcttgacttgattcaccttacacttgttgaggagagggtagtgccaatggtgattcttctttcttgggatcctctctaatttcttcttgttgccttctatcttcaatttgaaattttctcatggaggtcttcaagcctaaatcatcatcaaaactctctctttcttggagagaattgttagattcataaaaaataacatggatggactcctctacaaccatggttcttttgttgaaaactctaaaggctttacttgaagttgagtaaccaaggaaaattccaacatccgattttgcatcaaattttctaagttttctttggtgtttaatataaaacatttacacccaaagactttgaaataactaatgttgggtttcttatttttccaaagctcatagtgagttttcttaagaatgggcctcaataatattctatttaaaacataacacgaagtgttaatcgctttgatccaaaaatattttggtaaactgttttcatttagcatggttctacccatttcttgaagagttctatttttcctttcaactaccccattttgttgaggagttctagtagccgaaaaattgtggttagtaccatgcttgttgcaatattctttaaaatcaatattttcaaattttctcccatgatcacttcttatacaagtaattgtaaaacctttttcattttgaatcttattgcaaaactttgaaaactcataaaaggcttcattcttttgacttaaaaacaagacccatgtgtatctagagaagttatccacaatagcatatgcataagatttttctccaagacttggtgtcctagagagaccaaataaatccatatgcaacaactcaagaggcttagaggttgaaataaaatttttgtttttgaaagagtttttgatttgctttcccatttgacaagcttaacaaactttgtctttttgaaaatttattttggaaaggcctctaacaagttcatctttgttgagttgggaaatgaggtccatgttagcatgtcccaacctcctatgccacaaccaactttgatcatgcatgcttgaaaaaacatctatcatggtcatcatattttgaaatatttatagtgtaaacattatcacacctatggtccatgaagatggttttatcattttgaatatatttgatgatgcaatgagatgcttcaaaaatcactttaaaacctttgtcacaaagttgactaatgtttaaaaggttatgttttaaaccatccactaataaaacactttcaataagagaggatgtgtcattaccaatgttgccttgaccaataattcttccttttgcattgtctccaaatgtaacatatcctccctttctctttgtatggaaagcaaacttggattcatccccggtcatgtgtcttgaacatccactatccaagaaccacttatccttctttgaaccctacaaaataaaattcaagttgatttaggtacccatatctttttgggtccttgagggttagtgaccttggatttttcaatccaaacctttttagcttttgcatttgaattcttttgagaaccatttcttaagggacatgtactactaatgtgtcatcatcttccacaaaagttgcaaatggtagaaggacttgcacttgaggattcttttacaaagtagtttttaatatactttcgattttttgaagatttaaatcttagcccttgtttgtcaaaaacacatttttggctagctaaaatcatttcaaaagatttttgtccactaaagactattgaaagagaggaggtcaaccattcatttttctttttcaaaatctcattttatttttcaagatgagttttagaaatttcaacaattgaaaatttttctttcacttcttcaaattctttttcaagttctagaattttctttttaagagaattatttttcaaactaagtttttcaaaatcctcatataattcttcaaaaaaatcatgcatatcttcatcactaaagttagagcttacctcatcaagttaatctattcccataaagcacatgtttgccacttctttctcattttcttcttcgtaggatttttcactttcactccaagaagccaccattgcctttttcattcttctcttggctgaacttttgtagagaggacaatcatatttaatgtgttccagttttttgcatttgaaacacaccaaatcttttttctcttcccatttctccttgtcaccatgagatgaaaattcctttttagaaaggtttcttctagaagtgaactttcttcctctaaacctttcacccctcatgtatttgttgtgctttcttgtgatgagggctaaatcatcatcttcttcacttggtttttcttcttcaacatttttttcttccttagttgtagttttgagagttatgctcttcttctttttgtcttcaccctcttgtagcttctttgccaaattgatctcatatgttattaatgaccctatgatcttcttcataggtaacttggtcaagtcttttgcttcttgaattgcggtgacctttgtatgccactttgatgggagtgacctcaatatcttcatcaccttttcagattccttgtaggtctttcccaatacttcaagaccattgacaatgtcagtgaacctagtgatcatctcaacaatagtctcattttctttcataaaaaaacaattcatagttatgaacaagtatatttattttttactctttcacttgatttgtttctttatgagttatttcaagcaatctccaaatttctttagccgatttacattgacatattctattatatcaatttctatccatagcacattgcaaagtaaaaacgaccttagcatttaattgaaaatttcttctatcaagctcattccattcttacttgggttttagaaccaagactccatcaactagttttgtaggataagttgggtcatcttcaatgacgtcccatatgtctaaatcggttgattgtaaatatcaagtcattctagttttccaatagggatagtcgattcccgtaaaaaatggagctctatgttttgtaaaattttcagtttgagatgagcttgatggaacaaccatttcctcttagacgattaagtcttaaacaagaggccttgctctgatatcaattgagaaaataaaggttatgcttaaataagaaaaacactcaagaggggggtgaattgggtttttcaaaaactttttctacatgaaaaattcaagcacaatataataaaaaataaagagataaagttagaaaattcaaactcggattttatagtggttcgacacttccttgcctacgtccactctcttcaatctcctaaccgagtgagggttccactaacttgaagcttcaaccaagcttccaatctttttacacttggattccagttccaatgggctcttacacaatctcttcaagattcaaacctcttgaaggctttaacactcattttttacaagaatgaatccctcaacctagatcaatgatagttcaaatacaaaacaaagctaggatgacttacaagggtgcactaaaatatatgtaagtgaggatttaatgcactaagaaggaaatgagatcttttaaggcaagaacaagtaggtagacaattgattgcaagtgttctctatgtcataaatgaaatggagttctcaatttataggtttctaagctcgggagccaaaaacaataaaaagcagcctccaccggtcgagctgagggttgaccggttcactagccattggagcatttaatgctttggcaggttaccgttgcctcatcgaccagaggttgaccaggaatgaaggaaccttaatcgggaagggaaagctgctggatgagagaaagtgtttttgacactcctcgatcggagaagggcaatcggttgagccggttggctatagagtctcgaccggttcaaccttttggccccgaaaacctatatttttcacttttttttttctaacacttaggcaagttctttaggtaaattaatatggcaattttgaaatgttttgcctaaggtacattttgataaaactcaggttttgatgaaatcgtaatcttaaagaataaaccgagttttcaaatatgcatgaaaagatatgaaaaccctaagtgcacccatgcattcatcttacattttttccctatgattaaaagtctttcgaaagtctcgatcttgtattcatttggtcatttgatgaatttccgaatttatacatgagattctttaccattcaaaccaattagtcatttaaccatggtttgttatcatcaaaacctgattaagagaacccttgggctaacagaagtgaattaaaataacaaatgaaaattaaagaggaggcctttaatgaaattttaaaccaatgaaacctagatgtataactaaaacattaagagaaataaatgaaattgagtgagtgagtgagtgagtgagtgagtgagtgagagaaagagagagagagagagagagagagagagagagagagagatttataaaattttgaagcaacattctatagacatgagtgcccattaagatgatgtttaagtgtctactcgacaatttcctattttagagccaaatttttctcaatctctccttgttactttcaagcatcctttgcttgtcttttttatttatttatttttaaacttgattatgactaaaattcatttcaattacatcactactttgttttaaattcaaactcaaaacatacttaaccattcacttatagagtcttcaactttattatagagcatgtaagtttcaatagaagtaaagtagttttgaattaataattttttagaaaaaaagaattattgtaagagtctacacccaatcgtgtaaatatcattcactttgagcccaaatggaccttcatggttttaaaacgtgactacatggttaaaatgaactcatacatatataatattagaaaaaattttcccctatgcgacgtgagatatcataaacactcataccccaattcagacataatgctctcattgtatcctacaaaattgtagagtcaaataggcagacatccattatacgactcacatccaattgtgtagatattatctacttagggccttcacgatttgaaaacgcaaagattaagaagagtgaatacatatatggtgtcataaacttttttctctattcgatgtgaaatattataattatgaacttaaatgactatttggatgtgttcacttttacaattttaaaatttgagatttcaaaattttaaaatagtttttaaaactattactttttcaatatagatatctgatagttgatcttatataaaaattactatgatttccttattttaaaaacaaaaatagaaagtgcatttgaacctgatgaccttgatgttaagctgcacattcaaatattattttatttagacaaatattttaggaattggtcggctaaaatttttactacatgatgagtaaatatatgcaaactataaattacacatactaagttgaagaaaatgaagcaaaaaatcaaagtttggaatagggaagtgtttagaaggctggaagttaataaaaacttagctctgcaacaagttgagtactgagatggggtggaaagtgaaatgagcctttcagaaggagaaacatagctgaaaaaagaagctaatgaaacctataaaaattgggttttactagaagaaacccatttgagacaattgtcaagggagttgtggttaaaggaaggggataggaatacaggcttctttcaacggatggaaaatgcccactgaagaaataattccttgaatagaattaagattaacggggtgtggatgactaaggatcaggagtggattgtgaatgcttttcagcaattgctctcaaaaaagctaggttggagagctgacattgaggggttgcaccttcaatgtctaaattttcgtgaaactgaagttttggagctgcctttcattaaggaagaaatccactctaccttgatggaaatgaatgggaataaacctccaggcccggatgtgttcacaatggccttttggcaagcctgttgggactttgtgaatgaggagattgtggatttgtttaaggagttttatgattaaagatcatttgccaaaagtcttaataccactttcctggttctcattccaaagaaaggtggtgctgaggaccttggggatttctggcctatcaaccttttagggggactatacaagcttttggctaaggtgctggcgaataggctgaagaaggttttaggaaatgtggtttatgtggatcaaaatgcctttgtgatgagcaaacagattttggatgcttcgcttatcgctaatgaggtgattgacttctggcataaacataaagataaatggttgatttgtaaattggacattgaaaaagcctatgacaacatcaattggaattttctcataaaggttttgcataagatggactttgggtctcggtggatggagtggatttggtggtgcatttcaactaccaaattttttgtcctggtcattggggtgccaacaggtttcttcttgaacaccaaggggctgcgtcaaggagatcctctttctccttacctttttgtctttggtatggaagtgctaagtgcactaataagaagggttactgatgagggcttcgtttcaggctacaaactttgggggagatggaggatgaagatgaatgtctcctatttactttttgctgacaatacaatcattttctacgaagtaaggaaatagcatcttacctctttaagctgggttttggcttggtttgaggcagcatctggcctaagaataaacctagctaaaagcgaattaattcctattggagaggtagaagagattgaggaaacaacagtggagctagggtgtagagtggggtctctgcccactgtttagttagggctgccccttggagcccatcacaaggctatgtctatgagggatggggtggaagagagaatgaggagaagattagccctgtggaaaagacaatatatttctaaggacgggagaatcaccctcattaagagcacactggccaacatgcctatttaccaattgtccctccttcgaatgcccaagattgtcgcaaaaaggcttgaaaaattataaagagactttctttggggagagagaatcatggaaaggaaagtccacttaatcaattgggaggtggtgtgtactcaaaatgagaagggtggtctaggcatacagaagattgatttcttgaacaaggccttgttgggtaaatggatctggagagatgcctttgaaaaggaaaatctttggaagaaggtgatcggggtgaagtatggctaaaagggctttgggtggatgactaatgaagctcgtgggacatttggagtgggggtttggaaggagattttgaaggaggcaaattggtgttggaataacatagagtttaaggtggataatgagacaaaagtcaagttttggattgatcattggtgtggcaatgcggtgttgtcccaaaacttcccccagttattcgccttggcggtccataaggatgcaacgatcaatgaagtgtgggactcaagccttagtcaaggaagttggaatcttagattttctagagattttaatgattgggagctggatttgataagagatttgcttaatatgctgagggacttcaggatatcttcagagaatgactcagtgttatggaaaagagggagtcatgtaacttttggggttagggacgcttattttttgctgaatgctcccaacacctttgctttcccaaataagtgcatttgggtggataaggtcccaaccaaagtatttttttttttttttgcctgggaggccacatgggggaagattctcaccttggataagcttaaaaaatgggggtggcggctccctaatcgctgttttttgtgtggttgtgaagaagaaaatgtaaatcacattcttttacactgtatagtggtcaaggtcctctgggagatcgtcttttccttgtttggagttcagtgggtattcccagagacagtcaaagaggtgttatttagctgaagggggccttttgtggggaaaaaaaggaaaaaggtctggaattccgttccgttgtgtattttttggacggtatggaaggaaatgaatagattagctttgagggagggttatttagctatacagaaattcaaaaattcttttgtatgtaatttgtgaagttgggctagggtgtatattggagaggagtcatcttcgttcttaggctttttggagtggctagcagccacttaagggctggtgaggtgttttttgcgtttttttggttcagactgctatgtatactccttgtatgttttatggctttttgccccttaatatatcctgtgcctatttatcaaaaaaataaaataaaataaattacacatactacatatccatacaaagacattgtgtagcatcattgggccttcatcatttagattttgaatgaagggaaaaaataattgtcctagcaagacatgatggtgcaatgaaatacataaggataaaatatttttatatgaatatcattatttttcattccaatttgaaattaaatactcccatagcgagaaagacaataagacaaaataataaaatctagtgcattgctataatttgttccatgcatccttggctacttatgtatgtattaatatgttgattagaccaaaaaaaggtttcataaatagatttaaggtcatgagagaataatattgataaaaattagaaatagttgtaaaaagttattccgaataacatcttaattacttcaacctttaaatttttttattttatttatttttataaaaattgatttaaagagatttatttttacaaaaagaaattgtcaaatatgacatattgtgtctattatgtgaaaagttagggtttattttactgacctcctttgaggttttaggtagatacaactaattcttattaatttgaaaatttatcaaataccttccttattttgaattagagggaagctgagtgaaaatattaaattaaaaaaataaagaaggtatttgatgatattttaaatcaatggaagacagatgtatttagccaaaacctaagaggagataaatgaaattaactcgaagagttattatcaaatacttaatttttatctatgtatattagttatttaatattttgataaaatataattattatagaattccatttttaaataatctcttagaggttgaaactcaagctcaaaatgcattggattacaatcgagggtcaaagtgcacaagaaattttctaggagacaaaatatttttttatgattgtcgtaatttttattttttattttgaaaattctctccaaaagaatgagagaataagaaaagataataaaattttgattttattatttccaatttagttcatttctatgatttcttccaaacatctttggctatgtatagacatatgtgataacttttgtttctattttgaaaatcctttccaaatggatgagacaataagaaaagataataaaattctgaatttatgatttccaatttagttcatttctatgatttcttccttacattttggttatgtatacatatgtgataatttttgtttctattttgaaaattatctccaaatggacgaggcaataaagtttttaatttatgactttcaatttagcgcattgctatgatttcttcattaaaaccttggttatatatatagattttgcacatgtctaaatcaaataaagttagatgatcaaattaataaaatttaaatcatgtatcttaattatgcctttattttaatttaaaaaatttaacattttatgagctagcataaaatattttatcttgattatatttgaaaacaatttatttgattggatttcataaagttgatggttacgtgactataaggtcacttgatggaacatctgttgtagtccattatgaaatcattccaaacatatcttagattaaaaaaagttttaaatcacttaaaccaaataataataatatttgaatgagacatgatcgacataatttatgaaaaaaaatgtcacatgtaataatataagatctatcattggaatgatttaaatgattgaaggtgtttgtgatatgctacatcaaatagggtagaagatttctgatactatacaagtattgacttattttaatcttataaacatgttttaaagtcgtgaagggagagattaggtgtaagtcattacaattataatcaaaattcattaattatatatgaatttgataagtagtgaatttatacaaacaaatggaaggtcatgtttgcgtgaacatggaaagaccaatgaaattggagagatcatgtataataatttatgagaatataaagaaattagcccttggtgtggatcttgggaaggaaaggtaaaaaaaataaaaagttggagaattaagtttaataattataaaatctaggagaaaaataaaataatagttttttaaaaaatattaaagattgtcttttagggtttttttttttcgaaattacataaaaaaaaaatttcaatttcaaccaatcatccattttctaaaattaaaagtcaagtactaataaaaattcattctcaaacatttgattattaaaattttagagacatgatacctccacatgaatcatagaattctttctaccttccatcataaacaagatgttgaacttattaacaaccacttttaatatcatttaaggcatattattattattatattaccacagatttcataaatattgatagaaacaattaaaggcgtaaggatataatttttttttctaattttttaaacaaatttttaaatgagaaattatgctcatggctcacctcacatcatatttttctttaccaaataatagcaataatggcttatacatgaatatgaaatatcactcaatgtcaattaaaaatcatgataaaatcattaaaaaaaagtcttttacttattgatatataatcaccaaaaatgtttttgtttttgtgtttttaaaagcaaaaaaataaaattataattagaaaacatgtttagtatttataaaaataaaaaaaatatttatgtttctactttaataattagtaaaatagaacttaaataaatatacaaatatataattcacaaatacacattaataatttctaaaactcaatggagtcggggtgaatgttctatgtggccccataatctcatgtcttatatttaacaagtaccttttaactttgaaaatgcagtttgaagtcatgaagacatttactcaaaatgaatgatatctatcctaaaaggaagtaaaagcaaaccgcatgaaatcagagttgattttttttgttgaatataaaagtttgagtgagtgttttaaatgacttataatctcattaaatacgatataaatataataaactcctcttaaccttgaacaaacattttaaagttgtaaatgcttattgggttaagagtaaacaatatttacataaaagataataagtcattatacataatattaatcaaagtcattctttaatcctaataagtcattacatatgatatcagagttgatttatttgttgaatataaaagtttaagtgagtgttttaaatgactcataatcttattaaatacaatataaatataataaatttctcttaacgttgtaaacacttattggattaagagtaaacaatatttacataaaagataataagtcattatacatgatattgatcaaaaccaatccttgatctcctaatatgtgagaatctaagtaaatgttatgaatagtctcataatccgatgaatagacgtggagaagaagagatcatcatcatcatatacataaaagggaagaaggaggaaaggaaggagaaaaggaatacattggggagagcataaggctctgataccataaaggagcaataagcaatgaaatataaactaacctatgtattaatttcttgataaaagattaattacaaatacaaatatatggctaaccggaatgcaaaatgaaaaaaattagtgtttgtttgatatatatatatatatatatatatttaaataaaaaatagttgtaagttttatataaaatataaaaacatacattaaataaataatggttttttttataaaaaaaaaatggtttggttacagtacaaaatggtgttgtttcaatacttacataagaagtaccaatttttatattttaatatttatatcctaattttatttttttatattattatattttgatgtcattcatttatacttatttatttaataacatggatgtcatagtatatatttgatggtccagatcttttgattaatagaaactgcataatattttccttaaaaattttgaaaagacacaaggtttgtgtaaactaaaaacttgtcagtggaaattcttcccttctaaactattcacggaatt

SEQ ID NO: 13202 - DNA, 2763 bp, Vitis vinifera
  Intron number 3 from transcript GSVIVT01036935001 (locus G SVIVG01036935001) derived from phytozome v7.0 (chr-ID chr2 ; pos 17386958 to 17389720 reverse strand)
gaaggtaagaatacagaaacatattgctccttactgaactagtttcttgtctttgtataaataaaggaaccatcccaacttcttttatcaaacaaccgtctcaatttttatcatcttttttacatttagagctacctctcacagcctatgaatgctcttgttcactaatgctttcttatcttggcaccatcattttaactatgctcatggtataatttaagtattattgtttatatctacactgcccaatcaattatagttttcctttaatttgataaagaaagtaagaaacccttcaaaaattcttaatatatgtatagctattttttagggtgcaaatatttattaaaagacgaggtgacatgcgaagtagaataagagatacttcattagacgcatacatagaaaaaggaaaataagaaacccttcaaaagaaatcaaattccacaaaagaaacttcctctacaagactgaatagtcactggaaggagaaaaatacaaacttaatgggagtataggttcctctattggtctctctggttagccgataagttcataatttatatgcatatgtttcttaaatagtatgtaatgcacgtctgtgatattagtcttttcatgaggtgtaccaaagggactaggaaagtttgagttgaatagagatatcagaggacatgatgttgtaatgactgtagtttgagttttgtacttttgtttaaaagaatgctctaacctttaaatttaaatattaaaagatcaggtacctttcattggggtcttctatgtatgtgcttgccccataatctgtgtgtgcattgcaggtcatatgtcttactcatgttcaatatacttaagtagcttgacaaatagttacctcatcatatatagcttaataaaaattccttctctcgggcttcttgcttaggcaatcatatggtagatgcattagcaaaatgtggagctagacatatgatttcttttgtaggagattttatacctatgtgaattatagttagatttgaacttttgaactaatatacacttacctgcctctttaatccttctttgtatagaggattgtgtacttcttagaaggattttccatcctcctttgtacttaatatttcaatgcaatgaaagtgttgttttttataataataataataataataataattccctcatcatagtcatcatttagtcgagttgccttcctaaaatcttagggctacttcaaaataataataataataattccttcatcatagtcaccattcatcattccctcatcatagtcatcatttggctgagttgccttcttacaaacttagggttacttcaaatttgacacagattggtttagaagcttctatgttatctttaaaaggtatatttctaccggttttcaaatatccaacggatagggagaaagatcaatgacagttgatataaccccccaagatataaaaaaggaatcacttgaatatgaattgttaatatctatatgatgctttttttttttaaatttcaattatctataggctagtccaagagagccatttgaaagtttgtagagattgattatgaaatactaagaggagggtgaataattatttagcacttttttactctaaatgtttaattttaatttctctttaaaaggaagaagaaggtaaatcaatcgcataagaaacaatgatttttgcatggaaaactacccacaaagtctattagagactttgtggatgtaaaaaccacagtgtttagaggccatagagcacaaatccacaattgaaagaaaagcacatagatttacttgatagatgctcttcctaaatcttactcccaatatctatactagtcttcatgttcacgacgcaacaccacacatgcatccagtggactatctcaactcctgagaggatatgaatctctctcatgaacccaagaatgagaatcacataccattagagagttttgggatgagggaaggctaatagttgatgtttccaaaatttgcatctaactaaaaaacctttatggcatggtattcagaaggggagatccttagtgaacaagatctagaattctccaaaaaaacttgttttaaaaatggagaaattgaaactttaaatcaagagaattctgcctccaatgcacaagcgctcgatgctcttaagaagagattgattgctccagcgccaagtctaagtgcttaagagcttgactagtttttaatttaattaaataaaaatattttagctcaattaaaaacttaaagtctactttatgtcatattttaaccaaattagctttcatcaaacctctttatattcaaggataaaaatattggttttcatagatttatcggtagttggattttacgaatatattggtacatatcaggaaatattagtggaaattttgaaaaaaaatattggtgagaggaaatttgataaaaacttatagaaatattgagaaaaacttcaagaaatgataaaataagaattctttgaagaaataatatatgtaatattttatgacattttgtgataatatatagaatttaaaagcataatattattaaaattataatatattttagtttggttatattgaaggatataaaattaaatgataatattgagaaaaactgcaagtaccttagcaagttactaatatttttcagttctattttgcaatttaacttctactaagatagtctcaggtatatttacgcaggaacagcaaaggagaattaga

SEQ ID NO: 13203 - DNA, 8185 bp, Vitis vinifera
  Intron number 5 from transcript GSVIVT01036940001 (locus G SVIVG01036940001) derived from phytozome v7.0 (chr-ID chr2 ; pos 17279313 to 17287497)
tagtggtatgttttataaaacatcttggttcatgcaactggttttttatgctctgatgaaaaaaagaatttccatgaatataatgtgttattgatcttttatctgctaaacaaatgaaggcatggtatttgatggtttttgtttcagttctcttttatatcaattcaaattgttattcttgactaaataaatgaaaacatgctgtggggatcatgcctctattcttccttgttgaatatttgttgggcctttttgtcagcacaacaggatgggggtctgttgttctggtgcttggtggatatggtcttgggtagatgcttggcactaagtaggcttatttgaaaattcatgaaagtaattttatttggtttttttccttttaccttttatttgctctttttttcttctgcttctctctctctctctctctctctctctctctctctctctctcttggttcaagttcttattcctaactgaggactattgaatccatattttagatatatgaggcagcactatggctttctgttagctttagctaaaggagataagttgggtaagtttgttaagattagggagaactattggaaaacgtccttatttttttataaggaaatagcatacaactgtattgggttagaagtatatttaggagatttgggtagcttgtatattcctgatttataggaatttggtttagggtagttacttatttttttggcttccttattttgtaattagccatatatgttttttagccctgtactcttgttatattcaaaattagtaatatattagaaaaagggctctcctagttgacatggtatcagagcttggttagaaagttatggatcgaagtgcacttccaagcagatcttttaccagcttcgagcaacattgagcccaattgaagcctgtgatttatcaacaggttctgattggaactacaagcccaagaattgagaagcttctcaaaggagaggtggagagagagtgcagaagaattggaaagtttgagaaatgcctcccatagacactctcggtttagaaaccctagggtttatgcaatagtgtgagtggagaagaacagtgagaagcttcctgttgtcgtttttctgcttgaaccttgttttttgttttgttatttgattggcctgtgttgccctagaaatcgatctgtgttctttgattccacttcttcttcctcggtttcattcccttcattgaaaatatgtcagaaaccaccgaagtcaccagtgtctctgagacgtatctaacagaacaaacatccaaccattctacgggagatctaccaaacatccaggttgcctatcaattgaatggtaagaattatctaaagtagtctcaattgatccgtacgttcttaaaaggaggaggcaagttgagccatctaaatggtactggaccaagttgaaaagatcctaaattcgaggcatgggatgaagaagattcaatagtgatgtcttggttgtggaacaacatggggttggagatcagtgacatctgtatgtttcttgacacggctaaggaagtctgggattttgttcaagagacatattcgaaagtaaacgatgtcgtgcaaatttatgagatcaaaatgaagatgttaggcataaaatagggtactcatgttgtcacagaatactcgaattatttgaagggactctggcaggagatgaatctctatcaaaacatacaaatgaaatgcagtgatgatgcgtctctcttaaagagattttccaagaaggatagaatctatgattttcttgttgggctgtatatggaatttgctgttctagtacagatattgtgaaaaggagacctttcattagatgagactgttgctctaataagggcagaagaaggtagacgtggagtaatgattaagactccagggactgagagctcgacctttatgacaaagaatgcaaacttgaagataatgacacccgatcaatagcctggcggagaaaatggtcaattagacctgtccaaagccattaataaggacttcctatggcgcaagtactgcaaaaagccttgacatactagagaaaagtgttggaagcttcatggaaggccacaacagtatcagagtaatagaaattggtccatgaggggtggatcatcaaagagacaggctcatgtgtctcaaacacaactcgatagtgaaggcaatcctcacgaatgaactgagttgcacagggagggagtaagaaagctgaggaacttcttagggacattggagaatcttggagctacaggtacttgttctttggcactctcaggtaagactttatcttttgcactaagtgtcttagataaaatccacctggttcctgagtcattgattcaggggctaccaaccacatgacctgcaactcccaaaagtttctctcctacaccccaagtcctggtaacctaaaaatcatcatagtcaatggaacttcaacaaccgtagctggccaaagtgatattcatgttaatcaatatctcgccctcaaaaatgtcctccacatgcctaagttgtatacaaatcttgtgttagtacagaaacttacaaagaatttgaattgctttgtggtactctaccctttatattgtgtattgcaggaccaggatatggggaagaggattggatgtgctagggagaaagatgtattttactatcttgaagagtcgagtggacaatttgagaaagagaatagtttatctttgtccttactttttgagtcttccatgccatataaagaaaagatttggctttatcaccatcgtcttggtcatccttcgtttagtgttcttaaagtcatgtttcctatatcgttcaaagaaataagtgtcgaacattttcattgtgctgtttgtgaattggcaaaacacaaacatgcttctcttaaataagcaataaaaaaaccattgttcctttctctttaattcatagtgacatttggggttcttcaacaattccaaatatttctggggtttgttggtttgtttcttttattgatgattgtatttgtgtgacatggatttatccttaaaaaaaaaaaacagatttatgttcagtctttcctatctttttcaatatggttaaaaatcattttggggttgaaatcaaaaggtttcagttggataatgcaagtgattactttaattaatttgtcttcattcttccaaaaggaaggcataatccatgaatcttgtgttagaacaccccaacaaaatggggttgcagagacgaaaaatggtcatcttttagcaaccacgagagcctttcttttttaaaaaaatgttcctaaaaattattggggagaggctgctttaaatgttgcccatattataaacagattgccttctcgagtgcttgactttaaaagtcccatgcaagtcttgtctacattctttccagatttcaacacttaaaataatcttgtccctagaatctttggttgtgttgcctttggccacattcattctcaaaataggggtaaattagacctaagagctcttaggtgtgtctttgtggggtattcttctactaaaaaagtgtacaagtgttatcatccttccacaggaaaattctatatctgtagatgccacttttgctgagaaagataactattctttgagccttattttcaggggcaaaaatcatttggggaggattaggacagggactcattcttactcgatctcattatgtgtgctagacatcattcttcgcttgtttgtgagtcaagtattgtgacaaatctgcccccgagtcaagttctggtttgtgagtcaaggaccttgacaaatctgcccttgagtcaaattttggtcaccgaactggtttttctgaacctcctggccttgttctaaatgagtctgaaccgtgtacacctcctaatttaagagtaatggcaaaggaaaaactagttcaaggttctactcgtccacttcaggtttactcaagaaggaaagttcccatctttcaacctatttgcgttcaagagtttgaaccggtttctgttaatgaagtgccgtttctccccttgctgtttctaactctgaattaccacacaaaggcgtacctgacacaaatgaccatgatttagtcatagctttccaaaaaggaactaggacacacacccaacaccccatatccctatttatgtcctatagtaaagtgtctactgcccataaagccttcctcactcacctgaacacaatgtctattaccaaatcattatctaaggcacttggtcatgagaaatggagggaagctatgagagttgacatggatgctcttgagaagaatgcaacatgggatatggtggaattgccaagaggcaagactccagtgggttgtagatgggtctacacagtcaaatacaaggaggatgaatcacttgaaaggtacaaggcgagattagtagcaaaggtttgtacttagatttataggcttgagtcgcttgactacctttagacatttgctcctgttatgaaaatgaatacagtccggatgttgttgtcattggtggttaatcttgattggagtttacaataatttgatgttaaaaatgccttcttgcacggtgatcttgaagaggagatatatatgaaattcctcctggtttcgacttacaactgggaaatggaaaagcgtgtaaattgaagaagactttatatggtttgaaacagtgaccacggttaccaaggttatgctctctatgggatacaagcaaagccaaggtgaccataccttagttatcaaacacttgggttcaaggaaagtgacaacattgcttgtgtatgtggacaacataattgtgactggaaacaatatagaagggagagaagccttgaagaagtgccttgtgaaagaatttgaaattaaggatcctggcagattgaagtatttcctcggcattgaatttttatctttcaacaaaaatatgtgttggacttgttaaaggagatgggcaaactgggatgcaagctagttgagacactgatagagcagaatcatagacttgaagaggcattggaagacacaccaatagacagaggtacttataagaggcttgtaggaaggctcatttacttgctccacactagacttgacatagcctatgtgcttaccatggtgagccattttatgcatgatcctaaggaaattcatctctaggtcgtgtactggttcctacagtagttgaaaggaactccaagaaagggaattttatttgagaagggagagaagttggcccttgaagcttataccggcgcagaccatgtcaggtttgtggtggataggagatcaacattaggctattgcatgtacttcggtggtaatctagtgacatggagaagtaaaaaacaaaatgttgtggctagatcaagtgtggaagttgagtttatgtccatggcgcttggaatttgtgaattattgtggctgagacaattgtagaagacttgaagatcacgtgagagacacctatgaggctttattgcgataacaagtctgctatcaatatttcacataacttcatacatcatgattgtaccaaacacattgagattgatagacacttcataaaagaaaagttggacagtggactatttgcacttcatttgtgcctactggaggatagtcggctgatgttctaacaaagggactgtctactacaacatttaagacgatagttggcaagttgggaatggaaaacatccatttgtcagcttgagggaagtgttggaaaacacccttattttttataagggaacagtgtatattgggttagaagtatatttaggagatttgggtagcttgtatttttctgatctatgggaatttgatttagggtggttacctccttttttggcttccttattttataattagccatttatattttttagcattgtactcttgttacatttggaattaataatgtattagaaaaagggctctcctagttgatagggaaccatgtgagccaacttgatcttggcatttcagttggcatgtgatatcataggttctatattgggttggcaattttggcttgggcttggcttgctagactaaattgagggttcttaaggagactggttagcattggtttagttattagttccttaaaatttcatgtaaccatgcatatgtgcaatgcaattttcatgaaagcaatatgcattcctatttgtttgcctattttttttattacactaaatggagcctaattgtttttccttctttgaatgtttagaggtccatgaagaataccttatagaagtggaatttctaaatagaaattcagaatcttgatgctgcatatgtggaatttgaaaaaaaataaaatcatgaacttgaaacagatgggatttgaaaacctgtgactaaaatctgtagaatattcattttattgtttgaatgaatattttgaggttttttttttttttttttgataagtaaaagcaattgtattagaaagcctgaagtacacctgatagtatacacggagtatacaaggcaactaggccaaagggagagaaaaaacaaaaaaacccttacttacaacccaaccaatcaatgaaatcgaaaatggaccatgaagcacaaattacatgcaccctgacccaatctgagaacatgtacaaaaaagaccgtaaaataggttgatccggtaattcagaatcttcaaagattcttctttgagttttaattgattggtgtggtgtgaaagtgatgaccggacaatattagaagcaaaactgcaacctcagggttggagctggtggtagtatcaatactagtagaggcaatggtggtggaatgtttagttgctgcggggaagtgtggttgccatagcgggggtgggatgtaggtggtggtggtcggatggctatgttggaatagagttcttgaaatgtaaccaatctgaagaaaggatttaaccttttcacagcctcgttcggctagccagatggatgtccatagtgggggtgggatgtaggtggtggtggtcggaaggctatgcttgaatagagttcttgaaatgtaaccaatctgaagaaagaatttaaccttttcaaatcctctctagattttggaaatttcctctcctgatgttccaaacaataccatttgcttcgagaggatttgaaatccttttgggaagtcaaatactatgtgaaatcttttattcaaatgcactgtaatgatatattgacacatcatacttatcaaaaaaaatatattgacacatcatgcttgctatatttcatacttaaagagtggaagttctacatactcgtgtaactatttgcaacattgaaaagcttcatagttgatgaaattataaatttttgtctgcaatgttgatcaatttaatgaagtatgatattttgaggttgtcttatctaaacctttcaaggctatatacatcaagaactaaatatttgatcctaaattattagaaacctagttgggatatctacatatctgtagaacctattaaaggaaaaatatatttaacgcatctgtagaataagaagctcactaaagttcaggatatcatttatggattgcttgtgagataatctaagccacattccccacatcccaagtcaagatacccagataaaattactttccgcttattgcaaatgaatctattcaatgttaccagagacaatagtgaccaagaactggagtaggatctcctggtctcttgtgctgccaacaaaactcatcaagtctataataatgcatgatgaaagttcaatcatcaaaatacgatgctttcatttatgaatattactaaaaccatttgatatagtcatttagaactctgacatgacagtttggttatgaagccaatggatggcagtagtggaagaatatggacaacacttttggtagaaagaagaaaactatgatattagggtttggatatgagtacgatccccttattttctgttgtttattatgcattttaactcttaaaaactttttagtcctggttgctacattcaatacatcttatgctgcctaataaaaaaaagggtatttacatatatggctgagtaaatcagttcttcctactgctacctaatgctgattctcattccattttcttgtttggaaggatgcaggtacttttacaagtga

SEQ ID NO: 13204 - DNA, 7612 bp, Vitis vinifera
  Intron number 1 from transcript GSVIVT01013268001 (locus G SVIVG01013268001) derived from phytozome v7.0 (chr-ID chr2 ; pos 5989396 to 5997007 reverse strand)
caacaaagaagctctcaaaatcagtgtctggcaaggtttgattcttctcttctattcacttcttctcaactcgattctcaaattttgatgctgtgttaaaatatgatgacttcatttttctttatttgctgtaattttgatgcgttgaagtggtattcacaagaatttttttttgatgcgactgtaagtatgagttgagaattcaagtctagggcgaaatggattgtgtcttggaatgatcagttcgtttgttagttgctttaattcagatgcattaaagtggtattcacaagcgcttttttttttttttttttggtttgggtacaagactgtagtcatctctgtaaattgaagtctaaagttgaagtgcttaatgagttaaatctgtaactcaacacatcggtggttgagagaaggagaaatgaagttcaagtgaagtggattatgctcatttgattgtgtatacttaatcacgtgattaagatttctgagattccaacattcattttgtaaataaaggccttggactggggaagaacatttgaaaatgggcgacattcaattgtttgttgcagtgttctgcctcagaccacattgcttgtggatttaaattatgtatggcttggatttgctaaatggctgagaatgtgattagaagttatattaacgtgatttacaattttgttcgacaaaacctttatccccagtcacttggagtgagcatgagctatcgtgtcttatcatttcttcttcgtggccttccattcccttaacaccttgagcgtggttgaacttttataatatgctatcaacctgatcaaccattttttttggacattcttcttgccttgatagtgcatttgtcttagttgttcattctatttagttttccttacttggttgaacaacacaaaatctagttatgtgaattacaacaaatgatttttccaaatcattaacactctccagtttatgagcgcttctcgaaccttataataatatattgagtttaccttacttgagtaaccctataatggttgtctacaatcaaataggtgtactagattttcaatcttatagggtttaagaaaagcaatagaggaataaaaaattatggcagcagagagaagtaaaataaaatgtaaggaaagaaagataaaaaagaaaaaaaatacaatcttggaatctcactaaggcattccgggagtctcacctagaaaaaaaatcaatggagtctcaccattgataattgtaacatattaaaaaaaaaagcttgatcatcaatacttaatcctattctacatcaattagcctttatttataagctttagaaaaccctagaatttgaataaaactatgaaaaagaaaacctaacctatgtagtaactaattaggatttttattcctttcctaaaactattaaatcttctaaaaattaaaaaaaaaatcataaacttcctttttagaattaaaaacttattttatagaaatatcttgtaataaagcttctaataaataagacttctagattctaagttctcaaaatagaaatttgagaataaaaaaattaattaagaaaatatcaagtttaattttttttcttttctaaacaattctataacttctcaaatcctaaaacttctttctttcttattccttttttttttctttctccctttcctttttgtcttgtagatgctttaaaggactcgtctccatcaactccctcccccccccaacatttgaaagaacttggctctaatgagttggatgctagataaaattcataaaggttgggatcaagcttctaaaaaccaatggtcataaaccatttattcttagagtacaatttgtttcatcgtttcaccaaaaatgattgatatttacatccttaacgagttgatataatttgatctttaaggacatactcaatcttgttacttgttttatagtgaggtggtaattcaatatcagtgtccacacttatattgtcttgatcaccatgataggcagacaaatcttctatgttaaatattaagagggaagctgtagcctctagtagatgtgcattttcacctaagtgttttatcacttggcatgggtttgatttctttgagtgaagcttttactatgtgctaggttgaaacatttttgggcataaacaagtcattactagatcaccttctttaaattgaacaagcctgtgatgtatatctgttgcctctttataatttttattgctagtcttgatcattttccacaattcttcatatatattgcaagtattttgggaaaacgaatcactttcctcactaatgcgaattgaattaagtaatggtacaaaatcagtgggttgtttgggttttgatctgtatgcaacgtccaaggaaaatatctaagtgtgtgtgattagtagcaccattgaaagtaaactcagcttgtggtgagatgtctcaacttttcaattgaacctttacaagacattttaagagattacccaggctgcaattgacaacttccattttgccgtcagtttgaggatgaaatgagcttgaaaatttcaattgtgtgcctaatttggcatataaggccttctagaagtaactcgtaaatttaacatcacgatcagaaacaatatggtttggaactccatgtgagcgaattacctctttaaagaacaagttagccacataaagagcatgtgaaaccttcttacatggtataaaatgcaccatcttggaaaaccgatcaaccataacaagtataaaatcaaatccttagtgatcaagttcaaaatccatgcttcacaaggtttggttggatcaggtaaaggtatatgtaaatctgtattttgcttagaaccttttccctattggcatgcttgagcttgaaatggtttgataacctttcaaacaccctccttcaatctaggccaaaagaattgatcttacctcaaaacaatagtcttatttcattgaaaacctcttccatggagtcccacatcactttatcatgtaaagaagtgttaggcaagcattgacaatttttatagaagtattggtttaaaatcttaagatcaacatgtggtacctctgaaccattcaaaagagaggcatagacaattctaaaataaggattattgtcataaaaatgcttcagtttcttaaatccaatcgtggtagttgacatgtttaccaaaagaagagcccttttaataagaggatctactactttattcttaactcttgaagatgaattgagttaaattttgaatagttagtcaatgcaattaggattcttaatttgagaaatggtgagattttaagtcttcaacctaatttgatggataatagaccttaataacttttttttatcatagaaattgatttccaatgaatttggaatttgagatcttttttttttagttagattttgttctaactttgaagaattttaccttttcttttagaatcaattttctcaacttccatctatgatttttcactgtcactatttgattgtcaccacctcaattcacatttttctcttgatcaccaaacacttccatcatcccaatggttgatacttaaatccgctatattattgtagctttttgttaaaactctttgattagataaaaattacttagcatagtagaattaggttataaattttgttttaatatgacaatttgacaatcaatatgtaaagtgttgattttttgccacattgagtttctcattgaagcaagccatgaggcgtccttctactcctacttaaggtgcatcactaaccaccttaagtactttctcaaaatttggtagatgaaaaataagaggattcaccaacttagtcttgatctactcaaatgccttacttgctaccttgttccaaatagattgaccatatttcatgcactgtgtaatgggggccataatagtgctgaaatttcacataaaatgtcagtataatgtgatcaacccatggaaactccacaacttgtggacatttgtgggtatgggctaatcaaggatagcttaagtcttattaggatcaacttcaattcctttaaaagatacaacaaaaataaggcagcactagggctcgtgaaagtgcatattatcaaattaatataagcttcttagccctaattgtttgcattactcgcctcaaatgttcttcatgcacttcatgtaatcaattacaaaggagaatgttatcaaaacaaacaacaacaaatttccaaataaaagggcctagtatctgagtcataaataacataaagttgcttagtgcattggttaatccaaggggaataactaatcattcatataatccatccttagttttagatgttatgttccatttgttatgtggttgaatacatatttagtgatgcatactttttaaatcaatctttgagatgatcatggatcctgccaacatatttgccatatcattgagtcttggaataagaaaccggtacgtgattgtaatcttattaattgcatgactatccacatgcgtttagaatggtccaccttcttaggagttagtaaaagtgggaacaccataaggactcaagctttcttaaataaaccctttagcaagtaacttgttaacttgccttttcaactttgcatgctctattgggttcattcgatgagttggtaaatttggtaatgatgcactaggaatcggatcaatagtatgttcacacagtggaggaagctcaataagcaattcttcaatgtttaagtcttaaaaattagtgagaatgttttttactttgatcagtaattcctttttttatttaggttcattcattgtaaaagtcactatagtaaaaataatattagtcttcttactatgcataataagcaccttttttgattatgtgttcttcgatttcttaaatggtggaacatccttttttggatgaagaatctttttacgcctgttgtgcttaagagtaagtatatttttagtagccatcaagttgtgctttttgataaaaatccatagtcttccaagcaaggtatgggcaaatttcattggtggaacataacacctatgtttagactctttgttcaaaatcattactaatcaagagtgtaactagacaatgagagcttattgaaatagatgtatcatttgcccttgctacttgatagggattttgatgcttttttgcttttagattaagcttttaagcaagttttgtgaagctatatttgaactacttcctctatcaatgattaaggtgcatagtccttctaatcaaggaacacgagtatggaagatgttagtttgtcatcaattttcttcctcttttgctattggaacaaccaattgatgtctcactacaaggctaggaactttagtcaaagcatcacataatcacctttttctccaaattactctttgttatggctctcagcttcttttggattagctttggattcaggttctaattcttcaatacaaaagtgtaatgattacttggataggtaataccatagtgaccatgttccccacacttgaagcataatgaccttgtttttcttgacttcttttcaatagtctcactacctcatctagctgattgttgagttttatgatggcctcttcttgggattgttatgtggtagaaatttcctccagatgtgttgaagtaacatcttgattattaagattgttggaactcatgcttgaataaattgcttcactccttagttgtatgccccttaagccaagaactttcattctgatacaaaactgatataagatgaccctagaatggttgtttacaattaaataggtgggctaggatttcaattttttagaatttaaagagaagagtgaggaataaaaatttatggctgtggagaaaagtaaaataaaatattgttagggacctggtctttatcttcttcagggttatctatagtcaagtctttctttttagttttgtcccacctttctgattcatccctagcttttcctttgtctggttagtggcacacaagaaggtaaatactaatgacttgttacaattgagaagattttacaaagctctcagtcttgacatatgtaagttgtgtatggagcatggagcatcagtagatcatctattcttacattgtcctttaacgatgaggttgtgacacagattatttcaaataaccaaaatggattgggtccccttgaggagcatttttgacatgatgactattaattataagggattgggaagatccaagagaggcctagtattgtggcaaaccacttgtattgctttaatttgggttgtgtggcaggaaagaaatgttaggatgttggaggagaaggcaaggaattcagatgttatgtgggatagtattcactttcttacttctttttaggcttcttgcaccacaagttttaagggcattttgtttaatgtggttcaactagattgcctagcggtgtgtagttcgaagggtgtgggttagtaaggagaggttgctttttgtaattactaaattactttatgcttttggtattcaatttgtttagcttttgtttgtgggtggattcctcatccttctattgtatttcttaatttatatttcaatataattcattgttgtttcctataaaaaaaaaagaaaaaaaagaaaaaaaagagaagtaacataaaatataaggaaagaaaaataaagaagaagagataaaactttaaaatctcaataaggcgttttaagagtttcatgtaaaggaaaatcaatggagtctctctattgagaattgcaaagtatgcaaagaaaaacttaatgctattaatcattattacttaaatattttacatcaattaacgttatctatagattttatttagaaaaccctgaaatttgaataaaattgtaaaaaaacaaacctaaccattgtagtaactagttaggactcttgctcctttcttaaaactattaaatattctaaaaaaattaaaagaaatacaaactttattttttagaatagaaatttactttatagaaactttttgtaataaagtttataataaagaagacctctagattgtgagaactcaaaatagaaattttagaataaaaagattattataaaaaatagaaagtttagatcttttgagagaattctaaacttcatagaatctgaaacttttcctttttctttgccatttttttttatacaccttgaaggactcatcctcattggtggtcttcctttccaatgatcaagtaatttcagttgacttctttccttgcttgtgttctatcggcatctgcttgacttgtttcaataaacttttttttttgggctttttttggagtctgggggtggttgggaatataatgaaatagaaagtttatttcaataattttatataaacttggttgacaatccggttgatagcttacttattttttcattttttttctttttggaatttgttgaatgctagtggatcttttccactgaaaagggatttttatgtgctatactgaatgcaatatctctatggtttctaatttgtgaaagtttttgatgtgtttgtacatgtttatttgttgtttgaaatgtaaaacaggag

SEQ ID NO: 13205 - DNA, 3844 bp, Vitis vinifera
  Intron number 12 from transcript GSVIVT01023232001 (locus GSVIVG01023232001) derived from phytozome v7.0 (chr-ID chr 12; pos 20849396 to 20853239 reverse strand)
gaagtcaagttcaggtccttagacttccttaaaaggtgagcttttattcttaagaataatctgtgtttttatgtcatatatgtgatacaaaaacatagatgttaatttccaaattaaattgatcaagaaatactgaacaaatgacttaattgccgtcatattaaaattttcatttctcagagcaaatatcaaactttcaaaaaagtttccaatttcctatcccattgtgcatgttttggtcatgtggaagaagaggagccaaagatcatttgaaagcaaagaaatgtttgatcaagcactaaaattcatggctctttttaatcttttatcatgggttaatatgtatatagatgggggttccctaagcctaataaattttatagatttgttgtggtctttgtgaaggggcattttttgtcttgttgccccttctttttttgctttgccttttggcattctttgtacatgacccatgttctttggtgcactctttgttaggtgctgttgatatatatttttttgttttcctatcagaaaggaaaaaaaaaaaaatcaaatttactgataattggatggaaaaaaattccttagaatttcaaatatgtttgatccttattggagttttcaggaaaagtatctggcatgattggtaatggtaggtgaaaaaagtccttgcttgttattacattatctttattgctcattgtttttcctttttctgccttttgaagcactttatttacatactgtctacttgggttagtcccctgttcttttgctaggcacctgttaatatattcttgatttgcacgtcaaaaggttgatataaaatgaggtcttacatagctttttcttagaaatcaaaatatgaggcaaaatatctgtggtcaaatgttatatgatagactgtttgattagtccttggtggaaggatagtttccgaggtatttccttttgctgcaaagtgaatcttatacattagacacatgtcagactaacatatgtagcaccacatgttctaactgcatctgtgagatgtgattattaggagtttagtgccctggaacttcatgagcaatttacgaattttcactctattaaaaagccaaaagctattacatccaatcacctgttcacccagctggttaacacttggtctgctaaaagcaactggattgagcagatcacagtggtttttacgaggtgacagttcagttgttggaccggctgctttgtctgtttttatgaccataaatttattccctagtatttgtatttagtaattttgagtgcttcgtctttcttttctctgtttttctttctttttactgctttggattttgtagtttgtccctcttataggtttctatccctaggcaatagcattcaaggattatgctcagcaaaatagaaagggccttcttgaaccttccacaagtgcaaaaactttctatttgataatgaaactggtatgactggcttggagaatcccaacttgtgttccttcatgatcctccatttaactgacctggagtttctagaacacaaccatgagcattcagagaaccaattacttgtaaagatgatctatcttatgaaaatgaattgcacactaaattcttgatgtatgtattcgtcaagaaaaggggataccaataaaagatcaaagatccgctccaacttcttgtaatttgaaattggggagagatacagaatgaagaaaagaacaagatggtgattttactgaagtacagagaatttattgctactgctcaaattttctctcatactccttggtgactaaactgtagagagcttttgaagaatcctatctcataaggtcctaagctggagtgattctatcagtcatgtaaccgaaagagtagctaaaatggcactaaatgagagtacttattttttgtcctcttttctaaattctctgaaagtgatgtccaggaagttgggtatttcagagggagctgcccaacttatccttacaaaaacaaacggttggttaatttgtttcctttggagtccccaaataggttgtgttaggtctatctgatttggtggatgacataattaattcttcaaaaatgacctgaagttgcaaaattttctgcactgagtactaatcagggagtcttgctgaaatgtcaatgagtttgaactgagtgtcaagtagacatgaagacaaacttatcaaaaataagagtatacatgaagacaacaggatccaagctgggtgtaaagagacatcaaattgacacaaactaacaatttcccagttccctctctctgaaaatctgagagaacaacatagaaacaaatgcaactagtagtcaccatacacaactttctatcgcctcagcctgtgacttagtcctattaaactttagtcctctccttatgaactgaccaaacattttcaaattggaagctctgtgcctagttgattggccgagactgggggcctggtggctaatactcagaatcagtttctccataaggtctttaggagccaagtgatcctgcattgtatggatgaaacaggggcttatattgtagagatgatatgcaaaggaataagcaagagaagggggacagactagtaggaatttgaaatatattgaaggatcatctcaagagagagatcaagctgttttgggttagttagatgaattttgttcaatttaatttcagcatcatccttttctttttcaaatttatgcattcatatgtttcactacattgctccatgtcctttttgtgttccttggtcagtgcaatgccttccttctcgtaaaagagtactgttgtagtggaaaatgccatcatcagaggaaatagccaccattaaagtggaaatctgcaagaaagttccttattatcttgtttggttgttgtgagaaatgcatgaaaaggaaattgaaatttttgaaccttagattttttggattgttgtatgggttttcacagagaaaagagcattgcatttagtgaaagtgaagaagggacttgatacttcgcatatgaagccacatgctgtgttttgactctttatcaatataatttgcctccaaactcttttttccgcaaaggagacttttgtttggatgttcaagttaatagcattaaacaaaatatcttttattatcaatgcattttttattttttattttttttctgatgagaacgcaatttttttttttaataccatacaatgataaatgggttggtgacttgtattaggaaatgtctttttttgggctttcttcttctttttctttcttttattttgttaagaaacaagaaagtattgtgtatagaagagaagaattgcaaaaagggacaagggatccttcaaaacagagacagaaaaaagagaaaagaaataaaaaaacccaccaaaaacaatgcacttagcaaaattatggcacaatgaactcaaaggaggaggatgatccccaaacaattggaggtataccttatactgttccatcttggtgagcttattggcttcctaggattctaatatggacaagcaagaaaaaaaggctattccaaaactatgctgacggtcatcagccaagggtgtggggttcctatgctgatatcaatttacaagcaaagtttcattccttccagaattttagaaataatttcactggaactgctgcatgataaaattactggagctctgtcatgataattgaggctttctactatgctgtttcactcatgccctccgtatctttttgctgacttggccaatgttcctgactaatcctgtatggctttttgtggaaataattgattttggtttcttgtcttatcagtttct

SEQ ID NO: 13206 - DNA, 7109 bp, Vitis vinifera
  Intron number 3 from transcript GSVIVT01027140001 (locus G SVIVG01027140001) derived from phytozome v7.0 (chr-ID chr1 5; pos 17504042 to 17511150)
tgggtgtttctactttctttatcaagccctcgtgaaggaattagttaatttatctttgggaagtgttttcaaaaaatgaaacacagtttttgaaaactgttatttgatattttatgaaataaaagtttgtttaaaaatctgaaattaatgttatttatgttttctatatttttaaatatgtttttgttagcccaagggttctcctaatcgggttttgatgataacaaaccatagttaggtgactaattggtttaatggttaagaatctcaagcataaactcgaaaattcatcaaatgaccaaatggatacaagatcgagacttttggaagacttgtgatcataggaaacgaatgtaaaatgaatgcatgagtgcacttaggatattcataccgtttcatgcaacttagaaaacttggtttatcctttaaaacttcgatttcattaaaacccgagttttaacaaatgtaccttaggcaaaatgttttaaaattggcataataattcacctaaagaccttgcctaagtgttagaaaataaaagaattgaaaaagataggttttcggggccaaaaggctcaacaggtcgaggctatggccaaccggctcaatcggttggggaaccgatcgaccggttgcccttgtccgattgaggtccggtcgagggaggcccaaaatcttctctctctactagtagctttctcttccaggtcgaggttattcttttctcggtcgaggtctggtcgagtaccggtcgaggcaacgataacctgttaaatgctccaacggctagtgaaccggtcgacccctagctcgatcggtcgaggttaccttttgctgtttttggatcctgagcttagaaacctataaattgagagctctacttcatttattgataagagaacacttgcaatcaattgtctacctacatgttcttgaccaaaaagctctcatttttttcttagtgcattaaatcatcacttgcatatcctttagtgcactcttgtgtgtcatcctagctttgtcttgtatttgagctatccttaaggtaggttgagggattcattcttgtaaaaactaagtgttaaagccttcaagaggtttgaatcttgaagagattgtgtaagagcccattggagtcggaatccaagtgtaagaagattggaagcttggttgaagcttcaagttagtggaaccctcactcggttaggagattgaggagaatggacgtaggcaaggaagttccgaaccactataaaacccgagttcgaattctctaactctatctctttatttttgtttatattgtgcttgaaaagatttttaaaaacccaattcacccccttttgggtgtttttcttaattaagcatagtctttattttctcaattggtatcagagttagacctcttgttttaaagacttaatcgtctaagaggaaatggctattccatcaagctcatctcaaactggaaatttttcaaaacatagagctccattctttacgagaatcgactatccctattagaaaactagaatgacttagtacttacaatcaactgatttagatgtatggaatgtcattgaagatggcccaacttttcccactaaactggttgatggagttttggttctaaaacccaagcaagaatggaatgagcttgatagaagaaactttcaattaaatgctaaagttgtttttgctttgcaatgtgctatgggtagaaatgaatataatagaatatgtcaatgcaaatcagttaaaaaaatttggaggttgcttgaaataactcatgaaggaacaaatgaaatgaaagagtcaaaaattaatttacttgttcataactatgaattgttttcaatgaaagaaaatgagactattgttgagatgattactaggttcaccgacattgtcaatcgtcttgaagctttggaaaaaacctacaaggaatccgagaaagtgatgaaaatattgaggtctctcccatcaaaatggcatactaaggtcaccacaattcaagaagcaaaagacttgactaagctacctatggaagagctcatagggtcattgatgacatatgagattaacttggcaaagaagctacaagagggtgaagacaaaaaaaagaagagcatagctctcaaagctataaccaaggaagaagaaaaaccaagtgaggaagatgatgatttagccttcatcacaagaaagcttaacaaatacatgaggagtgaaatgtttagaggaagaaaattcacctctagaagagacccttctaaaaaggaatcctcatctcatggtgacaaggagaaatgggaagaaaaaaaagatttggtgtgtttcaaatgcaaaaaaccgggacacatcaaatatgattgtcctctctacaaaaatgaagccaagagaataatgaaaaaggcaatgatggccacttggagtgaaagtgaaaaatcctccgaagaagaaaatgagaaagaagtggcaaacatgtgcttcatggtaatacatgatcttgatgaggtaaactctaactttagtgatgaagatatgcatgatgtttttgaagaattatatgaggattttgaaaaacttagcttgaaaaataattcttttaaaaagaaaattcaagaacttgaaaaagaacttgaagaagtgaaacaaaaattttcaattgttgaaatttctaaaactcatcttgaaaaagagaatgagattttgagaagtgaaaatgagattttgaaaaagaaaaatgaatggttgacttcctctctttcaattttctcttgtggacaaaaatcttttaaaatgatcttagctagccaaaaatgtgtttgtgacaaacaaggactaggattcaaatcttcaaaaaatcaaaagtattttaaaaacaaatttgtaagagaatccgtaaatgcaagtccttctaccacttgcaacttttgtggaagaggggggcacattagtagcacatgtcccttaagaaatggttctcaaaagaattcaaatgctagagctaaaaaggtttgggttgagaaatccaaggtcactaaccctcaaggacccaaaaagatatggatacctaaatcaacttaaattttattttgtagggttcaaataatgataagtggttcttggatagtggatgctcaagacacataatcggggatgaatccaagtttgctttccttacaaagagaaagagaggatacgttacctttggagacaatgcaaaaggaaggatcattggtcaaggcaacattggtaatggcacatcctctcttattgaaagtgttttattagtggatgatttaaaacataatcttttgagcataagtcaactttgtgacaaaggttttaaagtgatttttgaagcatctcattgcatcatcaaagatattcaaaatgatcaaaccatcttcatgggccatagatgtgattatgtttatgctataaatatttcaaaatatgatggccatgatagatgtttttcaagaatgcatgatcaaagttggttgtggcataggaggttgggacatgctaacatggacctcatttcccaactcaacaaagatgaacttgttagaggtcttcccaaaataaattttcaaaaagacaaagtttgtgaatcttgtcaaatgaggaagcaaataaaaaactcttttaaaaacaaaaatttcatttcaacaactaagcctcttgaattgttgcatatggatttatttggtccctctaggacaccaagccttggaggaaaatcttatgcatttgttattgtgaatgacttctttagatacacttgggtcttatttttaagtcaaaagaatgaagccttttatgagttttcaaagttttgcaacaaggttcaaaatgaaaaaggttttacaattacttgtataaaaagtgatcatgggagagagtttgaaaatattgattttgaagactattgcaatgagcatggtattaaccacaatttttcggctcctagaactcctcaacaaaatggggtagttgaaaggaaaaatagaactctttaagaaatggctagaaccatgctaaatgaaaacaatttaccaaaatatttttgggccgaagcggttaacacttcttattatgttttaaatagaattttattgaggcatattcttaagaaaagtccctatgagctttggaaaaacaagaaacccaacattagctatttcaaagtttttgggtgcaaatgctttatattaaacaccaaagacaatcttggaaaatttgatgcaaaatcggatgttggaatttttcttggttactcaacttcaagtaaaacctttagagtttttaacaaaagaaccatggttgtagaggagtctatccatgttattttttatgaatctaacaattctctccaagaaagagagagttttgatgatgatttaggcttggagacctccatgggaaaattaaaaattaaagatagaagacaacaagaagaaattgtagaggatcctaagaaagaagaatcacctttggaactacctcttcctcaacaagtgtaaggtgaatcaagccaagaccttcctaaagattggaagtttgtcatcaaccacccacaagatcaaattatacgtaatccatctagtggggtaagaattagatcatctcttagaaatatttgcaataatcttgcttttatctctcaaattgaacctaaaaatataaataatgctctagttgatgaaaattggatgattgctatgcaaaaagagttaaaccaatttgaaaaaagtgaagtatgggaattagtgccaagacctcaaaatcaaagtgttattggaactagatgggtctttagaaataaaatggatgaaaatgacataattgtaaggactaaagcaagattggtagcccaaggttttaattaagaagaatggatagattatgaagaaacctttgctcccgtagctagattggaagtcattaggatgctacttgcctttgcaattttttaaaaactttgttttatatcaaatggatgtgaaaagtgtcttcttaaatagctttataaatgaagaagtatatgttgaacaaccacccgattttcaaagttttaactttcctaatcatgtttttaaacttaaaaatgcactttatggtttgaaacaagcacctagagcatggtatgaaagattgagtaaatttcttttttaaaaaaaggttttaaaatgggaaaaattgacacaacccttttcataaaaactaaagaaaatgacatgctcttagtgcaaatatacgttgatgatatcatttttggagctactaatgtctctctttgtgaagaattttctaagtgtatgcatagtgagttcgaaatgagcatgatgggagaacttaacttcttccttggactccaaatcaagcaactaaaggaaggaatttctccctttttggcaacatcatagggggagaaatatctaggatctaggagaccttcatgcatatcattttcatattatcttgattagcatatatgttatgttatgttttcgggtacatgtgaggttaccatatatatataatatgctattttcatgatccattgtttcctattgaaaattgattgattgatccatgattggtttgaggaggagatttttttctctcctagataaccaaggtttgtcatcatcaaaaagggggagattgttagcccaagggttctcctaatcgggttttaatgataacaaaccatggttaagtgactaattggtttaatggttaagaatctcagacataaactcgaaaattcatcaaatgaccaaatagatacaagatcgagacttttgaaagacttgtgatcataggaaacgaatgtaagatgaatgcatgagtgcacttaatattttcataccatttcatgcaacttagaaaactcagtttatcctttaaaacttcgatttcattaaaacccaagttttaacaaatgtaccttaggcaaaatgttttaaaattggcataataattcacctaaagaccttgcctaagtgttagaaaaaaaagaattgaaaaggataggttttcggggccaaaaggatcaacaggtcgaggctatggccaaccgggtcaaccggttgggaaaccggtcaaccggttgcccttgtccggtcaaggtcctgtcaagggaggcccaaaatattctctctctaccagtagccttctcttcccggtcgaggttattctctttccggtcgaggtccggtcgagtaccgttcaaggcaacaataacctatcaagcattaaatgctcaaacggctagtgaaccggtcgacccctagctcgaccggtcaaggttaccttttgctgtttttggcttccgagcttagaaacctataaattgagagctccacttcatttattgacaagagaacacttgcaatcaattgtctacctgcctgttcttgaccaaaaagctctcacttctttcttagtgcattaaatcatcacttgcatatcctttggtgcactcttgtgtgtcatcctagctttgtcttgtatttgagctatccttaagctaggttgaggggttcattcttgtaaaaactgagtgttaaagctttcaagaggtttgaatcttaaagagattatgtaagatcccattggagtcggaatccaagtgtaaaaagattggaagcttggttgaaacttcaagttagcggaactctcactcagttaggagattaaggagagtggacgtaggcaaggaagtgtcgaaccactataaaacccgagtttgaattctctaactctatctctttatttttgtttatattgtgcttgaaaagattttaaaaaacccaattcacccccacttttgggtgtttttcttaattaagcatagcctttattttctcagttttattattaatcaatctccatatttttataattatttattaaatagttcttaaaaaataatcaaaaaatattttttgaaaacacttcatttttaaataattatttcatttaaatttgttttcaaattttaaaaattattttaaaatcaattatcaaacaagtctttaatttcttgtctcatgcatgtatatattcatatcgtacaaatcttagctgaa

SEQ ID NO: 13207 - DNA, 4615 bp, Vitis vinifera
  Intron number 3 from transcript GSVIVT01034912001 (locus G SVIVG01034912001) derived from phytozome v7.0 (chr-ID chr5 ; pos 66572 to 71186)
gaggatcctgtaattttggagtgtacttggcgcatgaaactgttttccatgaggtttttgtgaccacatcatctttgtcagacatgattgcagctcaagtttggtatacagggtgtgggtggtttgacatgatcttctgaacttttcttgtcaatttggaaactcataggaatcctccttcaaaatgatttataggtgtttcttcaatcagtttcaggatccttggttatttaatggcaaattttgctttctgataataactaaaaatcgaattctcagtctagcattatcagattctggattgtaatcttcatgtttagacaacaactgaatatatcatgttgaagcaaataagctaaatgagcagaatgtcagtgagcagtgaaataccgtctgcatcatgggtgtaaatgctttataggatataatgcttttatgcattctttgtgaaattgcaaagcttgacaatgccttggacctacccaaattccaagggaaagaagaaggggcaagctttccaattaacattatgttcttgttaatttgacatcaatgagtatctaggaatttcaagattgttattaaaattctaatatttttggatcttgaagtgagaattgatatgaattttttttctccatgcacatgtagaaaaaccagtaatgtttattggattagcgaccacattacaaattctccttccaataaattagtttttggctagaagtcttttattataaatagtgttcgtcaattgttaaaaacttacaaaacatgatatgatacaatgatatatttttttatggaaattgagataaatcatacttgtatcttatctttagtgtatgttaagaccaaggaaggcgatatttcggaagcgataaacgctacagtgtctctacaatgcgcctcacatttgaggccgaggggatttgaaccccaaatcaaaaggtttggggttcagccacttaccatctgggctaactagccccttgatatataatgtgcaaaaaatgtatatatacttaaactcagtatataaagaaaatattaaaagaatattttaaaaagcaaattaattataattattttataattaaatgcaaaatcttttaattaattaccaaaaatataaaaattatataattttcttcataatgtttttaatatcattaataattaattaaatattaaaaaattatatatatatcataatttattttatattgtttaatacaattgaattaaatggatcatattttaatattaatatatatatattttaaaattagacatattataaatttataatcaaatatcataatattaggtgtaatttaataataaatgtacacttataaaattcatatttttatcgatgcatacaatattattatcaaatatgataaatcatattatacatatatcaaaattttcaataaaataactttaaaatgtttattatacttctaattatattattatgaggttttccttacatttttatgagtttttaacaattttaagcttactgatatttttttccaaaatatccgctgatatatccgtaaaatcgaagtaccgatatatccgtgattaccgatattttcatccttggttaagacacacatatgatacatgatacaaagatgcacataccttcaattatttttcataatttttaagaaaaatcaatttttttttttgtttaaaagaatcattatattaattgtttaaaatgtacataaaggttggaaattgatcatgaaaggaagaaagaggtaaaataatcttatataaaagttacacttttgttgtcaaagtttaaagcagaagttacataaatttattcttataataaatattggataattttcatttgaatggttggaattttgacattgaaaatgatggtgatcaatgaacaaaaacttttaccttatatattagttttttttaaaaaaaattatttttggttgggaatgaataagcatgaaaagttgaaatcaaggagatgataaaagacatatatcaacaaaacatgtaaagaaatatgtctagttggaatttgtaattaaaaatcaaatctaaaaaatttaaaagatttatttttgtgaattttgtgatgaacctataccttaaattgatattttgttaaattgaatatttcaaaccctagtatttgatgtgttaatatggtaagatgtagtttaactctttaaatcctattatcttttatcaaattggttatatattgttctatacttcatgcttttaatatatatggtcatgtgtatatattttttctatttaattttcattatattacaatacatgataagttttacaagctaacaactatgatagtggtaactgataactcatattgatcatttatggtcctacttacagttatagtataattgtgattgtgaatctaattagtgaaatatgttagttagctccaagttatagctctttagggtgagagaggtatagagtgggagtttggaaggcaattaaaaatggttgggaggatttcaaagctagaatgtgagagtttggaaggcaatcagaaatggttgggaggatttcaaagttagaatgtgtttcaaggttggaatgctgttgagggcggcttcctaaaaccttttttctatagcttcctctaaagatgcttgggtggttgatgtttgggatggtggtagctagaatcctaggtttattagacagttgaatgattgggagctggatgaggtatacaacttctttgagaggttgcatgaccattctctttctatggagtctaaggattcagtggagtgggttgatataaagagtggtaatttttctgttaagtctttctactcctccttggctagtagggaagcgaatcctttccctcatggtatggtctggaactcttgggcctttattagagtcagcttctttgcttgggaggcaacttgggtcaagattttgactctggatcagctcaaaatgagggggcagaagatgcttaatagatactacatgtgcaaagaggaagaagaaacgagtgatcatattcttcttcattgcccgaaagctcgtattttgtggcaattaatttttgctttatttggtgtacagtgggtaatgcactcttcggtgagaggtttactcttgagttggggagactttcttgtcggtagaaaaaggaaaaaggcttggaaggttgctctgttatgccttttttggtccatttggacggaaagaaataggagagcctttgagaattgtgaatgttcaaatcattcttttaaaaattattttttgtatctattttgggattgggtaagattgtatattggggatgactccttgttgactcttgattttgtagattggttaggagctccataggatgaggttgttttttgtgtgttcgcgcctttttgtatttggtttcttgtatacatcatgtatacttttctttttaatacaattacttttacctatcgaaaaaaaaagttatagctattcatccatgtctataaattttcagagtaatgtagaggtggtgtgaaaacatcatgtgggttgaggcgtttgttatgaacttggtagcagcaccattgacatggcatggcaaggtgatggtattggtgcagattgaatggtatgaatttagtcttactaatgtggtggttaaggtgataatagtgacaaaagttgtggtattatggtactggtggttgccgtgctattattggagttggtgattgggatgtgggaggagccaatgatgaaagtggctgcagcaatgacaagcttgacagcaatggggagagttggagtgatggtgggggaagtggcactgtaagtttgtatagattggtcagttaatgtggcggttgtggtgttgcaagaaggttgatatttaatggattggttgatcaaatgaaggactaaattctaagcaggttgtagatgttcaggctgtattctagctggtgcaaattgtagtttttggttacacatatagttgaatgtcatgcatgcccccatgcatttacattacaaagaaaaatcatatattaatatggtgaatccaaacataaaactaacttggcttgccaaggctgatagaaaaggagaagagaagtgtgacaatgttctattctatggattctgatcttgtcaaacaattttctttgcagcagtgatgaaatgtaaaagagagatatggctagaggcttccctctgtttatttagctggttggtgtatcagtttgtgtgactttttaaccaatcaagttgaatttgaaaagaaaattttccattttaagtaaagatggatgaacttcaaaattcttttttcctttaataataggtgtacagtcatgggtgttgatcatgaaaaccttggaaacccaaaatattgtgtaattatgccagaattacacgtagtctgtatgccagtaagatccttgtaattataatagattctgtgtaggtgctacctcactttagtactattagttttcttgttctttcactttttaaattctattttttcatgccaatttgatgcatatttttcaggaagaaactgtggaggaatttggagaaa

SEQ ID NO: 13208 - DNA, 21022 bp, Vitis vinifera
  Intron number 21 from transcript GSVIVT01023393001 (locus GSVIVG01023393001) derived from phytozome v7.0 (chr-ID chr 14; pos 12739319 to 12760340 reverse strand)
ttggaagcaaggaaaagactggtacaggtatgtatatgtgactccttgcaacagaaaaattatagattttgcctgccagtctgaaatgattgcctatatatgtatagggaaataagagaaccttttttcatctccctttcattgccttttttatttttcctttcctgttttctttccccttcttttgaggttagctgcttcactaagggttaacaaatttgtgattccatgagtcttcctgatgtttggcaaactaagatcatgaccaatcgtctaagggatcatgtttgttctagtaaggctgatcctgattagacaaagagttattattcgattttcaccctattcattaccattctcatgattttacagtgttctaggattttatttcatacaggtttaatcatatgatgcagctgatttttagttatttgattcactaaatgagacacgcatccatccagaaaagagatattaaatgagacttattatttacagatgtcccaaccattttgcctttatgttgacatgataagattcaaatggtgtcttcatggtaatggaaataactcactggagattttgaaatcctgtaatctacggggaaacttatgctttcagacaatctctctcgctctctctcacttattgcttatgtccctcatgcactaggcaatgcatgcattatagtggctgggagaaagggtaaaagatgaattgatataggtatcataggatgtgatttgttatgtttcaatatatgttgatgagaagttcttatgatgacctttttttactttcctttattggtacactgtttattatgctttcataactttggttctttttttctaatacggttgtaatactttaaagcaagaaaggcacatgagcttgataaccaaacaccccccacatgaacatgttgggtggcttgatgtacaaatttatgaaccacaagggattattgaaaaatggatttcctgtaagtttgtatcatgacaaaaaaaaaaaatgtattagttggataaaatgaaattacatttgcattcataccaaaagtgaaagatagataagctttcctactaggcatttggtatcaacctttattaactggtgtacttctaaattattctcctagtttcaaattaggatttataggtgtatctgtaggcttacaccctaacatccttgtctcctccaagaggcctatgacgtactccctttgagagactgaaataccacttctatttcttgctactttcgtaccaagaaaatatatcaatgagcctagatctttaatctcaaattctgttgcaagagtatttttgagtctttccgtctctgtaatatcatcattcggtcaaatttatatcatcaacatagactatgagaatcaaaatcttaccctttttacgtctatagaataaagtgtgatcgaattgagcttgttagtacccttgctgacgaatagccttcgttagtctgccaaaccaagcttgtggggattgtttcaatccataaagagattttatgagcttgtagacctttccttgaattctggccctatcaaatctttctggtagatccatataaacttcctccttcgactcatcattcaggaatgcatttttgacaccaagttactggggtctccagtggataggagtactcgaatagtgtttagttttgccactggtgcaaatgtctcctgatagtcaactccataggtcaacggaaaaccttttgccactaacctcactttatagtgctcaatagatccttctaacttatatttgatgataaagacccacttattgccaataagagattttttccttggcatcttcacaacatcccaagttcaatttttctctagagctgacatttcttctcttattgtgtttcttcattctagtattgttaaagcttcctgtatagttttcaaaacttccactactgctagattagttacaagaacttgaatgaatgatgacaagtgactgtaaactacaaacttggagattgagtgttgggtacaagatcgggttccttgcctgagagttataggtacagtaagatcatcatcttcggaagtaacacgtgggttagaagtttgagtacctaatattggttcaaattcatggttttgcaagagattttttaggtgttccactttttgagtattcttccgtcttgaataaacaattggcttgggagattggagttacaggtctccctctatcattgaacccttgtttatggtcatagtaggtttaggagagggtgtttgcggctgtttagggttaggtggtagtgtttgtggctgttcaagcttaggtgtttgtggttgtttaggctcaagtggtagtgcaaatataggagcaacgacatcccaaatatttctgtcctcactaacactctccccttgagagaagtttttagtgaaaaaaggttggttttcaaagaatgtcacatccataaaagtgtaatatttgcgtgcttctggtgagtaacatttgtgccctttttatgtgggagagtatcctaagaaaatacatttttgagctttagggtcaagttcactcctatcattaccgtggatgtgtacaaaggaagtacaaccaaagactcttaatggaagtgaagagatagatcggttgtgaggataggctttgagaaaacaagttaatagtgtttcataattgagaacctggtttgacattctatttattagataataggcagtaagaacaacatccccctagaggtattttggtacattatttgtgaacataatggctctagttatttctagaaggtggtgattctttctgtcattaatgccatttgttttttagataagtgagtgcaaatatattactaggcaaaaagccacaaagcatacaggaagtatacatagtagcctaagcaaagacaagagaacaaacactcatcaccccttagggaacgacaagccattccaaaaaacctaaaagcgaagaggactcctctctcatatacaccctagcccaactccacaagttgcaaacaaaagaattttttaacttctgaatagctagagagccccccctgaaagctaatctatttctctcattccataccgtccaaaaaatacacaacggaatggaagtccaaatcattttcctctttctccccacaaaagggcccctccgactaactaacatctctttgactgtctcagggaacacctaattagccccaaacaaggccaagacaatctcccagaaagcccttacaactatacagtgtaaaagaatatgatttacattttcctcttcacaaccacacaaaaaacaccgatttggaagatgccagccccgtatttgaagcctgtccaaggttaggaccttctcccaagtagcctcctaagcgaaaaaagcaactttggttgggaccttgtccacccaaatgctctttttcgggaaggtaatgacattagggtctgtcaacaacttgtaagcatctctaatctgaaaaaggtcgtgtccccttcctttccatatcactgagtcctcttcaggagaaatcctcaaatcccttagcgtatgaaacagctctcctagagcgtccagctcccaatcattagagtttctaaaaagtcttatgttccaacctccttgaccaaggctagaatcccacatctcatttaccgaggcattcctttggaccgccaaagcaaacaactggggaaaagcttgggacaacgcctcattgccgcaccactggtcagtccagaagttaaccttggtcccctttcccactttgaactctatattatcccaacaccaatacgactccttcaagatatccttccaaacccccaccccaaacgttccgcgagcctcctttgttctccaaccaaaacccacatggccatacttcacccctatcaccttcctccaaaggatttctttctcaaaggcgaatctccaaatccatttgcccaacaaggccttattcaagaaatcaattttccgaatacctagaccccctctctctttttgggtgcacaccacctctcaattgattagatgaatttttctttccagtcttccccctccccaaagaaaatccctttgtaatttttcgagcctttttgcaacaagcttgggcatacgaaaaagtgacaattggtaaataggtatgctggccagagtgcttttgatgagggtaatcctcccgccctttgacaaatattgtcttttccaaagggcaagccttcttctcattcttacttcaaccccgtcccacatagccgtggtcttgtgattggctcccaggggcagccccagataaacagaaggaagggcccccactttacaccctatctccatagccaactcatcaatgtcttcaacctccccaactggaattacttcacttttagctaggttaattttaagaccagtggctgcctcaaaccatgccaaaatccagcttagatagatatggtgatcttgccttgctttacaaaagataatagtgtcatcagcaaataataagtgggaaacattcatctccattcgccccctccctcgaagcctacaacctgaaataaaacccccatcaacagcccttcttaagagcgcacttagcacttccatacccaacacaaagagatagggggagagtggatctccttggcgtaaccccctggaattggaaaaataacctactggcaccccattaactagaatagagaaacttgcagttgaaatacaccaccatatccactccatccaccggaccctaaaccccatcttgtgcatgaccttcatgaggaaattccaattaatgctatcataggctttttcaatatctaatttacaaatcaaccctttctctttacgtttaagccaatagtcaatcacctcattggctatgagcgaggcatctaaaatttgtcttcccttcacaaaagcattttggtccaccgaaaccaccttgtctaaaacctccttaagtctattggctaacactttggccaagagcttatacaatcccccaagcagactaatgggcctgaaatcccccagatcctcaaccccccctttcttaggaatgaggactaggaaagtagaattgagactcttagcaaacgacttctcatcaaaaaactccttgaacaaatccataatctcctctttcacgaaatcccaataagattgccaaaaggccattgtgaatccattcgggtctggagccttatctccattcatccccatcagagccgcatgaatctcttcctcagtgaatggctgttccaaaccttcagcttcaacatggtttaacctttgaagttgcagcccttcaatatcagttttccaagaatgcttctctgacaatagttgctaaaaagcatccacaaccccctctctcacctcctgctcctcctccagccacctcccattaattttaatcttttccatggaattatttcttctatgggcattagccatccggtgaaagaacccagtgttcttatcttcttccctaaggcacaactccctagacaattgtctccaatgcgtttcttccaagagcacccgttttttgaagacatccttagcttcttttttcagctctgtctctcttttagataggctcctatcactctccaccctatcccaaaattctacttgttgcagagctaagtttttgttgacttccaacctaccaaacacatcccttttccaagctttgattttatccttcataaccttcaactttgtagccaatctaaagctggccctccccctcccccccgcctcctcccaccaaccccgaagaagctccttaaacccatcaactttgagccacatattttcgaacctaaacggggaagggccctttctgaaccctccacctttcagtagaatgggaaaatggtcagaggtgggtctaggaagcctacactgaataaccccactgaagcagtcaagccattcttgggtcactagaaaccggtccagtctaggccaagcttgattattccttcctccactccaagaagccacccccccttgcaaagccatttgttgtggggttataatgcaggagctttgatgaataatgcctttcttagagagaaagattcctagaatagatttaaaatattctttttcgttgtctgttttagaattttaatgtttgcattgtattgggtgttaatcatagcataaaaagatttgaacacttgctctacttctgatttttctttccaaagatatacccaacaaacttgagtgtgatctttaataaatgtgataaaccatctttcttctattaaatatttaactcatgaagggcctcaaatatgactatggactaatgaaaaaggtggtggagcattgtattttttgaggataagtggaacaaacatgcttggctaagtgacaaatttcacattaaagaaatctccagtatgaaatagtgatggaaacaaagcttgtaaatatgaaaaacttgggtggcctggtctacgatgccataacattattttttgttctctagaaagagacttacaacttgtagtttgagcttgtttatttaatttgactttcttatcaaaatagtataacccctaacgttttctagcgttgccaatcttcatccccgaagtcaggtcttgaaacacatgagaagacttaaagaaatgagcaccacactttaaatctcttgtcagcttagtaatagagagaaggttgcaagacaaatttggaacatgcaacacaaagtgcaattctatattaggactaattctattagttccagttcttgccattgttgaaagagatccatatgctattttaaccttgaaatatcctgaactaggattgtatggcgagaataatttcttgtagtctgtcatgtgatctatggctccaaagtcaatcacccatggttccaaatcattgttgcaactgctaagagttgagaaaaaattacctttatgtgctagtaatgaagtattggtgtcgcaaatggtttgagtagcttgtacggttgctccatttgctctttggtaagcgagaactgtgtaccttctccaaaaagattctgcttcgagctaggacccgattggttagagatctaagctgaaatctgaaaactagaaggatcttgatttccaaccctactattctttgaattttagcttaccatgtaacttccagcaacgatctttggtgtgatttgttttcttgcagaaatcacaccaaagattgtttctttttgaatttttaggggattcttgaccaggaattgttagggctgaaacttcaggcaatgatggttttgatccgctcatcataacctgttttcagctcgcctctctttgaactttagcaaatatttcagtaatcaatgcgagaggcttgattcccagaagtcggcccctaacttcatcaagattgggatttaatcttgccaaaaaatcatagactcattctttttgaacctgctttttatatagttcagcatctccaggatttgaccatggaatttggacataaagattgatgtcctgccacaagcgagtcaaggcattgaaatattgggcaacatccagctccccttgtttcaaatcacaagctctattttgaagttcaaaaagttgtgctgagttttccaagtccaagtatgctagagttaatgcatcccacatctccttagcagtggaataatattgattgagttcataatccacggcataaccatagagttttgtgcatcccatgttttaaaagagagatctcctggatcaggtttttttattgaaccatccacataaccaagacaaccttgtcctcttatcaccattagagcagactgagaccattgaaggaaattttaattatgcagtttcgtggttgcgatttgaagggagaattttcaaaaaaggttggaaaggaggctgtagtggatgaacttgtagggatgggctgagagacttctgaagagaccttaaaaccagcatccttgcccttcaccagttaaggctgttctatacatctttttgtctcaattgacaccaactctgataccatgaaactaggcaggaaacaaaggaaataaaatagaaaaaaataaatcagtaaaggaaaaacactgcagaaaagggcagaccacaaagtggagattgctttttgttatacaggtagatttataggctaggttttgtaaccacaatcctttatttgaggagattcacactgactgtactttaggatatcaaactacctgtaatattacaggtagcaatgagtaacacaatctcccatatttagaaaataaaccaaatcttgaattttgttcttattcagagaataggaattatccgagattctctacaatttttttctaagagtcattttatatccatcaaccaatgggtttgattataaattctttcctaattgtttttaatctcaaatatccttttttaaatatcggaagtcttattaaattgtttccataaagtagtcacatgacctagaccacgtccctgccccttcctcgttaataggaattgatgatcttttaaccataccttttaatggttggctagtcaaagatgctgagcaaagtttgattttggaagaacaccatcattatgggaatttacatgtggtagtttagagtttattgtttaagtaaagcctatgcaatatgatcaaaacttggttggatttaatttgggaatgttacccaattaaagatcttaaactaaagagccttttcattgaacaaccaagttccaaactaatttcaagactcatcacaatctattctttccaacatactaagggatctttattttgatgaacctccaatatagtattgagcgtagtttagtacagttttagtaatgtttccaaatcaaaactgagtccacccatgtcaagcttagcacccaaagccttcaaaaaagtcaggaccaccaatggaaggagatagtttggaaaatacaaagagattgaatcacaaacaacagcaacatgactttccaaaaagatctatgtttcctactaaattggtcaaactgctcgatgagggtgggcattcctcttgggtgaaatagcaatatgtgcaaaataatgttcctagaaatttcgcacagtgagggtgaggtctgcttgttgaggactgaattttactgggtaagatttggtttgctgaaccatgcctgctccttgtctattctgcacattgagggcggaattctgttgggttagggaaaaattcccttagcacacccacaattcaccttttctgttccattctgatcaatgagggtggaattctgcttagttccatcagattcttccagacataactctcctctgtttttgcctacttgtaagcttcatatcttggttgtttcttatctgattagggtccactctttttacattgtttttcttatggagtctactacgttttggcacagttttaagttttataattccatcagaaaaggaaaaagggctcaaaatcagctttaacttcaatagctttttcagtgcccttcatctattatcttgtcacaatatgcttcattataagcttccaatgcaacatggttatgatcaaactggcatgtcattatcttaaagtctttaatgattctcacatgactttttttgatcagtgtgattctcacatgacttagaggttggctttctcatccttacagtctctcacatacaacaaagcttgttcaaccacttaaagaacaccgaaacaaaaacctcacttagagaaaaactgatgacatgtcactctatgcgatcttctgccaagactaactaaaactactatgatcatgaatccacttttgaacttatcatcttcagcaaccttcaaacacctttgaatagcagattcaatctttcatgaatgctttgatttgttttttcaaaaccttatacttgttcttcaagtttctttagggcaagcttccaatttagccatgggttaatgagacttgaacatcccatgctaaggcattgaagtatgctttcatggactctagtgaaatttgaaaaattcacaactggcagaactgggcatgaaattgccagtcacaactggtacactacacattgaactttaatgtttgttgtaaactatctaggaattgaaaatacaaaaaatcccatgtcctctttatcgatgtgtgtttgtcatcttctttccaaaataagagtatttatagttgacctccttaggcttattctctataaaatctttcttatcaaatctctaaatctatgaatccatctccttttcttccaattactttagtttggaaatctaaatccccacataacgttaaggcatttgcatgatggtggccaatattaattatttggtataggtagggagtttgttgaaagctcttagttttagatattgtgttatatgctcaaggaatttttgataactttaaatttttttcattgttggatggttttggtgcttatgcatagcttgttcaagcaagttgagatagattaggtttctctcaaaagtatgatttctatgttgataatcacttttaggagtttttcccttagaggtagatgtaaagtataaagtatatgttgtgtggtttgcatcactttgattaagatattttggcaataaaggaatgctaagattttttaggataatggatgattggggagattgttgattttatttttattcttgtatttaggcttttacttttgtagtttttatgggaattatatggcttgattgaagcttcatctgtatggcaagtaaggtaggtaaaagttgcatctagtgtggagttttccttgagtgggcttggttaagttaagatttaattggttcccatccaaacttacttgaagatcacaaagaataatttttatccaaagaaactcacctagtccatgtgccatggctcaaaactccattttggaacttgtcctaacaaccatggaatgttttttactcctccaagttatcaaattccctctcgagaaagtacaatagccaaatgttgaccttttgtccatgattgatcttgtccaattagcatttgtatatacctcaatggtcatccttccaatttctaaaacaaaatacgactacgaggagttgactccaagtgttcctccttaagattgtgcataaattggttcaccacactaataacatatgctatattggatctagtatgtgatggctaaattaatttaccaaacgttgattcctctctctcaacactgaaggaccatttagtgcttcattaagtttgtgaccaacctcaatgattgtatttgtcgacttgcactccaaaagtttggtttatctaaggtaatctaaaatgtacttttgttatgaaatcacaattccctccttgtaatggaacaactataatccttagaaagtatttaagccttcccaaatgtttaatttcaaaatctttttccaatttctctttaatctctttagttcttctaaatcatctcctatcatacaatatcatcaacaaacacaatgagagcaactactttcctatttccagagtgtttaacaaatagtgtatgatcccttagatttgaatataattcatgttcttcattgccttagcaaaccttccaaacaaaattcaggtctactgtttaagcccatacatagccctttcaattgacacaccttattccccttgaaattttcttgtagactaagtagtatcttcatataaaccttctctgaattcccacagaggaatgcattctttacatcaagctgctacaagagccaatcaaagttgatagcaaggagtaacaatatatgaatagtattcatctttggtgttgaagaaaggtttcttggtaagctataccataaatttgactatatcccttggctaccaatcttgccttatacctttcaagtatatcatctgtcctatttataaacacctacttacacctgacatttttcttcccaacacaaagatgcacaatctcctaattattataaatattttttcaaggaactcatctcctcttgcattgtcttcctttagttgtcataccttaatgcctctttgaacaattttgtttgtcaatggaatcaagttaggtaacaaacgctctctgtgatgcaaaagggttatcaagtgaaacaaagttagtcaaagggggttgagtaaaatgtctcttgccttttctaacaacatgtgaaggaagattatgcaacgcattggaattggactctagttgagttttagtaccttgataattggacgattaattggagtagcactcaaaggcttaggaacagattgtattcttttagagtaaatcttgagtggtgtagcatatctctaccctctcttttttgaatgatagaattaggaataatgaattgaggaaccataggttcaaagtcagtaggctcaagtgagtcttgaggatgacttagggaatgacttggagagcttaggaaaagaacatgcattagtccagggtcacattcaaaagcagttttagtgtatgacaaacaaacttggaaaaaattccttatcttcaacaaatggctccccttaaagataaggttgaagagaaaatggttgactttcatgaaagataacatccatagatgcaaaaaattttttggaagtctgatcatagaatatatattcctttcttgatggagaatagccaaaacatacacacctaagagttctaggatcaagttttgttctttgatgagcatgcgtataaacaaaggctgcataaccaaacatttaggtagttatatgagtatatagctgtcaaattggaggtatagcttgcaaagttgactcgtaggtaattgaaagttaagaactcaaaagggtaatctattaataagattagtagtagtaaggataacttccccttagtaggttttgggaacaatcatttcaaaaatcaaggctctagtaatttccatcaaatgtcttatttttggtgcaagaagattggtgaaaaatgccttatttttgtaagtgtcatgaaagatattgaaagcattctctccatcattgtttggatttttgagttaaatcggatgcctatcattttatgaaaaaaggaaatatagtactaacatcgaacctttgttttataagatagacctaggtaactcttgtatgatcatcaataaaacattcgaatcactttaccccaaaaatactttggacatttataggtccacaaacatgagtgtgaattaaaatgaaaggaataaaattaaatttattactcaaaggaaaagatacttgatggtgcttagaaagttcacaaatgtcataatgaaaattctgaatatctaatttttcaaacaaactaggaaacatttttttttaataacctaaatggtggatgaccaaattgaagatgcagtaaccaaactttagttttattaaagttggaacttttagataaataggagatgacttgagcatattgttccactttcaccttcaagtgggtatagtccatccttctctctagcatgtccaatcatcttcctcatacgaagttactaaaaaactaacttagaaggtgagaaattcacataatcaatcagagttttgctgattttagaaatagaaaataggttaacaaaaagctttagagcatgtagaacattttcaaggatgatatctttagccaaagagatatttccttgaccaactatgtgataaatgttccgtctgctagtttaattttttttttcttaggcatgaactgaaggttaggaagcaactcgaagaattggtcatatggtttgaagctcatgaatcgatgaccaaggggcttgaaaactgttcttttaagacattttggccaagaaatgtctaagaaaaacgtgtctccctagcttatcaagtcatgtttgaaaatgctttaattttttaatatcttctctattcaattctctctctcggtggatgttagtgtatggtggtttttcatcagtgttagcaatattagcttgaagtttatacccttggttttttccttagcctcgattttctattataaaaatatttggaggcttttcatggagttgccaccatggctctttggtatgtcttgactttggtattaaataccgaagaatccaaagaattgaaggactatagagaatgatcttttccttgatttcattctatacaggcctacatatttatacaattattcctggtaccaaaaataggaacctttctaagctaattacattagatccccttgattatgggattgtccaaattcctcctaaattacaaaaatatgttgctataacttccctaatcggcccttttacttggaacggaggggtgaataatcagacattctcaaggctggataggttcttgtttaatgagggttgggaaaaccactttggtgatgtgaggcagtgtgtccttccaaggccagtttctgatcatttccccattctgctggatgtagggggtgggagaagaggcccttccccttttagatttgaaaacatgtggttgaaaatggaaggtgttaaggagcttatgaagtcttggtgggagggggttagtttcaatggatcaacaagctttattttggctgaaaaaataaaagttttgaaggttaagctgaaggagtggaatagagactcatttggcaggattgagctcagaaaaaatgctgctttggaacaggtacagttctgggatgcaagggagaaaattagcagactgaacttggaagagctggaagctaggaaagaagcgagggaagattataaaaaatgggttttacttgaagaaatcagttggaggcaaaaatctagggaagtgtggctgaaagagggggatagaaacacgggttacttccacaaaatggttaatgcccacaggaggaggaataatgtggacagaatcaagattaatggagcttggtgcatagaggagaatgaaattagggaagggattggcaatgcttttaaggtactgctgtccagttcgggggattggcgtccttctatatccgggctgcagttagggactctggatcagttggatgctaatactttggagagcccgttcacggaagaggaggtgttcaatgcattgttgagttgcaatgggtataaagctccggggccagatggactttctatggctttctggcaatttgcttgggatttcgtgaaggcggatgtgttgtgttttttcaaggaattctatgaaaatggaaagtttgttaagagcctaaatgcaacttttttggtcttaattccaaaaaaagtgggagctgaagatttgggagattttaggcctataagcttggtgggaagcttgtataagtggttggccaaggtcttagccaataggctaaaaaaggtggttggaaaggtgatctccaaggcccaaggggcgtttgtggaaggaagacaaatcctagatgcagtgttgatagccaatgaagccattgattcgactctgaaaaataatgagagtgccatcttgtgcaaattggacatagagaaggcctatgataatgtggattggacttttattcttacagttatgcagaaaatgggttttggggagaaatggatcaggtggataaaatggtgcatatccactgcaagtttttctgtgttggtcaatggaacccctacaggatttttccaaagctcaaagggattgagatagggtgatcccctttccccttatttatttgtcatagcaatggaggtctttagtgcttttctccaaagggctgtagagggaggctatttatcggggtgtagggtcaaggggaggagtgaagaaggggcccttatatcccatttattgttcgtcgatgatactctagtattttgtaagccgtctcaagaccacttgactcatcttagttggttgcttatgtggtttgaggccgcttcgggattgagaataaatttggacaaaagtgaactcattccagtaggaagggtagagaatatggatgacctcgcttgggagtttgggtgcaaagtgggtagcttgccgtccacatatttggggatgcccttgggggcttccttcaaatcaacatcagtttgggatggagtggaggatcgattccgtaaaaggctaggaatgtggaagagacaatacttatccaagggagggaggacgactttaattcgaagcacgttatcgaatctaccaatctatcttatgtctttgttgtgtttaccaagtgtagtcagacggagactggaaaagattcaaagggatttcctttggggtgggggtaatttggagtgaaagcctcatcttgtaagatgggaagtggtgtgcttaagtaagaagaaagggggcttaggggtaaaaaacctatctattctcaacaaggctcttcttgctaaatggaattggcggttcgctaatgagagagaagctttatggaatcaagtgattagagggaaatatggagaagagagaggggggtggtcctctcgggaagtgagagaggctcatggcttggggttgtggaaagggatacggatgaactgggaattagtgagcaataggttggtcttcattgttggtaatggaaggagggtgaggttttggagggataaatggtgtggggattctcctttgtgttcgtccttcccgtctctatttgctttgactgatgataaggaagaaagtgtggcaaatgtttgggattccttggcggaggggggttgggggggatggaatccttgctttgtaagagctttcaatgattgggaagtagaggaagcgtcaagttttatggagcggttacatcgtagtagagttattgaggatgtggaggacagggtatcctggactgaaactaagagtgggaaattctcggttaaatctctatacttggccattgaggcggggggttcggctcggtttccttcaagccttatctggaatgcgaatgtgcagcctaagattagtttttttgcatgggaggctacgtggggcaaagcactaaccttggacaaggtgcagaaaagaggatgggctttggcaaatagatgttttttgtgtcttgagaatgaggagaccatagaccatctcctgcttcattgctcaagaacaaaggtcttatgggatctcctttttactatttttggggtatcttgggtgttgccttgttctgttaaggaaacccttctaagctggaatggttcttttgtgggcaaaaagcgtaagaaggtgtggagagcggctcctttgcacattttttggacggtttggaaggcgaggaattgtttggctttcaaggatgatgtggtgtcaattcaaagattgaaatactcctttattttttctctttgggctgaaacaaaattgtttatagttgattgccctctaactatagctaattttattgattggatgggtgctaattaggtttgtatgttggggctttttgttcttttagctttttcttgttggagggtgtataggtttgtatttcttgagtcgccttcttggtgtctctttttttaatagaatcttttttacctatcaaaaaaaaaaaaaaatattcttccacactccccctctaaagctagtgaataaatgttttccattcttagttttgacacacttgcttgaaacactatattgcttaaacctttggcgagtatatctgcaagttggcagtcagtagatatataaggagcatatatcaatccactatctagtttctccttattacaatgtttgtttatcttttttttttcttttttttcttttctttttttttctttttttttttaattagaatgtctatttattgttatgtgcttcgttcactagattacgtgcaatgttgattgtagattttttgtggtagtaaagactcattaggccatcccatttaattttcaaatcttataaaatgatcttcaatcatagtaattcacaaattgcgtgagccattgcatgaaattccgcttttgtactagatctagcgaccaaactctttcttttatttctcctttttacttgattcccaccaagaaagttgcaatacctaatggttgatcttctatcaaccacaaatccaacataatctgtgtttgtgtatgcttcaagtactagccccaagcttagtttaaataggatgtcatttcttggagaccttttaagatactgtagtacttcgttggcgggttgcaaatgagcttcttttgaattgtgcatgaattgactaatcacattcacaacatatgttgtatttggtctcgtgtgagagagacaaatgtgtctccatctagacacgttgatacaaatacatttctctatctacaacatcttccttaacctctctaagcttatgattaagatctattggtgtgcttgctagcctacacaccaacttccccgtttctttgagaaggcttgttacatatttttgttaagaaataaaaattccctgttaagaatgtgcaacttcgataggaagtacttccaacctttctaactctttaatctcaaattccttactcaagcatcatgttgatacagatacatctctctatctacaacatcttccttaacctctctaagcttatgattaagatctgttggtgtgcttgctagcctacacaccaacttctctgtttctttgagaaggttcgttacatatttttgttaagaaataaaaattccctgttaagaatgtgcaactttgataggaagtacttccaacctttctaactctttaatctcaaattccttactcaagcattgccttaaagtctgtctctcattttcatcattcctcatcacaatgatgtcatttacatatactagaagagttgtaacttccattgaatttgaatgcttgatgaacaacgtatggtctctttgactttgtttatagcccatatagagcttccttcagtttacacatctttttagtagctagatcactcctaaacccaggagggacttctatataaatttcttcttttaggtcttcatgtagacaccatatgtctgagtgtatcctttagccaccgatcttgctttgtacctttttaatgacctatttgctctatacttaataatataaacccacttgcagtcgattgacttttttcttgtcggcaaatctaccaaactcccaagttttatccttctttagagcctccatttctgcattcatggcttgtttccaattttcattagataaagtctcagatagagttgtaggaatgtgaatattgttcaaattcataagaagactctaatgggatggtgaaaacttttcaattgatacaacattggaaaagtgggtaaaaaggatgtttagtgcactccctggttcctttcctaattagcaaatatggagattataatctatggtttttgttattctaaagttctttcttggattagaagggaggacaataaaaagttacctcatttccaaaagtcggttcagattcatgaacttgtataagtcttgggactactactttcttcattgagaacactttttgagtcattctatccttaggagcaaccaccataggctcactggtttgttcaacagtgtgtttaggagatgatacaaatgatgaatcaggaacaaagaggggtacagataactcaaaacactttgggaatggaaaagcaatcattgagaaagaaatctcgatccttatcttcttcaatggaattctctccctaaagatgaagaatagtaaaataagattcactttcgttgaaagttacatttgctgagacaaaagattttttggatgatggatagtagcacttatatcccttttgagttgaagaatatcccacaaaaatacatttgacgattcttagaaccaattttcccttattttgactgtgaatatgaacaaaggacatacacccaaatatctttagaatgagatggtttgtggttcttgtataaggataaaatgttaagagcaattccatgggacttttgaaacttaaaattctggagggtaagcagtttatgagatgtttagaggttaggacgacttaccctcaataagatttaggcacaatattttggaactagaaagcttgggttgtgtcaagtaggtgaccatttttcctctcatcaactccattttgctatggtgtatttacacacgatgtgggcaattactgcaccgatctccagtatatacttacaaatttatatcaacgagttaacttatttttaattaaaaaaaaaaaaaaactgttttttctacttgttttaaatgttttattcttgaaaactgtgtggagagtaaaaccaaagatgctcaaagtggggaaaaaagaaaaaggaaaaaatatgactttgatttttcaagctcgttttactcatttgtttcacaggctcatgcatactttatgggttttttgcgattaccaggcttgctgcttacctagattctcttataccataaactttcattcagtttggtgtggccagttaacacaaaaaagaaaaggaaaaagaaatttaaaaggctaaacattctccaaattaaaaagaaaagtcagtctgtgcaacagtgttgtttgtcttttaccttaatccccatgtcgtattatacagcccagtgggagtttatgctttggtgctcaggaggtcctttgcccatcttctctttgaattttgtgcattttttttttcatatggtttgacactaccactactgaacatttttattttttaaaaatttcagtagactttctcatgaaaatatacatggagcactcatgttttgctcaacaattattccctttggaagggataactgtggattcctaaccagttctccttgtggtcttgttggagggagagttttttatgtagtcatgaattgttctatctatttttcagtggttcacttttctggtctgatctgtcaaacaggctag

SEQ ID NO: 13209 - DNA, 1571 bp, Vitis vinifera
  Intron number 1 from transcript GSVIVT01008116001 (locus G SVIVG01008116001) derived from phytozome v7.0 (chr-ID chr1 7; pos 5655947 to 5657517 reverse strand)
tcaagatataggtgaagttagtaggatcttttcgtgtgtgtagtttctcaattgaaagtttctgtttggagtgaggctcactgccctttatttgtgacaagtctcctcaacctccctagtgaccataccacatgctattcccctttgttctatttttactgattcatgaatagtattcttattttctttttgccaacacaatagtgacacaaattggccatatatatatatatatattttattttattttattctttttttcaaattgcttgttgcaatagttttgacaaaatcaactaggacgattatctcaagtctcattgtggtagttttgtaaaatcaaattaggactagccaactatccggtgtatattgggttagagctgagacccattgggtcatttagatgtcaacttccaatgaaaatgaattatgatctagttttcagtgttacataatgctcacggatatttgtatttgcccagctagcatggcagaaatgtttaaatatggtcatactcacccacctagaatggcagaaatgtttaaatatggtcatactcacccacctagattgtgactttttttatttcttcttccagtatctctctctttttcatactcagctggaatcttgaaaccaaattctgtaagtataggattctaggattttaaagttgaatatattcttgaacttggatgtctgtagcttgaaatcctgtccttgtcattcttccagtgcttgccctgttttatatcctcaataggtttatgttaatgacaatcatgtacactgggagattgtttcatattgtatcatttcatcacaatttaaaactcactcacctaccactggagattgattgtatgtcaaggactgtttatttacaggggaatgtgctggacggaggcaaattatttgaataaatccaggaatagatctggtcagagaaacatattaggctgatatggtccaatgctacttgcctaacttaatttttagttgttttcttatttttatattaaaaactgaagaaagagtaagacttgcagatgtcacttttgcaaagtgcaacgatgtatgatcccaaatgacattaatttattccacaatgccatgcatctattgatgagttgtataatcagaattcaatatgatacatgaacctaattatcaggttttgatgttttcatgaaagggaattatgataaggcccataagttccaaatagaaacttcaaatcacgtaagtctgctgcctttgccaaacagattattttccaaacagtactctccagtgggatggctagtttatcagttttgcctaagaatcttgatgcaagaaatttgttgccctggacatcatgcacagggaatgatctgttagcgtgacatgacaggttcatgtgagatggcttttttatgatttttcatttgtgttgcactcatcagtggtttgacgtttgtttctgcttattatgtgttgaacttgcattgttttgatcttattttctggggaatgtgtatgtgcttcagggtttcttgtaaaagaaaggttcaaattagaaatc

SEQ ID NO: 13210 - DNA, 11757 bp, Vitis vinifera
  Intron number 2 from transcript GSVIVT01035987001 (locus G SVIVG01035987001) derived from phytozome v7.0 (chr-ID chr4 ; pos 6872412 to 6884168 reverse strand)
tgggtatcacagaaggccttatttcattttagccggtaacattacactttatcattttgaattctctgtcagattttttattcaatcattgaatgttactataaggggatcttcaaatggaagtatacatgctgccttatgatctgattatctaggtttaatttcactgatagatttttttatcttttgaatagattataaatatcactaatccttctttcaatatttctatgaaatccatctgcttttattttacttcataaattgcatatctgagtgacaaagatagatgttgtatcttcatttattgctgttttagttgttcttatctgttgagataaatttttagtttatgtgggctttggttgatgtggattaagcttgtagaataattggcctttgcccaattttggatagtctactagttgttgccattatagactttacagttttcatatccttgatctgttggaggtgagctgcttgtgttacttagctgtatatgccaggtggaagtatccattgcatgtatgcacatataaaagagggagcaatgtttatgtgcttaggcgaattcttttgtagcttaactctagcctctcttttgaagggactgatttaaggaatgcagttgtgggtgcaggtttaggatttggactgtgtatcagttggatatgttcaacctctttcttggtcttcgtagacttgattttttgacacaaatgtgaaggatccaatgacaaccctatccattaacttactataaaacttgctctacattgttctattcagttgcatataggctaaatcatccgtccttggcctagaaaagacgtattcttattattataaattttcttaaagagggttgtacactaattaatatatctgccaaaaagacaaggtaattaggattgccatacaaaaattgttgagtctgacagaagtttgaagtgtcaatgtagcttggcttgttaactcatagaattcactaagagacttgccacttggtaagtgatcattgatcttttcctttcaagcagaaagtaaaaccaggttctaagtgggggcagggaagtgcttgtctgcttgatgcttttaagaggctcccaacttttgagcccacataaatatacatgtgtacacatgaatatagtgaggtaggtaaacatgtgtacatgaaatttggactaaaaatagcaagttgatgaaaatatagaaacaaacatatcttgagcatagactgtaagtaaaaaaggaatcatgtacttggattgtgctccctctttttgtgaggcaccacttaattcattttgtttgcttgcctatcgggaaaaaaaaaattaagtaaaaaagaattcctaatttttgtatcaagaaagcaatggaaactaacttccttttaaatttaaattctaaaattttgaacattaaagtagccattcctttatttttctagaattttattctgctaatcaccatgggaacatattttcttttaaaaacataaataaatttcctaaaatatcatgtagtaatagttataaaccatgggagttgaacaaatatttaataacatagctgtcagttttgtcgaatattcatagggttaccattttacttctttactgagctatatgattttcacaaatgaaataggtttaagttttctgaaaactcaaacttgtcttaagctagtcaaggatatatcaagaaaaagaggcagttgttcttgaaaactgcaagtcttgcatgcttctagataacaaggcatgcagtatgatcttcagagcatcagcatccccagcactggacatttctaggacttccttttcatgctgtggttagcatggttaggatcagccacagggagatacagaatagttgccagctcaatgcccctactatgaaacatatttagttcttgtgagctcattcttcactgatccttgctcctgtaatttggggcacatagttctgatgttttcatcatgtgctcccagagttaagaaagactcctttccaccacttagagagtgtagttttgattaggacaaaagttgtaatagatttttcatgcatataatacatctgaatcatagaatgaggtatcttacttggcttatatgtgatattttttagagttttcatgaaggctgaaatagagacaactgctatggaatttgagagaagtcagaaaatatccaatctcatattatcatacttctactctcactgggaatttttccgagaattggtgaaatgagcatgattgggaaaaaaaggagaaatattttcttctgactactatgttgtaccaacaaataatttatgcaaactaaaaagtctacatggcatttttttggcttgttcaactagttggtgttgcctgaagtggtccactgcgccttcattgatgcatggctgaaatccttactaagtgagcttggtgttgaggtggtctcataatattgttcatctgacttccttaaagaattttattgccctaaattaagtgtggtcacctgaattagtacaggctactcttagacaacttttgagaatacttgtaggaaaacaggcattactcttcttgaatttatgaagtgttttgagaattcttcatataagatgggactatattaatgcttttactgtattggttggatgtgtatatttaaagagattctttcttgaagtctgaggaaaacatgaagaagaccttatagttgggcgtgtttgaatttgtcttttaagttaaacagagatgtactccaacaatacattcctttcttttccttttgtataacaaatgatgtggggaattataccacattcttgtgcagatacagtctgaccaatactttcactctcctcttagtggtttgccacctcgatataagttttcctagactttttattgattgtctaattcacacatgtgcctatagttacatacaaggtacataataatagtgccccaaactatggagtgtatttatacatggtgctctagcttcatcagtcacacagcccctctaacaacagttttgacagttaggagtagaacaccaataccgataagcagctctatgttatcttgttaatcaaaataccatgtaatatttaagtgcaaaattagcctacaagagaagcaaaatcctagcatacacgtagtagaggttttttttgtttttgcccacaggaagggaggggtagtgtggtgttagctcaggttttgagtattgttccttcgttccctaatatgaacatcaattgtgttggtttgcatggagatgctagtatgcagtggaaactgatccttttaattctaaaaatgaaatctagggtaaatacttatataggcagtccacaagccttgaagaaccctttgatggccttttgcttccaaatcatcaacaatctttcaccacaatgacaatctctaagtatgcacaaatgtgtgggcaatctctatgcttttggaaacaccaatagtgagatcctagggagtggtggcacaaccaagggggccttgatttttcttctccaaattctatttattatacagccctatactgctttatatggtgtctaaccctaagagcaaaaagtccaccatgcccttagcaagcaaaaggaccaccttgcctttaacgaaccaatcccatgctccaaggtacacccaagactatggtacaccctagtcttccatcaaaccatttaaattgtgcatacataccaagattgcttgggtgaggaccaccgaacccatagaataatcagttcccatagaatctcaatgttttataattaatcttcattccactaaagaagattaattgcacttctatattctatgataactgttgaatataatgtatgtatagtatactatctttccttgttaatataggtcacatgtatggtagttaggactcctagccttgtatatatatatctctcaattgtaactagctattacatgaatgtgaataaggtttttctcctctctctctctctctctctcaacatggtatcagagccaaaggagaaaacctaatttttttttttcggtttagccgtgtactcaattccggcgaaccgtccaatgaccgtgtctcactccggtcccctcattctcttcccgaaccaccccggacaacctcatcgccgtcggatctccaccacgccggcaaccttttccgacgaaattttccggcgacctcttttccgggcaacgaccacatattccgaaccgccggaggctgatctacacgccagtggaaaccccatcggcaaccggaatctcacgcgccgctcttctcctctggactgtcacccacgcgccggcgcgtgacggcgcgtggctcactttccggccacttccgacacctttccaggctcgtccggcgccgtcttggccttctagccctccggcagtcctccccgagccctgcatctccattttttccctgtttttggctttcttgccattccggccacctccgacagggctccccctccatctccgaggcttgggtgctgcttctcttcctctccaggcacgacatgacctttttttctccattgattgcacctctcacagccgtggtttcactgtttttctctctccgccgaaatctgaacccatcttagggctctcttcgatccaaatacgtgaatatgaccaccaaaaatcagatctttacctctgttctctctggatctcctctgattacctcagagaaattggtttgcagtgagaattatctctcctggtctgcctctgttgaactttggtttatgggtcaaggatatgaggatcacttggttacccaggaggcagatatccctgaggttgaccgcgtacagtggaggaagatagatgcacagttatgtagtgtattatggcaatcggttgatccccggattcttcttcatcttcaggcctataaaacttgttttaaattttggactcaggccaaaggattatacacgaatgatatccagcgtctttataaggtggcttctgctattgtccatctcagccaacaggacttggatctatctacttatattggtcagattgcctctcttaaggagcagttcttgactgtgatgcctcttactcctaatgttggggctcaacaaacacagcttgacaagttcttcatggtccttactcttattggcctccgtccggatcttgagcctattcgtgatcagattcttggtagttcatcagttccgtccttggatgatgtgtttgctcgcctcctccgtatctcgtccactcagactgtgccatctgatagcgcttcagattcttctgtgttagtttctcaaactacctctcgaggaggacgcagtggtacccgaggtagaggccaacgtcctcattgcacctattgcaataaacttggccacactcgcgatcgttgctatcagttacatggaagacctcctcgcactgcccatatggcccagtcctctgattctccgctgcctcagcctccgagctcctccgcatctcagacatctcaggcttctattgcctctgttgcccagcctggtaatgcctctgcctgccttacccacacatcttctcttggaccctggatttcagattctggagcatctgatcacctatctggtaataaggatcttttctcctctattactactacctttgatttacctactgttaccttagctaatggttctcaaactgtggctaaaggtattggtttggcccttcctctgccttctctacctctcacttctgtcctttatactcctgaatgtccttttaatcttatttccatcagcaaaatcactcgtactcttaattgctctattaccttttctgataaatttgtgaccttgcaggaccggagtacggggaagacgattggcataggacgtgagtctcaaggcctctatcacctcacctcagattcatctcctgcagtttgcatttccactgatgctcctctcctcattcacaatcgtttgggccaccctagtctctccaagttccagaagatggttcctcgtttttccactttgtcgtcgcttccgtgtgagtcatgtcagcttgggaaacatactcgtgtctcgttcccaaagcgtttgaataatcgggcaaagtctccttttgagcttgtccacactgatgtttggggtccttgtcgaactgcgtctactttaggatttcagtattttgtcactttcattgatgactattctcgatgtacttggttatttttaatgaaaaatcgagctgagttattctctattttccagaaattttatactgaaatccaaacccagttcaatatttctattcgtgtgttacgcagtgacaatgccagggaatatttttcagcccaatttacttcgtttatgtctcatcatgggattcttcatcagtcttcttgtgctcatactcctcaacaaaatggggtagctgaacgcaagaatcgacatcttgttgagacagctcgtactctcctcctccatagtcacgttccttttcgcttttggggggacgctgttcttaccgcttgttatttgattaatcgtatgccctcctctgtcttacacgatcagattcctcactcccttcttttccctgaccaaccactttatttccttcctcctcgtgtctttggttgtacttgctttgttcatattctcactcctggacaggacaagctttccgccaaagccatgaagtgcctcttcttgggatattctagacttcagaagggttatcgttgttattcccttgagactcatcggtactttatctccgctgatgtcaccttctttgaggactaaccattcttttccaccacttctgagtctcttcctgtttctgaagtcttgcctattcccattgtctccccacctgatgctatgccccctcgaccacttcaggtttatcatcttcgccctcgtgtcgttgctcctctcccttttcctgaggcgcctgctgactcacttcctatcccttcggcttcacctgccccggctctgccttctcctaatgacttacccattgctgttcggaaaggtactcgctctactcgtaatcctcatcctatttacaattttttaagttatcatcgattatcttcaccctattctgcttttgtttctgctatatcctctgtttctcttccaaagagcacccatgaagctctttcccatccaggctggcgacaggcaatggtggatgaaatggctgctctgcactctaatggcacttgggatcttgttgttttaccctctggtaaatctacagttggttgtcgttgggtctatgcagttaaggttggtcctgatggtcaggttgatcgccttaaggcccgcttagttgctaaaggctatactcaagtttatggttctgattatggtgacacattcttccctgttgccaagattgcttctgtccgcttgcttctctccatggctgctatgtgttcttggcctctttatcagttggatattaaaaatgtcttccttcatggtgatcttgccgaggaagtttatatggagcaacctcctggttttgttgctccgggggagtctggtttagtgtgcaggttacgccgttcactatatggcttgaaacaatctccttgagcatggtttagccgttttagttctgttgttcaagagtttggcatgcttcgcagtacagcagaccattcagttttttatcatcataactccttggggcagtgtatttatctggttgtttatgtggatgacatcgtcattacaggcagtgatcaggatggtattcagaaactaaagcaacatctttttacccactttcagaccaaagacttggggaaactcaagtatttcttgggaattgagatagctcaatccagttctggtgtggtcctttcccaaaggaagtatgctttagacatcctggaagaaaccggtatgttagactgtaaaccgatagacacacctatggatccgaatgtcaaacttgtaccaggacagggggagcctttaggagaccccgggagatatcgacggctcgtaggtaaattgaactatctcaccattactcgtccagacatttcttttcctatgagtgttgtcagtcaattcctacagtcaccatgtgatagccattgggatgctgtaatccgtattcttcgatatatcaaaagtacaccaggccaaggtgtattgtacgagaacagaggtcatactcaagttgttggttacacagatgcagattgggttggctcacccacagatagacgttccacttcagggtactgtgtttttattggaggtaatctaatatcttggaagagtaagaaacaagatgtagtggtcagatctagcgctgaagccgagtatcgagctatggctttggcaatatgtgaactcatatggttgagacatcttcttcaggaattgagatttggaaaggatgaacagatgaaactcatctgtgataaccaggccgcattacatattgcatccaatccagtctttcatgaaaggaccaagcatattgaagttgactgtcatttcattagagagaagatcgcatcaggatgtattgctacaagttttgtcaattcaaatgatcaactagcagacatcttcactaaatctctcagaggtcctaggattaaatatatttgtaacaagcttggtgcatatgacgtatatgctccagcttgagggggagtgttgaatataatgtatgtatagtatactatctttccttgttaatataggtcacatgtatggtagttaggactcctagccttgtatatatatatctctcaattgtaactagctattacatgaatgtgaataaggtttttctcctctctctctctctctctctcaacaataacaaaaagaagcaagatgcatgtgttcaggtcctactataccactacatgttgtttcccatgaactgatatccataactcaataaaggaagtgtcatcaacttactagtttacctctttctccattgagttataaatccacctttgtgatgatcaattgatatatctatatccactaggataaatatcaaatttaatcaaatagaattactatggcaatagatttacatgatcatccaccttatggttattcaaggggatatgacggtctcattgaggaaatatcacggtgcctctgttgaagatgtttgttaccaacggttgaattaatgattatccaagttccaagaatatacaattgctttaggatcttacttttatgaaactcaaaataaccatcaacccatacatcggtgcaacaccttctcaaggttaagagcatatgcaacatagtaactaggagagaaggcataacgatgtgaatgtaattgtgacataccactccattggttttgttcaatgtataaaccaatatacactggtacacatgccttaaagtctagctttaatgaccaggataagccatcccaccagttagggaagcaacacactacaactaccattgagtggcccaaactcatgaattgttgtaaacacttgtcaagtacaagtgacctatggtttgtgccctctgtgtaaccactctcatacacacagaccaagtacaatggaaactgattcagctgaatgctcatataaatcgtactcaatggaacaataagagaatgaagtgtgcaaaacattattattattattattaaatgataaaatattctcaaaagtaatccttgcttttagggctaattctaacaagttggcagtacaagcaccaatgtcagtgtcctaggattgagagagagaagcaaaaagaaccagtagagggagagggcatgagcatatctttgctattgtaaaatacatatctgcctacagccagagctacttatgctagctgatatgctttggttgcaaaaaattatgagttgacagttcagcactggaacatatatgcaataccatcttgataataagctgcatcattcagcagataaagtgcattgttttcagtatcatatcttgtgaatcagtcagtacatatctgctagtggcgttggctacttatactagctacaggttgataaaagatcatgggctatcagttcaaattagactttatcttctgatactatccaatacaactctcacaaacttgcatagatccataaggctgtttaaatgtgtaaatacaaaagaagagctttgaggggttcctaaaccttttatacccctctctctcaacactctttgttggtttgacctaagtatggaattctagaggttgaaaaaggatttggtaccactgtggaactaaaaccttctcatataaaactatgcatttaaagttggatttattggagtttaggaaggtttcatctactgattgttatggagataatagatatcagatgaaatttgaagagttctctaatctaggggttccagtcattgacgtgtttatgttgatttctatatatgtttagcaaatgtacttgagagtttgatgcaaaatattgatcagctggttatttaactatgtaactcggaccatgaaaatgacagaagactcaatagaaaccaacgatattgtaatgcacatatctcactctttcccactcaatatgatgtaaaaagtaaaaaccagtgaaactttcattgacatgttaactaataagtgctggcaaaaaagttaacaaaaaatgtttcaatataataatatgtagaaatagggtgtaaaggtctgtgtttgtgacttctgatggtttgcttgcccaaatttaaaattcaccactctatctattatccacacacaatagaccattgcttgatatgctgttttgaggccaaaatgataggacaacatctaccagaatttagaccaatgatagcaagagactagagaaagaaattctagagagttaaaactagacaggttgaaagatgccatatagttgtgacagttttcttcctggagcaattaaacatatatttataattcttctcctgatctcagagttcctccagtactttcagtgcatgtaaaatttatactagtgaggcctagaaagagaagacttccaaatgtatggatcaaccttatcaagtttacaactatgcaaaaatatagaatttcctgtgattagatatttcagacaaatagctcagatcatttttaacttctatttgctaggcatttggtgatatagacagtttagaagcataattcttaattggtaaggaaaaaaagtagaatcgaatgtagacaaggaatgcttgtctattgtaaagtaagaaggaaagagttaaaatgatgaactgaaatataaaatctcttatgaccattattacagatgttgagccccaatctgagcacatcatcaacatgaacagttggctaggatgtgaaggcaccatatttcatcattcttttttacaaatttaggaagttcatgttgtgatcattcaactagtttgtttatattttgacaatcaattagactcttgtacccacattcaaatagtattggaggtcaccaagttatctgacacagagattcccttgcatctgcacggttgtttttatgcatttgctctttatctggatagcaaccctgcactcaaatggaatgatcacttgatgggatgagagagaagcatgacaattgtttaactgaagcagttttttcctcagatagtttgattcatctcaattgcaggtcttcttggtgtgatctct

SEQ ID NO: 13211 - DNA, 7528 bp, Vitis vinifera
  Intron number 1 from transcript GSVIVT01034677001 (locus G SVIVG01034677001) derived from phytozome v7.0 (chr-ID chr1 3; pos 7508634 to 7516161)
atcctctcctccaccgcctccagatcgctccctcagtactctccctctctttctatttgttttctgttttatttgatttggctgcatttttggtttccttgtaatctaatggactgattcattttagtttcttgattcatgttgaaaatttttatttggtggttaacaggtttttgtgataccatgtagaatattgtagttttgggtgtttatttcgttgtgttttttcttctttttttttttttttttttttttaattcggtgtgcaatttttcttttctttccttttcttttcttttttggatggatttggggatcgtagaattgtgaattggttttggtgtgtgaagtagatggaccgtgggattggaattaggatgggatttgttgcgactaaatgcagagcaataattggggtgttcgggattgttggatttgtgtcaaaatcgcttgatatattctaaagtttgaaaatttgacgttgaaagacagcttgagaaatgatgttgcaactacctctcgaagttgtgatgtgatcatgtggatcatctgacatattatattggttgtgcaattctctgaacacaaggatagtaggtgttggtaattccactattttttgtgcttagagacaggttataacttagttatgtgtggcttctgagaaatgtaggaaagaagagagttcgaacgttgggtcttttcttatttaggaacaaaaaaaagaacaaaagcttctgatcgattgatcctaatgcaaaattttgttttatttttctttccttagttttctcagcaatcaaatggaaggttagataaaaacttgaggtaatactgttttctgcttaatgcaagtaatcattgccacttgggttgtactaatggtttatgatgcagttaaggactttaagttatgaattagttgctgcatggattaaggtatactcagattagtgttaagaattgttcaattagacataagtcatatgactcatatatgcttatgtatggatgcatgtgtcatgcacatgtgctcaaggttggatatgtttaatgtattatgacaaacccttgtggtaggctaccttgatacttggatggattggaatgaccccccagcttcaacaacttcacaaatttaccattggagttattttctttttccattggtccttggcttttgacttttttcttttcttttcttttcttttcttttcttttctttcagttgattcatttgctctgccacttttctacagaggagagtggttggtgttacaattacagtatgcattgaagataatgattgaaaatttacgagaagataaacgtcatggtgcatatcattttttcatatgctactaaaaatatgaaataagggaaataataatgccaaaaaataaactaaattatgcgcttttactttaaattttgcatcttttttcaatgagaatttgaaaagttaaaatatgtatttagtcatagtattatttaatccatatggaaggctggagcctttatgtagcttgtggctaataggagggacaatgccaataatttgcttcaacaaagccttcagtcatgagtgattgatgtcttatgtgttcagacaatggggagatggtagatctccttttccttaattgttcaacaagaaggaagcttagactcttcacattttccatggaatggataccccataaaacagcaattagtctgatggtaatgacttttaataggtttggaggcaaccataagagtaggatacttaggcgcatatctacaaatgtttttttaggtgatctagttggagaggaatgccaagactttttaggataaatggagacctattgaatcaatttgggatgtggtgttttgcttctcttctgtttggtttagtttccccaaattttttgcacatctttgttaagtgactcatcctagagtggaaagttgcttgttgtttgaggagtaggcctacaatagtgttttttgaccagattttttcctttggtgggtcaattcaaactcaactttaatagtagttttgtatgttatctagaataattaagcatttgctgagttttccaagatcataagaaaggggtggttagagatttttccattcttgttggagggtttggtgatagaggcccaggtactacccttgtgggaatgcttgatccaagtcaatactttaggcttcagtaatttcttagtggagaatgattcattgacaattatatcttggatatcctaaagaaataggcccttggatgtagggttctttactacctaggactttagatttgtctttggagtcaaggtgtttcttcgatgcgtttcttgcttagtcaaccatttgctaggttctttgcattagcatggtgcaattagcatggaggagttttttgtggtgaatcacatgcctccattatttgttatttatttgtgtctttgtttttcttttatcatgaatgacaatgagtgaataatagaaatttatttattgtatattttggggacctaagctatttcttaaattgccaatagatacaaaatataaggtacaaagtttaatgaaaggtctgtgtacctcaactaaatgcaaattcaaagcccaaaatgtatcttcaagtgtttatgggattgccctagttcttctcctcaactttggatacaattaggcatctcctacatcttcaaccttttttaggtggagtttggtgaataagtgaaaagaaaattgaaataaaaattgggaaattgaattttgcttggattgacatgctttggtagactactagtgaaagtcctaactaacaagcttaaaaaagtggtaggtaaagtggtctcagctttccaaccatttggaaagggaaagcagattttggatgcgatcctcattgctaatgaagccattggccctaggatgaaaagtgtcgagaagggagtcctttgtgagctggatattgagaaggcttttaatcatgtcacctagaacttcctaatagtagttttggataaaaaatgggatttgttcttgagtggacaagttggatcaagtggtgcatctctgtggcttgtttcttcggtttggtacatggaaccctttgactactttcaaagttctagaagattgaggtagagagaacttctaccgccatatctctttatcctagctataggctctcttgtctatcctatatagggcaaaggaagggggttttatcttaggcttctcagttagtggaagaggagagggaatggaagtgtcccattcgcttttcactgatgatactcctatcttttgtgatacctcaaaagagaaaataaaacactagagttggactttcatgtggtttgaggcaatcatagtccttaagatcaatatggagacaagtgaattaagcccttggggaggttgcctatgtggaagagcttgctagagtctttggttgcagtgtagggtatcttgaccttccactaggaactcatttcaaattaactcggatttgggctgtgaaggaggagagatttcaagaatgacttgttatgtggaaaagatggtacttattaaaggtaggaaaaatgaccctatttaagagtgtcctttctagtttgtcaatttacttcatgtccttgttcattatttcgagaaaggtgagtttaaggttggaaagaatccaaagagacttcgtttgggggaaaggggctcttgagagcaagccgcacttggtgagttggtctttaatttgctaggacaagagaagtgaggggaatactacccatccttaacaagccactgcttagcaagtcgttgtggagaatttcttgtgagagtggctccctttggaagcgggtaatttggggaggtactgggaggggtgagagtgtggaaggctatcaaaagcggatgggaagactttaaaagtagaatggtctttagggtaggaaatggtcaaagggttaagctctgaacggatagatgttgtgagaatgagcccttagaggagtcctttcccacatttttttttccaccctccctaatctactcccatgtcttgactacccatgcatctttaatggatgctattgagaataatgtgggaaccctaagttcacgagacagattcatgattgggaactagacgaggtggaggccttttttaggtaattataggcataatcaatttgcaatggtttaaaaggtaagatgatttggcataacacaaattatggcattttctttgttaagtctctttatccctcctttttcattgatagtttagatgtgttcccttcacgattttagaatccttgggtccctatgagggtgggtttttcatgtgagaagctacatgggggaggattttggctatggatcaacttaaaagaaggggatggagaataccaaacagatgctatttgtgcaaaggaggcaaagaaacaattgctcatatcctccttcactgttcaaaagcagtcatgttgaggcatcttgtttaggctctttttgggatagaatgggtgatgcactttagtatgagagaggtcctctttagttggtatagatcttttgtcatgaagaagaaagaaagtttggagagctgctccctttgtgtgttttgggctatttggaaagaaagaaagaaataagagagctttagaaaacattgaaaagggggactaaacaatcaaataagctttcatgcatattttttaggagtgagttagaatctacataagtgatagttctttgaccatgttagacttcattgattggctgagctctagttgaggtgaggaagttgttttttatgttatcccttagctttgtttggccttttggggcctttgtatacagtgtgtataccttgtgcaccccttttattaggcatattctatctttgcctatcaaaaggaaaaaaaaaaaaaagacatgctctggtaaaatgctggataggtagtataggaaaaagaaagagttagaattgggttggagaataaatggaagtaaaataagaagaaaagtaggaaataatgtaagaggaaaaataggcagcaatcaatgaatcttcaaatctgctttattattcaccaagagtgacctttatatatattttttttttgataagtaagcacatatattaacagaaggcaaaaaagccgcaaagcatacagggagtatacgagacaactatggcctcccaaccaaaaagaacaaaacaccccaacccctaattggaggctaaccactccaagaagcctttatatacacagtctacaacacatctagcaaaaacaaacagctaaaattttaagttgatactaacaacatggtaaatttgaaacatgataaactaaaaaaaataaatcctcataattgttaaatgaaaacataagtataaaatcctaattaaaagatacatcccttatacctatgcttgtgataagtttgaaaaggtgtaattggcatgtatgctctgcatcacccctcctttagtttttgtgcagctactccaccaattatgcgatccctttttccttctcaaaaactgaccataagaagtcattttgaattctctcacatcatgacaagcttaataggaatctcgaaaatggtgaaggcaatgtgtggggatttaagcaataggtgatgaaataggagactgtccctcttaaagatagaaaagtcttctttcatctatcaagtctcctcaaaatttgttctataattgggtctcagaagtaaggtgccttggggcttctaagtaaggttaaccactaaacctacactcaatggaggaggtgagcctccaaatatgcttgtgttatgacaccagaaggatgctttctcaagaatcttccaagtaatgctagcatctcattttgataaagatggatgtgaatatgcatgtataattggtgtgaaagtgtacctaattgtaaacctaaggtaatcacccaagtggaggatgaattgattgaaagatactttttcaaattttatcaaaattacaagcctatatgcaataataatgatataaagcaataatcaatgatgtgagcaaacaaataataaagagattagggaagaagaaacaaactttgatgtacgtgatttgacagcaccttagctacatccactgtcctaaagctttaatccaagcctttaggttgctccattatgcaaggatccttcaaaccaagggctacaatatacaattggtttctaggtaccaacaagtcttcacaatttctttcaaatgatcttccctcactaagaaccactctcttaggggaaaaataatcctttgatcaaaaggagtataaagagctagctaggcaagtgagaatatagtgtggaaattagctagacttaattgtgcaatcaatggggttgcaagttaggaataattgtattaaggatgtattggaagctcaaattcaatctatagaatgttttgcaagtggtaggttgtttctaaatgaagtttgggggctttaaatatgagatttttggaaaaattggtttttagatgtagtcttcccctctactagttgactatgcagtcaatcacttgactacccattagcatttaacgcatatcaggtgaccttgcacaacctattaaccagttactgaaccagttgcatgacctattgattagttgcttagtctgtagacacttctaacatgctacaaaacaagggttctacccaaatggaaccagatgacaagctggtcaactgcctgagctagagaaccatagttttgtgcacttttgcaagcttctgagttgatttaaactgcggctaagtcattcaaatttgaaaaatccttcttaacttttgagaatacactggaaaagtttagtcctgaatgagtgtagctcattttaagaaaatatttttccattttcgcacttttgagctttattttgaaaaccttagaatgatcgatttgtttaagcccagaagtttgatctcaataggtcaaatttttatggagtgtggttctcacgcaattgcaccttgatctaactttagataagatcctaagtactagagttcttgaggacttctcttgattgaattttggacgttccatgcatgtcttctccttgaagctcccaatttatattagaaatttataacctggtcaaaaaacttcaagaaaagattaggtgttaatcctttgttttgttatcatcaaaatcagtcttgagaaattcaatttggacttgtgtttcttttaagtatcttaagatgagatcattagcatcttatggcttatgtttcctctttccatatttctttggttgtagaaatgatgctttcacattgcccaatatcatttttaatgactctgtgattctgacctattaacttatgtgaagacatcattgcttataatgcttattgaattcaatcccattcccatttatgtaaggatcactgtagtatccttgcttactttttactcgctggtgcagcacttccactgtgcaaaagtcttctgtgg

SEQ ID NO: 13212 - DNA, 8443 bp, Vitis vinifera
  Intron number 3 from transcript GSVIVT01038350001 (locus G SVIVG01038350001) derived from phytozome v7.0 (chr-ID chr7 ; pos 13382914 to 13391356 reverse strand)
ggcccacaaattaccatctcatctggattcgggaggtaagaaatttacaagttgaaatataatgacctatgataattcttacatattcaaaacctttttatttgtacaatatattctaatgacatttcaatatttatgtttgcatttcattttcttttaaatttttaagtacattcagggtaaaaaaaaacgctaccattggcttcagaattggactttatatttgagaagcattcccttattataatacgaaatgcttttggaagctggttatagaatttttggggaaatgcttttaagaataacttttttcacccctcaatcttttacttttaggaagattttaactcaagttgtacaatttcatatgaaaaaaaatggtaaaatcctcttttatgtgaaattatggttctttaattagtgttttgcaaacccctaatattaggaatctagtggtttgtgttggaatactcaattttctcttcaaatccttgaacctaatgtaccatcttaaacatttctttttgttttatagatgaatgttggaaatagaataggctgatgaaggctaaagaaccaatttgaggtagatttgcagatcaatcaccgaatggttcagatgatttctttttcaagattcatttgattttgagtagattcaaaggctatacttatagtaataaatacacagtaccccacttttcatagtgatcatgttagactaagattttttttatcaacctctacatgtggcttatgccaagaagtgaaagcaggttccatttggggacttttgtgaaggatggatggacctaaacttaagcatttttttttttactgaaattgattaatggagacttgaatttgccctattttgccaagcaacaacataaaatattatgcaaggtttgtcaactcatcaatctatcctaaacaaaatactgtgtgatggaagtggattgtgacaactcgctctttgggatggagttaaggattttttttattccctcattcatcattattttagcatatttgtgattcattcttaagttgtttcctttcctttttatttgagtttgtcaatgtgttcattcttaaatattttggcatgccttaaaactacctctaagggaacatgttcataccctggattgtggtaataaaaaaaaagggtctatcttggtgtatgatggtaaaaaatgaaaggatgttcttgtagccctaaaatgatcttttattcacaactaatggagttttattttgagtgttgtgagaaaatggacttgtttcaattttaaaacaggtaaaaaaatgaaaggatgtcaactcttaccttgttggataagtaacgagccttgccttcttgccttgctacaccttttggatgcatcatgcatgttcattgtgtgtgtagacccatgagtttgaaattgatgtatgagttctaccttttaggttatattctatagctaaaggaaatggcttttatgagttctacactttaggttaacttctatggcaaagaaggtattgtagcatttctttaagtgatagtgggatcttttatcaaacatgttgattatcaattgtgggatcttacattatttattaacatctttttctccaagaaaaagaaaatattggtgtggataccatttgattaagttgtaggtattgcaaatactactaatgcatgatccctttatggagaccacttattttctatttaatataattttagttatatccaaatatctaatgagttaacttttcaatataactttagttatatctcaatatctaagtagttaattttttgtcgattattaacatgtgtagttactttctaggagtcatggttttgaaattgagttaattttaaaccaatatttcatgtctcaaagttaaaacattcttttatgtgtttgtagggaatttgagtattaactattgagtataaattttatgcctaaatggccttgcaagaaagtttagctaaattcaagaagcaacaagagaaaagtcgattgactttcaccagcattgcagccaaaccaagatcccctgagcctagagtgccttgagatgcatgtcgaagcagttgagcctagtgatcatgctttggtagttgatgatctaattgctactggtagcagtctttgtgcagccatgaatttgcttgttaatcattttgtaaaagtttgaatgctagctgtatattcaaatattttgatccacttgattcctacgtcatcatggtcgaaaaaaatatgtgatataaaatgatttattttaaattttactcttaaatatcaaagatgtgtaatttagaatccgtttggaagtgattttaggaagcgcttttaatatttctaatacttgaaattttttatcattcaagtgttagaaatgttagaaatagacgtttgagaatgattttagaaagcatttctaacatttctatttctaacatttctaacacttgaatgataaaaaatttttaagtgttaaaaatgttagaaacaatttctagaatcactgccaaatgacctcttaattctaatggttattttattttatgagatcaaggttttgatttctttatgatgtgccactgcttgaccatattagatttatcaaagatccttatccaattgagatttatgtggagaattaagataatattttttagaattagatgctactacttttggtttggactagagatcatatagctaacttttgatggatttctaagaactattgtaacttcgaaactattattcttggtaatatctttgacctcttttggagtgatgtttttgcccttcaaaaaactagagtagcaatattcagagaggttataaactcaaacactttaaaattatttaatctttatataaaatttatttttataaaattaaaatgagttgaaataaatacaaaatcaatttattgactttaattctattgtatttatttcttcttttcttatactttcccccctaacttattttcttcctaccagtttaaggcaaccctaaagcaaaactgtaaacaacatatccacgcatatcctaaataacaatgtcatgtttttcatctacaagcacctccagaagaaaccaataggaagtttcattcctcaaactgttagaagatggaccattaggaaaaatagaaattacacctatctcatgaatggaattaggcaaaaaactttcacacataatatcaacttctcccatttcatcctagcataaaaattaggtcaaatcacaattgtggctcatgataggaaggagaatattaagccttctcctcttatgatccaaaacaagaatgaaaattttgagcataacaacaaattttaaaaaataataataataaataaataaaagacacttaggccattgtcatgaaactaagaatctttatttttgagatgaaaataagaaacttcagttccttttcttttttcaacctcattaggtattaggctattgttgtaggttcatcccattgaagctacaaagagaaataatttgcgaaaagcattataaataacaataaataagtagaaattcatatgtcaagaaccaaatatactccatcaaaagcttaaataccaaaggcttactcaaagttaacgattttgatgggagtaatctcatttgccaccttgaagtgtcccactaaacatgcaaagaataccatttcagaaagagaattctcactcatcatccatggttgaaaatcaatataagtacataaagtatcatttttttggattatattgtttcttttgtcccttctttggttagttaaacttcataggttatgaaaatttgtccatacttatgttgaagaatgacataatatgcccatactccaacatgaagaaaaacatgttcggtaacacaactgcatgtatcaacaagccataatcacaaagaaattttttccatcatatttttccatgaaacaaatgaaccctatatagaaatgaaataccaaattttgggattaaaacttgagttagaaaattaagcaaccaaagaagaaaagagaaatgagaatgagcaggaaatagacaagacactatcctcacttcatcacatctaccactcaattcagtaaacaatcttgggtccttaccacaactcaatcatttggaaactagttggaagaatttggattcagtaggaaacacatattagttgacataaaatttgaaggtagaaaatactaaattgtgaattttcaagttcaataagaaacctaaagattttagtttaaaatttttagaaagttggttgttttaacatattttttaaatttgattcgaaattataagtacccaactagttgaaatcgagagaaatccccaaaataccaaaggtgaactacttgaccacacaaaataatcacataatgacatgttctaagggtcacgaatgaagttcctaggcttcagataggtagtacccaattttaactaaggtagtacctaaggttgattaaggtagtgcctaaggttaattaaggtggtacctaaggcctattaaggtagtacctaaggtacagtccccaaaataccaaaggtgaaccaattgaacacactaaataatcacataatgacattatctaagggtcacaaatgaagttccgaggcttcggataagtagtacccaactttaactaaggtagtacctaaggtcggttaaggtagtacctaaggttgattaaggtggtacctacagcctattaaagtagtacctaagatataatccacaaaataccaaaggtgaaccaattgaacacactaaataatcacataatggcatgctctaagggtcacaaatgaagtgctaaggcttcaaataggtagtacccaattttaactaaggtagtacttaaggttggttaaggtagtacctaaggttgattaagatggtgcttaagggctattaaggtagtacctaagatacagttcccaaaataccaaaggtgaatcaattgaacacaataaataatcacataatgacatgctttaagggttacaaatgaagttctgaggcttcggacatgtagtacctaaatttaactaaggtagtacctaagctccgttaaggtagtacgtaagctccgttaaggtagtacctaaggtacattaaggtggtacctaagggctattaaggtggtacctaagggctattaaggtggtacctaagggctattaaggtggtacctaaggtacaatccccaaaataacaatgcgacttgcaaccggatatgttgtaagtttcatttggattcaatgcgacttgtaggtcaaattgttatttaggaatagtatggtttccacaacccaacacaaaagttcaagtccactagcgactttaaaatcgttgatgtgctccatttcaaacaaagagactaaagaacaataaataaaaattatgtaccttcagatttcggtttggggttagggcaaaatgcgactcaattcagtaattgagaagaagatggaggatgtaatgcttttggtgatgagaggacgagtttcgagcatgcctaaataccaatccagaaatccaatcttggaggaccgtgatgatgataatcaaaacaaatagacacaaagtagattaattgggtgagagatttctaaatccccaatattttcgagttggtgaatcgatggaaatggagatgaaggtaaagttttaatcttagcgtttctttaggtttcaagagggacaagaagaaggacaaataagatcttgagttttctttggtgcttggtggagaaagataagagagagagtttaatttttggtttttatttttttttattttttttattttttattttttttaacatgtggacgcttacctggcagaaaaggagggtaaatttggcattaaaaaccacataagctcaaaatgcatgaaatcaaaaatatttttaatattaatatggttacctttagaatgggaaagttgggtttctattttaccaatatttccatatcagcctatggaaaccaaagatactcctaaataatcacataatgggatgctctaaggatcacaaataaagtaagtaatgtccacaattgaagtttcgaggcttcagacatgtagtacccacgtttaactaaggtaatacctaagatccattaaggtagtacctaaggtagattaaggtgatacctaaggactattaaagtactacctaaggtacagttcccaaaataaaaaaggtgaatcaattgatcacactaaataatcacataatggaatgctttaagggtcacaaatgaaataatgtccacaattgaagttctgaggattcggatagttagtacccaagtttaactaaggtagtacctaagctccattaaggtagtacctaaggtagattaaggtggtacctaaggcctattaaggtagtaccaaaggtacagtccccaaaataggaacggtgaaccaattgagcacactaaataatcacataatgacatgctctaagggtcgcaaatgaagtaagtaatgtctacaattgaagttctaaggcttcggataggtagtacccaattttaactgaggtagtacctaatctccgttaaggtagtacttaaggtacattaaggtggtacctaagggctattaaggtagtacctaaggtacaatccccaaaataacaatgcgacttgcaataagatatgttgtaagttccatttggatttaatgcgacttgtaggtcatatggttatttgggaataatgtggtttccacaacccaacacaaaaattcaagtccaccaacgactccaaaatcattgatgtgcttcatttcaaacaaaggaactaaagaacaataaataaaaatgatgtaccttcacatttcaatttggggttaaggcaaaatgcgactcaatgacaagaagagatatcttgttgacgaagccaatattttggattctagctttccgtttgagtatgcgctattatagtaaattcacaatcacagatatgcctcttgaagtcgtcttttaaccgaacattcttaggatggaatgttccatttcgttgcacttttatgtggacaagggagaaacatgcaagttggagttctggattaatggttttttctctcaaatgagacaatttttgggaaattttagatgggtttcgagattgtgtgggtgatgaagccaagagagagaggaatgttcccaaatcagagagaagaaaggtttcatattagggagataacaatttgttgtcaagtcgggtgatttttcataggtttcacatttttctgtttttaaaattttcagtctctcttgtgacatggagggcttgttgctaatatgaagacagagttgtagctgacgtcgaggcatggaggggcaatctagaaacataaaatggagtcagcaaagagtgcacgagaaagataatattttcccatttgacagtcaaatctcatatttcagctgattggagtttgattgtcatattactttcaaatagctggctgcaaacacaactttccctaattttttttttcctgtctagaaacaaacatcttttgaaatattaaacaacaataaaataagaaatttaaaaaattagaaatataattaaaactaaaatacttaaaaattaaatacaatgaaaacgaaaaaacttaaaaatttaaaaaataaaatattagctcgtattgtatttctctttctcgatatctatatttttaacttgtttacttttatgaactaagtgaaagttaatgttttatttttttattttcagtttttgagtttttaaattttttatattttattgtagatatcaaccaacaaaaattttattcaattttgttaaaaaaaaaaaagataataagatacagggtattatataatataaaatataaaatcattatttatttgaaaattagaaatcttgtggaatttgtcgagaatgatttgtacctcatatatataataaaattttataatatatttatttataaaacatatttttattaacttaaaataacaaattaattttttgatatcatcaagtaaggggttatttgaggaaataattatttaatttatgaaaaagtatatgtattttaaaatatttttaaattaataaaaataaaattgatttataaaatttgaggttctttattctatatatttttaaattagtggggcaaaattcattttatggtttaaggaggataatttttcttgtactttatttatttatttaaaaaacaataaaaattcaatgctgaacatcttttattttatgaattattttcttttaaaataataaaaatccaaggtcatgaggcaaaaacccttcatgggcttttgagtctttgagtttttgtgcggaacaaccgacgcagcgaagggtta

SEQ ID NO: 13213 - DNA, 4904 bp, Vitis vinifera
  Intron number 4 from transcript GSVIVT01023714001 (locus G SVIVG01023714001) derived from phytozome v7.0 (chr-ID chr1 1; pos 9884069 to 9888972)
ttgctaagcgtcttgccaaaacacaaaattgggctgtaagcttctgaagacattgcgactttgaagtactactttctgattttttattgtttgactttattttttaatttttttgagacatttctattaaagaagtgttatttgagtgtcatgggaacttaagaaatatcagaatccagcatgacaaatgccatttccaaatgaagcttaagttggtagattgataaactcatgcttgctcgcaaatgcataaacacctagatatatctactttgacatgcttgtcttatcaactttttattgaaattaattggaaataaattgataaagtgaattggtattctccttcaattccatgtaattatatttagcataaattttgttttttttttctcaaagtggtgagacttaattatggtaaatcaatgaagtactgaatctgctccactagagaaaaaaaaaaatttgtaatgtggaaacctactagtcccacctcatacagttggggaaaaccatgcgtgcacaacttctccctcaagcacaccacgtgttagcaggagcgactattaaaaaaaaagaccattaattagcccttttaagggtactaattacaaattgagaaatgatctcaaagtaaagaatctctttcaattagatgttgatacatgctgtatacttccatcacacagatgaacaaccaataaagaatttttttgtttcctagacattggaagagattccattgatggtagatttttataagagcaatagttgattctccttcactcaaacagcagggaaggccttgcttgaataataaaactatactaaaatcctatcattttgagctctttgaggaaccataaatatgaatagtccaaagcaatgcccacttgcagttaagccccaaagacatgaattgctcatctagtaaggacattgacctataactaatcagaccaatcagctaaaggaattccacctacacctggctctatattgggattattagagcatattatttattgtgggtccaaattctaacaacttaaacttttgggaaaattggtaactcaacatagtattagggctccattaactgggggtctcagtttcaagtccttcctccatctacttatttttccaattatctacaatccatctggaccttctacaacgagagtcatgggtctgcatgtgaggagcagggaccatcattcttgtgatcacaattctttgtgtcagttatgacttttccatttgcttatgtagatattaatcatttgaaaaagggaaagtattgtagattttagtttccttcttttctagctatctcttcttgcttcgtaattttgtgtgacaggttgatagataaaaggaaaattgttatgaaatgctgcaaggagggtgtaacagaagtactctggaagtagaatgtcacaagaccaaacaaagagagatcttaggctgttgctatccttaacctaaaaatatagtccaacaagggcaagctccttccactgacaacttcttaggccaaacaactggaatttgagaaataggtttttaatattgagaccagaaagttttgggccttcagcaattcttctgttctgctccttctataaactaaaccaaaaggggccattctttatacttttttctgcctcttaccaaggatagttatttgcctgatgccttctttgactaagaaaaagcctggaaaacatggaagatagagaaaagaacagcccacaggttaggagccagtttgcaatgaataatatgatttgccaattcctcattctgattgcatatgctgcatcaattcaccaggatattcccatcagctaatggtaaggatcttctcccatacaactccccacacaggacaaagaaaaaaaaaacaccaagctttgaagtggcatgggaactccacatcccagttgacaggaaagggaatcctctagagagctccttaaaaaactttatgcataagactaaaaatggaagctttgaaatcaccttgtcctccttattctctctaacatttatggttgaaatgcttgacatgacagctactagtactaccagctcaagctcctagttgtggagcattcttagaaaccttgggatccaatgacctattcctccatctacatgaagttatctactgccacaaacaatcctttttaagactctcaacagaccacaggtcatacaataacttcattctatattcattcctaatgtgatgcaaacataacaaaaacaaattattaaagattactattgagggtattgtaatttgagcatgaggggttattattgtgcaataatagtgtattatattttaattgaaaaaagaggggaataaacacctcctcttcttccttacttttctaatatgcttcttctcttgctccttactgatcctagagcactagctaccctgtcttgactaacttgcacaccaccaccatcctttgcaaaccatatctattagatgccaacatctaaagccactcccatagcaaagccttaatggtagcaagtaggcttcagatttctaggccttccatttcctttgcagagaaaacagtcaactatttgactaattgagctttacttgatttcatcctgtccataaaaatctctatgaaggttctctaaactattcaacgttgaaattggcaatacatggtgagagagttgaacccaaaaggtactcttagctagcataaaacttccctcccttagatactgtctctcccaagatgctaaccttctgccaattttcttgttgactgacttcaaaactgacatagcattagctcaagatcccagtgacatgcccagatagtagacccacattacaacctggaattgaagccaaaatgtccagattatccacaactgtaaccaatataagctctctcttctcaggtttaactttcaacccaagaataacttcaaagaacaggacacacctaaggaaacaacaaatgctcctcttttgcctcataaaataaaaaggtatcattaccaaataagaagcaagaaatttcaaacccttggttctgtccccaccttaaaatcatgaataaagtcgccttctgttactgtagaaataaatcacagagagattggggaaagcagatccccttgcaaccctggaaatctggaaaaacctctgggaccattaacccttgtagaaatccaaatgaagccatcctcacaattgctaaagtgatagaaggaaaaaaaagcttcaatctccattgtccacaaccttcttaactcctcaacctctggaattaagaaagccctatgccaaaaactggccctcaccaatgcttctatcactttcttggaaatatagtccatcttagtcctttgcaaacaaaccaactctactttctggacttactaaaaggattccaccactcttcttttgttctcattgttaagacagctcacattcaaagatataacaccgagttccatgatgggagagactagcataaataggtcaaacctctccttcatctccttctacttagaattcctcaatcccctttattatcatagccaccaatgagggcagatggggaaattccctctctttatcaaacttgtcaccaaatgcctttgttaaggtcattggaacaatgctgcctcatctcttctcaatagctttgaaaaggatcatagcctcctcttcaacacctttagaatgagacccgaagaacagccaaacttgttcttatttaagaacctagccctatgtcccatcctcaagaaaatgctgattctgctattcacagacctaatctgctgatcatggggctgcgccaccaaaacttgatccacttcacaaggagattcaatgggaggcatagcctgaaccccttcaacccaactcaacctttcctttcaaaacaagcctcaccatcagagcctcctgatgcttctcctttacctaatctccatggttttacaacttagcccctttccacttcaaagcagggaagcaaaatttactcaatcttgatgactgacaaactatccctctcaaattgcaaagatgggcctaagaaaattatggggatatctccacaccctcacctttctttcgataaattatttcttttaaccgtattagaaacacgaaaatttttgctttaggttgcctcctgtatctgtctttcactatccttgccttgttccctgcacagcaagtcttctatcagtgctttggcccacattttctttgttattccaattttccatatagcaccttttaacttgaatcgagtgacatactggaagataaggaaaatatagaatgcttctgttgtggtaatttgcttgtggtctttcttagaattattattttcgtgaatttagaatccattcttagattttcttagttatgtatttcataagatgaataatatagttacctatgtgggtaatattttcttcttatctttttccttctttgatattttcatttggataaaaaaaatagagggatatttaaggaaatgcatataactatacactaaactcagcatatggttcccagtggtacctttaattatgtgtcagcatcccattggcattgcttatacaaacatttattccaatgaactgtaaatcttggtataatttttgtggaccccatgaagcatttgatgcatatgcgtttagatggttaaaattttgtttggggataaggtctactaggccaacagtagaaacagttggaagactttttaccacacaaggaggcatgagagctagacgcataaaacaaagtgtatgttcaatgtgtaatttgtggtcaaaagtcttgattctgatattttaatcaggttgcattgaaaactttaattgtt

SEQ ID NO: 13214 - DNA, 1537 bp, Vitis vinifera
  Intron number 7 from transcript GSVIVT01037845001 (locus G SVIVG01037845001) derived from phytozome v7.0 (chr-ID chr3 ; pos 7200400 to 7201936 reverse strand)
gttacagttcctgtgaaggtaaagttcacacttgatatctttgtttgcataaaatttaacaaatctcttcaagaaacaccctaggcttttgcctatgatcataatctagtgaacacttattgaacatgcatggacacaattttcacctcgtacatgaattgctgaaagattttgacaaacatgggtttgccttgatcatttggagtattttttagaactttaatcattgttgtgaagaatattttaaaattagtttgtaaaacatttttatgaacaaacaatctttaggttttctagagaaataacttacaatgatatatgtatgcattgagcataaatctaaacaagataaaaaggaaatggcatgaaaacaatatgaacgtaaatatatcatgtagtaatactagggaaaagccttttggataaagcatgttataatattttctttttatagattagatagaatttatattaagaggctcctaatggggaacctaccatccaggtacacagcaggatgcatgaagcacccaaaaaaacaaaatgtagagaaaataataattgtaataataaaaaaataatataaaggagggacttcttacacattaaggacagccaaagcatcaatgaaatctacaaatgataggctcccatatcctacagatctctggggccacacaaaggatagtttttcatctttcttttctgtggaatttgtgcattattttctcatttgcaaatgccttctgattaggtttgcttcgtccaaacttaattaattttgatatattagacctaccaaagaaaaaaaaaaaaaaaaactgttaatatagcctgaaatcagtgagaaaagtaggtttgttctgcatacttaactgcagcttctgatgaattagtattcttgggatgtggttctaaatcagtataataactagattcaatatttggtacagatgatgggaaaaaaaaattcttaaatccataaccttggtgtgttggaaatgaaatatcatgtcctcaaccttttgagctacacagtaaaatatggtcaggactcaagattctggaagatctgatttttaccatgttaattagactaaggaatttctaaaccgtccatgcccccgcgcccccctcccccccaaccaaaaaaaaaaaaaacgctgaagaaagttaatggattgaataagtattccataaatcatgggtacgtgaggatccgttacttgctacagccaaagtgacagagtattctttaactggatcttccagcgtgatagtttggctttttaatacctcttagtgcggcccatcatttgttgaaaattcatgctttgagtttcaatcccagatgcaataaatgttgaaaattaggacagttcaaggttgtttttttaaaatgttagattttatttttattcttatttttttggtcttgaaattttcatggcctcaaacatcatggtcatagattatactttacatccaagcatctttttgcttgcagctagtgggcctgggaggtgcaagataaaca

SEQ ID NO: 13215 - DNA, 17857 bp, Vitis vinifera
  Intron number 2 from transcript GSVIVT01031094001 (locus G SVIVG01031094001) derived from phytozome v7.0 (chr-ID chr1 4; pos 2409111 to 2426967 reverse strand)
caagaacgttactcgtatctgtctcgcggatgatttgtagtaaagaacacccatccagaagcatcatccaggcgagtgcctcatcatcatactcctttgtactattcgaatcatagcagtccctcactgccttgatattacttccaatttttgtgtacaaatctttgatgtcctggttactatcagccaggaattgttcggcatatagaggcttgatcatttcctcagggtgaaggtcgggcttgctgtggtggtaagggccgaatgaaattaccctcggttcgtagaatttgttgaaatcctgggtccacctcagtatctgaggaacccttggtatccttggccattgagtttgagattgagtcctttcttttgctttttgaagggactgaatccaatttttcatcaccttgtcactcatttcaacaatgctagtacgatgctctttaggctcagggccagtttggccactgttcctgcttggttggtcgccttctttctcttcaacgttcctcctttcttgctgctcttccatggaattggatcaccacctcagcctaatcactgttggtatgttaataggtcgagaaaatattagtctactgccaatgggtatcctcaacatcacccaaaatgaatcgtctaaataaatgaatcagtgatgttagtgaacattcccgtgtgaaaatttatttaattaggcgaaatttatggaaagttgaaagtcaataattaaaacttggtgaaaactgtattatgtcaaatgattataataattttttttgaaagatatttaatttaatattataacaaattaatttaggaatttatccaaaaaggtaaatggaaccttataaaattatgaaacatgaaacaaaattgaaccgaaatgaaattaagttcaaattatgttatataaatttaggaatttatacaaaaagataaattgattaaatatgaatattatcatttaatatttataatttttgaaagattgatttaattgaggtatagcttacaaaggatctggatttaattaatttcattttgaaggattgagaatctcattattataatttttaatcttcaaatgttctttagattaaattggaagttacaatttgaatctagttaaaaaacttttaaacatataataaagaaaatttaaaatttaaaataattttaaaatttaaaatgtccttttcccatattttggacgtatctttgtccaagaaaaggggaaccaatgtgttccacataagttccatcttggctcatctatgatttagaaaaagaaaaagaataaccatattcctcaatttattcaattgaatctatgcatttcttgagcacaaggaaaccccttccatattctaaaaggaaaagaacaattgaggaagctttgcttcttgtctataatttgaaatatactctttcctccgtgcaaatcacatgactattaaaaaaaaaaaaccacaaagtacataacgatttaaaatttaaaatgtccttttcccatattttggacatatctttgtccaagaaaaggggaaccaatgtgttccacatcagttccatctatgatttagaaaaagaaaaagaataaccatattccttaatttattcaattgaatctatgcatttcttgagcacaaggaaaccccttccatattctaaaaggaaaagaacaattgaggaagctttgcttcttgtctataatatgaaatatactctttccaccgtgcaaatcacatgactataataataataataataataataataataataataataataatactagtagtagtagtagtagtagtagtagtagtagtagtcgtcgtaggaagaaaagaagaagaaaaaaaaaacaaaaaaaaaaccacaaagtacataacgatttatatggttcggcctcaagcctacatccacatgtgaagacaaaaaagaatttccactattattgaaggacattacagtggtgtttgttttttggctgaatagaaaaagtcaaaatatttggtttattctattcagctaaaagtaacatgttgacatcatccaacataactaaactgaacctattaataacaagttcattttaactatgttggatgatgtcaacaagttacttttagctgaatagaaaaagttaaattttttggctttttctattcagccaaaaaacaaacaccacctacaactttagggctttcaaatcccaaagtctcaattacacccaaaaagagacttccattattttggtcaaaatctattcctatatatatttttacataaaaagatttcatataagaaactaaatgtataattatcaaagaagtcttttcctaaaagaatattttctctataatgataggaaacccacttgcaaaaatattttatattaggaaactatctataactttccaattgactaaaaaatagaatatgagacactagcttttcaataatatccaccttggctcaaattcccaagattcaaacagactcgaaagtcttccatgttacttcactcccataccccaaaggggtctttatatatatatatatatatatatatattattaacaccaattaagttcaaacaatacctgaacttaactgtagaaacagacttaatcatcaaatctacaagattgtccactataaggacagcaccctgtgtaatcacatccataataaaatacattaacattaatatatttgcctctctcatggaacatttgatttttagtcaaatgtatgacactttggctatcacaatacataacagtcaactcttgttgtgagcttaaattgccaaccaaacccttaatgcaaataacttctttcattgcttctacagccgtcatgtattctactttagtggttgacaaagcaactataaattgcaaagtttcttttcaactaataacactaccacataaagtgaatacatactttgttagagctcttcttctatctaaatctctagactaatcataatcaacaaaatcaataatttcctcaaacatatcactacttttatcatatactaagccaacatgtgatgttcctctcaagtatcaaagtatccattcactgctttccaatggatctttctagggcgatccatatatctacttaccacactaactgcatgtgaaatgtttggcctagtgcaaaccatgacatacataatgctcctaactgcactagcataaggaacatgtgacatgtgctccatttcttcttcgatctatggtgatagagcacttgaaagtttgaagtgagttgctaatggagtactaattggttttgacccttgcattccaaagctttccaacactttctcaatgtattttttttatttattataagtacaatttccttgcttctcagtctctgtgaatctccatacttaatattttattcacaactccaagatcttcatttcaaactctccttgaagttgagttttcaagttgttgatctcaaacatattcttgtaggcaattaacatgtcatcaacatataacaataaataaataaatgaaagaacaatcaaacaattgcttgtgataaacataattatcatactcactcctatggtagccattaccaataataaaagtatcaaaccttttataccgttgtctaagaaattgcttcaaaccataaagagatttcttcaacaaatgaacatggtctttcttttccgaaataataaatcccttaggttgatgcataaaatctatttttccaactaaccatgtaaaaaattagttttgacatcaagttgctctaactctaaataaagcaatcataacaagtaacactctaattgagctatgctttataattggagaaaacacttcattgaagtccaccccttccttttgtgtgtaacccgttgccactaagcatgctttaaacctagcatccttacttttgaaattccttcctttcttttgaagatccatttgtaaccaacaatttttttttttccttttaggcttctcaactagttgccaagtattgttcttttgaagagattcaatctctcatttatagcaataatccactgtgtagactttctactagcaatgacttcatgataagtttaaggttcctccttttcaattttctttgccatactaagtgtataagtaacaaaatctacataagcatacctttgtggtggtttaatttgcctcctcattctatctctggccaaacaatattgttgcttttgtgctacattttctttatcatcaagatgttgcatttttccctcatttggctttattaaaatcattttctctatggtttctaaagctttaggcacaaactccacattttctctcacattagggttgttttctacatgaagttgctcattcctaggactcaacatttcatactcattataagtcacatccctgctaattaacatccctgctaattataaatttagagaatcttgaatctaggcatcataacctataccttttaactctatccgcatatcctaacaacatgtacttccttgcccttaagaatgaacctatttttcttaatgatgtacttgggattccaaagtccatttcggggtgagggatggcttgaaatcacttctagagggtcgctaaaggaatatatgaaccatgataagggagataagaatcttcattctcttaggaaaaagtgtacttatttttcttaaggatgcacttggggttctaaagtccgttttgggaatggggaggaccttcaattagttcctatgggtccccaaagaaatctatagaccatgataaaggagataggggtctcgatttccctaataaaagatgtacttacttttcttaatgatgtacttagggttccaaagtttgttttggggatggggaaaacctctaatcaattctttagggtcctcaaaggaatatatagaccatgataagggatataggggtcccagttacccttgaaacaaatgtacttatttttcttaaggatgtacttggggttccaaattccattttaaggatagggagaacctccaatcactttcaggagatccctaaaggaatatatagaccatgataaaggagataggggtcctaattctcctagaaatagatgtacttaattttcttacgaatgtacttagggttccaaagtctgttttagggatggggtagacctctaataaattcccgagggttctctaaaggaatatgtagaccatgataagggagataggcatctcgatttccctaggaatagatgtacttatttttcttaacgataaatttttttttcttaaggacatagttggagttccaaattccatttcaaggatagagagggtctctaataagttctcgaggatccccaaaagaatatatagaccacgataagggagataaggtcttggttcccgtaggaacatatgtatttttttttggaggatgtacttgagattctaaagtccattttggggataggaaggacctcaaatcatttcttgagggtccttaaaggaatacataaaccatgataagggaaataggggtctcaattcctttaggaataaatgtacttacttttcgtaaagatgtacttggggttccaaattccattttggggatggagaagacttccaatcacttcccaagggtccccaatggaatataaagaccatgataaatgagataaggggtcccgatttccctaggaatagatgtacttatttttcttaaggatgtacttatttttcttaaagatgtgcttgaagttccaaagtccgttttagggatgggaaggacctccaatcacttcccaagggtcctaaaggaatatatagaccatgattaaggagataagggtcccagttcccctaggaacaaatttacttatttttttaaaagttatacttattttccttaagaatgtacttgggttttcaaagtccattttggggataggaaggacctctaatcacttttcgagggttcctaaaggaatacataaaccatgataaagaagataggcttggtacccttaggaacagatgtacttatttttcttaagaatgtacttaagagttgcaaagttcgtttcgaggatgagaaggccttccaattaaggtttaaaatatcatgatattttggtgatatatcatcgaaatatcatgtattagaaggtaccgatatgataacacccttcaaaatatcgacggtttgatatttccttgtattcatgtttttatcgctaaaatatcgatgatatattgagattttgttgattttttggcgattttaatgccacgtcattggtattttgaattttgactttcaaaattttgaaatggctcccaaaacttaacctagcttagctacctaacttgttgtcacttcacctcacctatagcaacactttggtttaaatattggttttggattttgttcctaaccgaagtgggattgcatttcaaggatgcaatgaaaaataactaggtagtgtagaggcccatttgagttatgatctcaagttcaaaataagttaaccgtgccaccaaaccaacattgctatttatgacatatttgaaatgcatttatatatatttaagttataaacaagtattatgtataagattcataaagtaaatatcacttatgtatttatattataaatattatctatatatataaataaattatatacacataaattaatattatatatatatattataaattaattaaaatatcaaatatattgagtaaattaattttaattattatatattttgtataacaattaaatataaaataaataaaattatcaaaattttaaaattaaaaatacttatacacatatcatcatttttttttattatttttatttttatgtttttgaatatatccaaattagataaatctttataaaatatatttttaaattttgaatattagttttagatgtgataaattatagcatgcatatatcaatttctttaacaaattacctaaaaatgttcattattatttcttttatcattttttagaatttttattaacattttaataaattttgatcaatttccgtctcaccaatattttgtgttaaaatatccaccaatatttcccaatatatttgtaaaatgaagttattgatatatccgtaaatacatatattttcatccttgcctccagtaagttctcgaggggctccaaggaatatatagaccttgataagggatataagggtcttagatcccttaggaacatatgcacttatttttcttatggatgtacatggggttgcaatatccatttcggggtggtggaacgcctcaaatcacttcccgatggtccccgaaggaatattaggtcacaataagggtaattgggattctctctaaaaaaaaatgtatgtatttttgtgaaaaatatatgtaaggttccaaatttgattcaaggtgagagaaggtggcaaatgacttcctgaggtcccctaaatttctattgggacataataagtgtgattggggtcttagttcatccttaaaaaaaaatgtacctatttttgtaaaaaaaaatacttatttttcttaatatgtatgtattttttttaaggatatacattgggttccaaatttaattttggggtgggggaatcaaaatgcttcccccccgaggtcccccaaatgactatctaggatgtaataagggtggttgaggtcctagttcaccctaaaaagaatgtatgtagttttcttttggatgtatgtgaggtttgaaatttgatttccgggggtaaggtcgtaaatcactcgaggtcccctaaatgactttttaggacgtaataagagtgagtgtccccattctccttaaaagaatgtgcatatttttgtgaagaatgcacctattgtgatgaagatacaccatttttcacacgatattggattcaataacaagatcatctaaaatttaatattctttgaatattttatttcatgaaggtgtaggatgaactttattaatatattacttctaaatttattataaaatatcaattatattaaataaaaaatattatgaaacataaaaaatttcatagccatatatcaaacataaaaaaaattagaagttttatctaacatgtattttaattatcactatgagattatgaaaaatatgcatgacttgtaaagtttaaaataataataatagaaagaaatttgacaacaacaaatataatttaatagattatacaaaaaaatggaggaaaataaaataatattttttaatcataaagaacaataaaataataataataattttttctcaagagtatttatttttaaaaattataaattggatatttacaaaaactaagaaacttcaattgtttgtctattctattttaggttatgttttatttattctcataattattggttatatattatcattttgtatttaatatgtaataaacatgaaaagataaaacattaaaaaaattgaaattaaaaaagttttagaaggaaaactatggcggtcttaatatatcaaaaccaatatggaggattttttttaaaattttttttaaaaaagagaaaataatgttaaatgataaaataataataataataaataggatattaaaagtgaaggtgacacgtaggagttctggttctttgataattttttttttattaaaaagatttacctttttaagtgttttgtcacatcaaaaagtgaaatttgtggaactcttcttaagaattaatattattcaaatgattttttctcatcatacacttgattggtgaaagttggagttcttaaaaacctccttttttttttttttttgtgtgtgtgtgtgtatgaaagcatgatttccccataaaaattcagaaactcttatgtttatggtgtagcttttactaatcctaagcacatagatacaagcttcgagtaagataggcgcatccctcatgaaactaactccttgtatcatcatctttgcccttccatcaaagcaagcagtttagtatttgattaaagctttgttgaatcattgaatatctctaagtttatgtcacctctccatgtctaaacaggaagtaaggaggaggaaaaacaggccttgatcactaagtgctacaagatgtattttagagctaaggatataaacaacttcaacgagttgtatcaagcagtatgcaaaactgtcagagtacttttccccactttcatttctaactcctgtgtgtatgtttgttttttcaaaccgagttaagtgatgaatgaaaaatacctttgttcccctttgttcagtgatgtattttggcaaaagactaaagaaaagccctagagctcttaaagagatttcaggaagattaaaaatttcttgaaagagttgaagagtattagaagaatatttcttaaagaagttgaaaacttgaacattcttttgatgaagattggagggcttcataaaaaaatgtagtatttatttatgaaatttttttatttaaaataagtattaaattgcctagaaggatatttttgtcttttacaaaaaaaaataaataaaaaaaatcagagggcatatttgagattcttccctcaatttataaatatatcaaaatgatgattttatccacaattgcatccatgaaatccagtgatacaacttaacaatttattcatctttatttgtctaacaatacataccaaagaagaaaagaacacatcacagtcataattaaccctatatatatatatatatatatatatatatatatatattaattaccgggaagagcgtagtaggtctgaaccccggtaagaaatagtatcaaaacagcagcaatgaaagcgatgatagtccatggagtactgaaatggtcgtgaagggcttgagctatccaagtattcattctcttgttgtagtgttcctgaatacgatctttcacatcttcataagcttcgggatctaccaagtcattgccgatctcgttgaaaagttgggccacatcttcatcgttgccaagaaggttgtagagaatgttcttagatctcagctccttgacatcgtctgcatgatcaatgaggtcgtcaaggaggcatatataagaagtgatcccatagtcatctggggcatctggacacatttcataggctaccatgttcaagaactttttcttcgtgaagtcatcaatgattattcggggaagtttcaggtagccatggaagaaggaggatttgaaagaaacgtctgtcaacacactcgttctactcggtttgagatggatcccggaggctttaagatccttgatgcttcgaaaagagtacagccaaatggctcgttgtttgcattttttccatgggcaacgaaaccccccatctcctccttgagacgacgacgactttccttttttctcaggttgctgttcttgttcgggctgactccccctaatccttttatccctgcctaggagagaacttcgcaagaggtggaggagatgagggggctcttcgtccaactcttcgtccgacgcttctggccttccggttttagtgacgaattcttttatcttctttttcatgagtgaatcatcattgaattttgcttcctcaaaaatcaacttgaggactccatagggaagttggttctccagcaagaacaagtcctgcagcacaaaaattatttggtgatttctaagaaagtttatcttacctttccggcggatgaattgtagtaaaaaacacccatccagaagcatcatccaggcgagtgcctcatcatcatactcgcttgtgctactccaatcatagcacttcctcactgtctcgatattacttcgaatttttgtgtacaaagcttcgatgtcctggttactatcagccaggaattcttgggcacatggaggcttgatcatttccactcggccaaggtcgggcttgccatggtggtaaggaccgattgaaattaccctcggttcgtacattttcttgaaatcctgggtccccctcagcatctgaggaacctttggtgtccttggccattgagtttgagattcagtcctttcttctgtttttctgagacccccaatccaatttttcacccgaggactgatttcagtaatgtcaatcctgtgctccttaggctcgggaccagtttggccactggtcctgcttggtagaccgccttcttcctctccaacgttcctcctttcttgctgcttttccatggaattggatcaccaccttggccaaatcactgttggtacgttaattggtccagaagatgttagtctactgccgatggctgtcctcaacatcaaacaaaatgaatcgtctaaataaatgaatcacgtgatgttcactaacattcacgtgtcaatattttatttaattaggagaaatttgtgaaaagttactccaaagtcaatagtttaaattccttccaagtcacatttggaaatcaggaatttcaaaaattaaatttaaatttaattactaaattatttgagattggatttttgaaatttgaatattacatgtattgtaagaattaattttaatattacaaggttattattagagaaaaacttagtgaaatttgtattataatgggaatttcaaaagatatttaatttaatattataacaaaacaatttaatttttaattataatgggaattcaaccttataaaattataaaacatgaaacaaatttgaatccccaagtaaaattaagattaaattatgttatattaatttaggaatttatacaaaagagtaaattgattaaatatgaatattattatttagtagatttaatttttaaaaggttgatttaattgaggtataatttacaaaggaagttgattaaattaatttcatttggaaggattgagaatctcattaatgtaatttttaatcgtggaatgttctttagattaaattacaagttacaattcgaatatctgccccttaaattttttttcaacatataaaaaagaaaatcttaaaattaaaatcatttttaattttaaaatgtccttttcccatattcaggacatctctttgtccaagaaaatgactggaaccaatgtgttccacataagttccatcttggctcatctattactaaaaaaatgaaaaaagaaaaagaaaaaaacaaccatattcctcaatttattcaatattctaaaagggataacataattgagtaggcattcctcaatttattcaattgaatctatgcatttcttgagcataaggaaactcctccaatattctgaaagggaaaacacaattgagtaagcaacattcctcaatttattcaattgaatttttgcatttcttgagcataaggaaacctcttccatatttggaaagaaaaaacacaattgactaagcattcctcaatttattcaattgagtctatgcatttcttgagcataaggaaaccccttccatattctaaaagggaaacacaattgagtaagcatttttcaatttattcaattgaatctatgcatttcttgagcataaggaaacctcttctatattcttaaaggaaaaacacaattgagtaagctttgcctcttgtctgtaatgtgaaatatacctccccgccatgcaagtctcatgggtgtgtgcacatatataagaaaacaaaaacaaaacacacaatgtacacaatgatttttgtggttcaaccttaggtctacattcaaggtaaagacaaggaaaattttccactattgttgaagaagattatgattctagagctctcaaatccgaaagtctcaatcacacccaaaaagaaacttccactattttggttaaaatctctttctatgtatatttttctaactatataggaaaattctatataagtaactaagtgtataattgtcaaagatgtcttttcccaaaagaatatttcctttattttgataggaaacccacttacaagaatattttatattaggaaactatctataacttttcaattaactcataaatagaatctgagacattttctattaatctccaccttggctcaaattcctaagattcaaacaaactcgaaagtcttccatattactttgctcccataccccaaagggtcctttagatactattaacactaattaagtctaagcaatgtgtgaacttaattgtagaaacaaacttagtcatcatatatgtgggattgtccattgtaaggatttttttcactataatagcacattgtatgatcatatccctaataaaatgtattttgacatcaatatgtttactcctctcatggaacatttgatttttagtcaaatgtataacactttgactatcacaatacacaactgtcaactcttattgtaagcttaaattgccaacaaacccttaagacaaattagcttctttcactccttatgtggctaccatgtgttctactttagtggttgacaaaacaactataaattgtaaagttacttttcaactaataacattaccacataaagtgaatacataccttattagagatcttctatttaagtctgtatcataatcataatcaacataaccaataatttcctccaagatgtcactacttttatcatatgctaagccaacatgtgatgttcttctcaagtattgaagtatctattcactgcttgccaatggatctttccaaggcaacccatatatctactcaccacagtaactgcatgtgaaatgtttggcctagtgcaaaccatgacatatataatgctcccaattgcattagcataaggaacatgtgacatgtgctccttttcttcttcgatctatggtgataaagcacttgaaagtttgaagtgagttgctaatggagggctcattggttttgatccttgcattccaaagctttccaacactttcttaatagtttttatttatttatttatttgataagtacaatttccctacttctcggtctctatgaatctccatacctaacattttctttgtagctccaaggtcttcatttcaaactctacttgaagttgagttttcaacttgttgatctcaaacaaattcttgcaagcaattaaacatgtcatcaacatataacaataaataatgaaataaccatcaaacaattcctcgtgataaacataattatcatacccactcctatggtagccattaccaataataaaagtatcataccttttataccattgtctaagagaatgcttcaaaacataaagagatttcttcatcaaacaaacatggtctttcttttctaaaataatgattcccttaggttgatgcataaaatatgtttttccaacttaccatgtagaaaaccggtcttgacatcaagttgctctaactctcaattaaataaagcaaccatagcaaacaataatctgattgtgctatgcttcacaattggagaaaacacttcattgaagtccacccttttgttttgtgtgtaacctgttgccactaagtgagctttaaacctagcattcttactcttgaaattccttcatttcttttgaagacccatttgcaaccaacaatcttttgatttttaggcttctcaactagtttccaagtaaggttcttttgaagagattcaatctcctcattcatagtacgtaataatccattgtgtaaactctctattagagatggcttcatgataagtttgaggctcctcattttcaatgttttctgccacactaaatgcataagcaaccaaatctacataagaatacctttgtggtggtttaatttacctcattgttctatctttggccaaacaatattgttgctcttgtagtgtgttttcattatcatcaaaatgttgcacttcttccttctttggctttattgaaatcgtttttctcacaacacatgattttcttacaacacagtccatgatgatatcttgaatctgcaacaagaactcttatttcggagaaaaaaaaaaaaaacagaaaaaagatgtagaatgtatggtatggttcttgagttttagtgtttttacaagctttttatcgatggaaaaccatgaataacaacaacaatgacctttagtaatcatttcaaatcttactttatttcatattttttcatgataaaaccaaatataagaaaattgttatttttttaacattttttctttcttgtttagtactttttggaacctaacatagcattaaaaacgattagttcacaaggaaaatgtcaagatcgattctaggatatatttgtaatcaaatccaattattgtcctttcgtggaaaatgttaggatgcgtagttaccaccctttaattaagttgggcctctgggaatttatgagtagcagcattgaaagtctgtcttcgtgccttttatgcaatatctcaatactttttggtacgcatgtgtgccaagttcctgtttggcccccatttgtgtccaagtgatgagattgaaagtggaatacagatataattatataaaaggagagaaaaagttgaaagaattaaaaatttattgtgtttcacgactctcttattagaatattacataaaaactcctcccagtaaaatatagaaaaattttacgtcttgatttgtatcttcaaatttaagataccatcctttaccttctaaaatcttcaaatttgatagatttggcagaaatatttgtaatttgatctcaagattttacaaattttaattgtttttcctcttcataatactctctaataaaatgatatcttgtattgatgtacttactttaatcatcgaaagttggattttttttttttaatttaatcactcatttgttgtcaacgtaaatttatgttggttcttgttatggcaaattaagctccttcaacaaatttttgaactaaattgtttgacatacatgtgatgtttcaataacatacacataatgttattaaaacaaattctgcttcacaagttggaagtgttgcaggttgtttttttaaggtccaagagctcttaaagagattccaagaagattaaattttttttgaagagttgaagaatattcaaatattccttaaagaagttgaaaacttggagattctttcaatgaagattggaagacttcattaaaaaatgtagtatttttttctgaaatctcttttgatccaaaatcaaacattaaattgcctaaaaggatatatctgtcttttgtaaaaaaaatttaaaaatcagagggcatatttgagattcttccctcaattcataaatatatcaaaattatgattttatccactattttattatttgaaaaaaaataaaaataaattgtgtgcacaaattcaatcccatcccatccacgaattacatactgttgactgaaaattttctattatgatcctggtctatgaaaaagaatataaagaagctagctagaaattgtgagttcttgtagatcatagcaaactcatggagaggaaaagactaataatattgcatgcatgcatgaaatccagtgatacaacttaacaatctatacatctttatttatctaatcatacaatcttccatttctcaaaccgaaacacgccaaacaagaataaaaacacatcacagtatacaacttaacaatttatacatctttatttgtctaatcccaaagaagccaaacaatatgccaaacaatataccaaacaagaaaaagaaaaatcggaacccctaatagccccatatatatatgcatcatttgtttaccgggatgagcgtagtaggtctgaaggccagtaacaattagtatccaaacagctgcaattaaagccgtgaaagtccatggagacctgaaatgttcgtgaaggccttcagctatccaagttttcactctcttgtcgtagtgtttctgaatgcgagctttcacatctccataagcaccgggatctaccaggtcattgccgatctcgttgaaaattttggccacatcttcatcgctgccaagaaggttgtggagaatgtgcttagatctcagctccttgacatcgtctgcttgatcaatgagttcgtaaaggaagcacacataagaagtgaccgcctggtcaactggggcatctggacacatttcataggctaccatgttcaagaacttggtcttcgtgaagccatcaatggttattgggggaagtttcaggcagccatagaagaagtgggattcgaaagaaatgtctgtcaagaaactcgctcttctcggtttgagatagatcccggcagctttaagctccttgatgtgtcgaaaagacttccaaatgcctcgttgttcgccatctcctccagacaacgacgactttccttttttctcagcttcctgctcttgttcgggctgactccccccatttcctcctccagatgacgacgacgactttccttttttctcagcttcctgctcttgttcgggcagactcgccccatttcctcctccagatgacgacgacgactctccttttttttcagcttcctgctcttgctcgggctgactccccctaatcattttaaacctgcctaggagagcacttcgcaaaaggtcgaggagatgagagggctcttcgttctcctctttcagctgtatttctgatgacaacccttctggcattccgatgtcagtgacgaatttttttatcatctcttccagggttaggccatcatcgaattttgcttcctcagaaatcaacttgaggactccaaagggaagttggttctccagcaagaacaagtcctgcttcacaaaatttatttggtgatttctaagaccgttactcatattgactctgctgctg

SEQ ID NO: 13216 - DNA, 3103 bp, Vitis vinifera
  Intron number 1 from transcript GSVIVT01000514001 (locus G SVIVG01000514001) derived from phytozome v7.0 (chr-ID chr5 ; pos 13452000 to 13455102 reverse strand)
agtggaaagacattgccatgcttccaacaataccccttcaaaaaaactaataaaaccaaagagaaaaaaatatttgcgaagcccctctaaagttgatcacaatccacccaacaaacctaaacctcaacttctcaggtatattaggaataaaaaaaaaaacccagaatcatgtagccaattcaacaaactccatagatgtcaacacactaagaagccaatcctaaccctttccagtattttcattcttaccaaaaaaagggagccaaatccccacttcccattcggaaagccaagcaaacccacttcaataattacgcatcaatgaccaaaaccaagcttagatgcctcaaccaaccaaaacgaaaaccctcaattgccaaaattctaagcgttgcttcacttttcaccaaaatccaagtgaaaagattcaaacttttgacgtaaataaaaaaacctagatgtgtaaagccactcaaaacaatgaatcaacaacaattttctagattaaactaagaaaatccccttttacagttctttaacataaaaaagggggaaaaacataaagagtttcgataaagagaaaaaggaaaacccaaatgagatataagaaacatagagagctgttaatagtacttatagaaaaattaataataataacaattgaagaatgctatgttttttttttttttttaacctttttctcctcagttggaggtgcatcagttgtcgatgcccctcccttagaaggtgctactgcaatagctccatcaccaccaaagaatcacctcatctgcagatcataagtgaaggtcatggactcttcgagatcgtcgttcatctgtttcaacacacgaatgtgaagactcccattctttttttttccatcacttccctgtcttaatccagcttcacttctcctttctgtttttttttttttttttttttgctccccaaaatctccttacccagctctctttctttctttttagccaacaacccccctgctctatctttcccccaactagtttcttctccaccaagcctccaccaactctactgctttaaccaccaccatggcaaggtggtcacatccattgctatgcgtcccatgcaagttgtctgagaacacttgtggagaatcgtctcccactcctcaaatgaaaaaaaaaccaatccctctcttcccagatgcccaataggtgtgtaaggtgggagaagccaaaaataaattaaaataaaaaagcaataaaactaatgtcccctagtccaaagaggggtcttaaatatgttttatttatttatttattaattgattaaaaatgatgaaaatatcccaaatttgtaaaactaacctctcccattttcgaactcgaagaataaccaatttttgatataaatacccttcaatattttcattatttatatgtattttaaaagaaaaaaaaaagtgagagaatttttgtccaaattgagtaatttttttagtaaaaaaaaggtaagagattagatttgtaatctcttatttcttttgtcccttttaattggttatttctttttttttttctataaccatttaaaaaataggaaaatttactataaaagttaaattaatagtgaaattcaatttttttttaagttaatatagttttttttctataaccattataaaaataggactatttacaataaaaaaattaataattaaaaattatataatgaaatttaaaattttatagtaactaatataatacaagatcacgtgacaaatatatatgcattgaaacttgtataattgaagatatattaaaaataaagttagagaaaattacctagaaaatgtagacaaaaatgtttattaaaaaaaataatttggaagaattattaatttcttcaataaaatttgggttctacactagactttcctataacactttacaaacgtagatgattggaaaaaaatgttaaaacctaagatgatagttatgttttttagtcaagtttatgattgcattagaactaataatatttacaattacgtttcaagaaataaattataaattttttttataattaatactgaaaatcatgtttttaatgttttaattaaaatgctaaaatcaacattaccaatattgattttaaattttatgaatttttaaactaaactaataatggtaattaaaagcttgtgttggtcgtgtaatttaaaaaaagttttctatttttaaaaacaaaaatctgtttttaaaaatttgtgacattgtttaaccattattctctagaaattatttttaaaaacaaagagaaataaaaaataattttttgaaaatacgtaagagttgttttcatcaatttttagaaacaaaagaaaaacatcaactcatttaataatattttttgaaacttgtttttaaaaattattttttattatttaacttaaaaacaaattttaaaaaatattgtcaaacctcgcaccctaaaattttaggatgataaagaattattaattttacaaataatttcacactaaatacattcctaaaccaccatttatattttaaaactacttttaaaatataacaaactacaaatcccgaccacatatttttgtcaaaatttttaaaatatcaactattgaaaataaaaaagttaatttcattcttttttttgagatgttaattaaatatatttaatttttattaatttaaaattttattaaatactttttcgtatcattttcatttccatttctttacttatattcatactcgcttaaaaaaaaaaagaaagatatttaatgaaattttaaatttacgtgacaagttacatttaaccaaggagataatgaaattatcccaaaatataatagtttataaaatgaaaaataagcgtcgggaaaaagttgtggtacagacactcacggttcacacttctcagcagcatgaaagacgtgggtgttcaccttccctagactaacacaaacaagccacgtgtccctctcacgtccacttttatttattttattaattatataattttatacggaccggaccacccacaccacgcagagtcatcttcacagccccattgttacatcgtacag

SEQ ID NO: 13217 - DNA, 2162 bp, Vitis vinifera
  Intron number 7 from transcript GSVIVT01035648001 (locus G SVIVG01035648001) derived from phytozome v7.0 (chr-ID chr4 ; pos 2979626 to 2981787)
aggtataattcttgctaattaaatccttgaagtgtctgatctttagtctttttcaaattgataattgtcatttctgttttcttttctttttttgcttttccctttcttttttttttttttgaagatttaggtcatgttcggttgattggatagaacatgggataagataagttatcttatcacttatcacatctcatattgaactaaacatgttatatgataagtgatatgataacttatatgacatatttttttctatccctgctacatcctaagttgaggtatgggatgtacatatctcttacactattaatctcatcttttttttttgcctcaatttttgtattacttattttgcaaaaaaataaaataaaataaaggattaaaaaaattaattttttagtttaaaaaagggaataaaaaagtatgtataatacaacttaaataatactaatatatattatttaatatacaaaatgtttttatgtatttaacaccataaaataatattttcttatttattatttaaatattttaatcatgagtattattaacacagaaagaaaaaatacttattaaaaaataaaataaaataaaataaaggattaaaaaaaactaattttttagtttgaaaaagggaataaaaaagtatgtataatacaacttaaataatactaatatatattatttaatatacaaaatgtttttatgtatttaacaccataaaataatattttcttattttaatcatgagtattattaacatagaaagaaaaaatacttattaaattgttaattatataatgatttccaaatgatactaaacatgagagagatttcattgaacatgcagataaacacatctataatatttgttaccatcatgatgcaatatggtttccattctattttttaatccttctacaaaccgaacttgagcatagtataatatatatcactgaatataatatcttaagatattaccatatcttattagaaatgatattatttatatatatcctatcctactcagcccaccaaatgtagcaaagatttgtaatttttttttgtaagtgttgagttctcaggttgtcgtcacatttttcagattatctgcattttgtaaataattttttttgggttaacttgagacatgggattgcttatgattgagaaaactggcatacctgtgaagaagctactgatgcttgagcaacaaggcctttcctctcaatttcaaatctcttatcattggcctttggtggaacatttcaactacttaatccccttgtaaataatctatctagttacaagcattacccttgagctgtggatcttcttttattttctggatgttctattcggtttcattgtttatgtcctcaagtaatgcaaagttgtatcattttcttttgcttatctgttaatgtagattgtggttttatgagtgttcaagttcgtcaaaatgtgaagaactagcttttgttgaatgcaaggttttactatccctggaatttaagcatatctagttttctgagtgtaagagttttggtgtaaaactaaataaggtccagtaaagtgttatgcttgttagtgtttatactttactagatctggatatcatcaaatcaattggactacagaaccaaagtttgagtattttagttgaaccatcttgcagtcctacaatgatttctttctttctttattattattattttggatcacttggaaactatagtaggagaagctttgaaggcaagcagtggtcaagtttggttggatcactgaaaatttttctcatattctgctgcatcagttggcaataagattttgtccaggttgttgggtggggatttgggcttccatgtttgtccttttggactttgttgacagtatggagattggttaggtttgtagtggtcttgttttgtgttgttgtttgatgcttgtacatgttgtgtacatgggagtttattttattatttttatttgcctgaaaaaaaatctcttgattgtttttttttttaaatttaatttaatttaatttattatatttaggttttatttgtgttttgctgctgctgctgctaacttgtggaacctcttgtaacctgtgttctccaggtggttcatactcaagctaaggtaataacagatca

SEQ ID NO: 13218 - DNA, 13069 bp, Vitis vinifera
  Intron number 10 from transcript GSVIVT01028401001 (locus GSVIVG01028401001) derived from phytozome v7.0 (chr-ID chr 7; pos 7175992 to 7189060)
actatcagctcgagtccctgcttcccagtcacacagtaatccttaacaagctaatcaagcctttaataagaaagatggatatcatgatgccaaagttcaattagctgggcaggatagacgtcctaggggctgacccccaagttttagtgccccctaagttataatttactggtacttacagcatgtgaacccttcacttgtacgtcttttgtattgttgataaatttttttctatgcatagacctgaattctgaaaccttttttttacgtataataaacatctgattttccttttaatacagattttagttccttccaacagcttgcttgttccatatattaatatgatatgacggtggcccaagataatcttatctttctgggtttctagtcaaaacttgactttgaacgggttggagtgttagcttcatgtttggttcctcaaagtaagaactcaccataaacaaaggcagcaatgggagacttccaggaagacactctctcgtgttcctaagaaaatgatggatcttgacttgattcctaaatatctttggaaaaccaggacaaatgagagtctttaaaaccacaaaaagaaacctataaaactataaataggtaattaatgttcctaaagtctaattcacagggactccgaagatcttaaaaatacatttactaggaatgataaaagattctacataacttttataaataatgacttagaactgacatggtaaaagactctctctctctctctctctctctctctctctctttgtaaaagctctttctccttttattagttactccattttttcattctccctttcttgctactctccctctttctttctaatgtcaaaattcacttccgctccctctctcaaccgaaactcacaacccctctctcttttaattgaggtccaatgttcactcatctttttcaaaacctattccttcctttcttatctgaaagtggttaataggaatgaaaaggttcttagttgaacaaaacaaaaaacggtcaaccttcaatgaaaaatattgaataatctcttgacagggtaagtgctttttaaacattttttaggtagcatttagaaattttattgtgttgtaatgattttttgagtgtgactagactaggattaattttgtctatgttctattttgggcaaattttgtaacatctaagggtttattgcaaacgagtttttgaagtgactagaatagggtagaatagggttaagtttgatctactttatatgagtcatggtgcaggatttttttgaaatatctaaggattaagatgttgaatgacttttgtagtgtggctaaactagattaagttctgttctctttttttttttatcctattttgggaatttataatataattggaatttaatacattaaattgttttatgtggctcttcaagagataatgcattagattttatgtttttgttttttaatgatctatgatctatctccgtacatgtaacttcctcgcaaaaatcctttgagcttttattactccattcttcaatcttgtcggaccccaaacctaggtatagttgcaacaatattaaaagaaccaattaacatatcttagtaaaaatgtatcaactcatgcttaggtaaaacaaatatgtttgtgatcttagtacattcttcaatcttgtcccaccccaaactgtttctcagtttccaagacctctgcttctttgtcttaggtaggtgatggagttgggaagttttagtcacttttgtttgtgagagttcaattccttccaatgctcatttctcacttaatttgttctacatatgccttcatcaaaggttgcttctattaggtcttgtgtgatcaaattgtcattttgatttgggatttggtttgggtttcttcaaattgagaagcctttaaaattatctcttagtgtgaaagagtggggtttaggttcatttttggttcctcaaattgtgaatttacaagaaaaaccattttcaagttaatcttatccattattatcactcaagaagttcaagctcgagtaccattatatgaagatatgtatgccttccaacaacatgtcataaattttgtaaagatttatttaaggtatttttttacatttgggatatgaaattaatttgtttcctaaattaatggtgggtcaagtccaactaccactttaaggttccaaattagtggtgagtcatgttggaaaatatctcaaatttctaactagtataaattcctatagaccctccattttatacctttagcacaagccctactaagtgtttttttaatactccacagcaattccttgatggcttattgctactcatacaacctaccttttctgagtcaccttggatactttggttgagagatttatctaccccccctagtataaattcctataaaccctccattttatacctttagcacaagccttactaagtgttcttttaatactccacagcaattccttgatggcttattgctactcatacaacctaccttttctgagccaccttagatactttggttgagagatttattggcctaagaagagtcttccaggtatgggtattatagggtctcttgttcaatttgtttatgatactgctcttctttctttcatattgatttctgggtattattaacttgcctaagaatggatggtgaagaccacttgttttagaatctgattttggtcttttatttgccattgttatgcttgtccttgtttttccacaactttgcccataaaatgatttgaatgaggttttatcctagttgcttgatatttggaatttatgcctttccttagctttgaattccattatggttctctctttcgttcattaagcccgttgataactcatgaaacgaggctttgcacaataaactttcaattcacttattcttgttatgtttttgtcagcgttcttttatatatatatacttctctgctcttggtgtttttctgtggtatgctttgattggtgcatttttgtttgagaatgcaaacctatggataaaaagctatgattataaaggcttagccttcaacgagtccccgaggagatttttgcagcttgagcctagattaatatcttatgtcatggttggatacaacaactgggtaactatgctttagaatatcacaaagcccttatggtgtgtcacacaccccgataggcaacctagagttcgactcgtgatgccaggtcaaaagtttgaccctattacacatatccaagttggcaatcaatcctaataaccttatttatttattttttgcaataaatcaatactaatcttaaatttattaaactaagtgagaaaaaaaaggttaatcttaataaggaaaacacccaagaggggggtaaattgggttttaaaaaatctttttcaaacacagtaaattcaagcaaaagaaatacctcctcaagctcctaactgggtgagggtttcactatacttgaagtttcaaccaaacttctaacacctttacacttgaatttcgactccaatgggctcttacataatctcttcaagtctctactcatttgaagattttaacactcaaataacacatttaaatctctcaatctagctcaataaaggctcaaatacaactcaaatgttaggatgaataacaaggctgcactaaggaatatgcaattagaggtttaatgcaccaagtaaagaatgagagcttgtaaggcaagaacaagtaggtaaacaaataaatgcaagtgttattatgctcataaatgaagtggagctctcaatttataggtttctagcctcaagagccaaaatgccaaaaaacaacctcaaccaatcaaactggagtcaaccagttgactagccgttaggcaataaatgcatggcaggtgatcgttaggcctctaccaaacctcgaccaagaaggcatagtcatagactaggaatgcaaggctattggaagacaaagaagattttttgcatctcttgatcgaacctcaaccaagaaagtataaccaattgaccagtaccttaaccgattgagccgattgaccagtgtcttgaccaattcaccatttttagcttgtaaacctatctttttctatttctttcccttttaacacttaggcaaggtctttaggtaaatgaatatgtcaattttgaattgatttgtctaaggttcatttgataaaacttgggttttaatggaaatgtaactttaatgcataaactgagtttttaaagatgcataaaatgatatgaaaatcttaagtgcactcatgcattcaacttacatatgtttcatatgattaaaaggtctttcatttgtcttgatcttgtatctattgggtcttttgataaatttccaaactaacacttgattttttttttaattcaaaatgattagcaacttaaccatggtttgttattatcaaaacacaattaggagaacccttggactaaaactaagatttgctatatgatttttttccaaaaccaaccatcgcctattcacaagtatagtaaatccaccaatcaccttaccacctaaggtgataacccaaatatttacaataatctctaagtcaaaaatatttctaaaatgttttactaactaacaaaatataatttaagctataaaagtccatataactcaaattagtatatgccaaaaaaggtaatataaattaaaaacaaccattattattgttctattactttctagggctttttggaacactttctaatcttcttgtggttccttagaaactatatctgcattcaaaaattttagaaaataaaggggtgagcattttcacattgctcaatatggtgtcttacgcccaaatggattaaaaaatttaagtcaatagaacacaatcatatgtcaaaatataatattacatctacattgtgtatattaaataaaacctcaaccatgcaaatttaaaccaatcaaaattatcactcttctcattcaatcatatgtataacatatcaaacaattctaaatttacgaattaaataagtcatttctctaataatagatcttttcttttcatttttgccctctttgaagtcattttattctcgtttccatttcatacaaccatttcttcaatttttcttttccttcacacaaccataatgcatatgaaataaaataaactcatttgttatcatccacaatgtttcaggatataatttttatttactccaaacatgctcaataattccaacaaccaacacaacaatttctcttcaattaaatcacgacaaacataaaaaattaaaaaatttaaaaaaaattcacaacacttcatttatcatcaaaatatagtctaaggtacccaaattatataaatttcatttattcccaacatattcaataattttcaacaaccaacacaataatttttcttccattaaataattacaaatatcattaaaaaaatatccatattaacccatatatcatcaaaaatgcaacctaaccataaccatataaattttatttgcttcaaacttgctcaatacctctcaataatcaatacaaccatttttctttagttaaatcaccacaaacctaaaaaaaaattaaataaaaataaacaaaaaagaaaaacttcataaataatccataaatcacaataaataaataaataaataaataaccctaacaataatcatatttcaaatagcataaagaatagctcaaatagcacgtattcatcttccaacaaccaaatctatgatttttttttttaagaaaatacattaaataaaaattttacagttaaaccaccctaccttaaattagaaaatctaactgttgaaactaaaatccaactctgtaaaaatgttcctcgtgacaaattgaactccctctcaaaatttgatatagatcgaagcacatttggtaggtcaaaatgagggttttccatcatggaaaagtaaaaccaacggtcatgcactacatctccctctcttattcttttctttttctttttctttttttcttttctggtaatgacttttcacaccactttgatgtccactctatatatatatattattattacaaattcaaaatatcatgcatatcccttttaataaattaaactactattctttatttcatattctacaattataaattatacttaacttatgattttttagcttacaaaaaataccactatattcttaattaaatttactataagtttgctcttcaaaaaaatataatttgactttaattacctgaagcatttttttactttgaaattcacttaggacatgactccattaactattaaaaaaacaatttcataaaatttctaaaacataaaataattctttgacatccaagaagttgaaattcataataatctttaactcgttaattttaccaatatttatttaccaccaacatttaagcaatattatgaaacttaattccatcaattatttaatcaatcaatttataataatcaaattctcaaccatttagtataatttttatttaatttactccatttgtcaaatccctcaattgaatcaaactttcaaaagttaaattcaataaattcacatttaattaatttacctttttgtatacttttctaaattcatatatcataatttagtcttaatttaatttcaattttattttatttgatgttttataattctataatgtttaattatgattgattgatttttcgttgtttattgcatcaaaacacaatttataacctaattcactattttagaatagcttgtacctgatcaacaatgattttagtacaaactgctgttgtatagtggtttttaggtgtcatccactaagatggattattttgggtaattaaggcctgaatgggaggaaaagaaattattatgatcaagtgaaattggtttaacaattcatgatgaaaatcaaaataacaatgatttcaaatttgaaagaacaataaaaagtaaaacaagagaaaattaataggaaaagaaattctcggagttaggattttctataaagcaatttctatggtgaatagatgttgagatctatttttcatcaagttagattaaaaacctaaattctcatctaaactaattttaaatttgactttaagtctatagctaatttatcttcaaattaggttatttaatccaagagatcaatttaatctatatattcaattcatcttaaatcatcttctaatgattcatacaatgcaactattcgatctcatcaaatctagctttaagaatttaatgaatctatctagtttgcaatgtaatagtcattcaagataattttattattataaatttaatgaatctacctagtttgcaatgaaattataggtatgaagctgcaagtataatgaagaaaagttgcagatatgacacagagaagctggtcaattttattccatttgaaatgagacatttatacaagaaaaataacaaattcttcctatctttcatgcatatttatttaggctattacacttgtttttgaaatttaaaacaaacgaagtcataacaaacttgagctaatcttcagcaaagactaagtcttcaaggcttggaattttgaatgccaacaattgaacactcctccttggcatccgaatgacaaacacctatcttctgcttaagagcttcaaacctttccattggtaaaggctttgtgaatatatctgtgagttgattttcagatgaacaatgaacaagtaacacttcattagattgttgaacttctctaatgaaatgatatttgatcttaatatgctttgttcgaccatgaaacacaagattttttgaaattgatactgtagaaatgttgtcacacataatgttggttgctttaacctgcttttgccccaagtctttcaatatttttcttaaccataaagcttgatttacaatagatgcagcagcaatgtattctgcctctactgtggattgggttgtggtttcttgtttctttgagctccaagtgaaaaaacctgagcctagggagaataagtaccctaaagtacttcttgaatcatcaacacaacctccccaattgctatcggagtagcctagcagcttcaaatcaccttctgcaaattttgaaaattgaactctaagagcaacagttcccttgatgtaccttaatactcttttagttgccgaaaaatgtttctaacttggtgagtgcatgaacctggaaagcacactaacagcaaacagtatgtcaagtctgctagctattaggtataaaaggctaccaattaagcttctatataagccttcatctattttctcgaagttgtcatccttgcttaacttctcgttggttgtcataggaatagacataggcttgcaatcttgcattttaaattttttttagcatatccatagcatacttttgttggcatatgaaaattcctgaacgtgactgcatcacttccattcccaaaaaatacttcatgactccaagattggtcatttcaaagactttgttcatctcatccttgaagctttaaattaactcgagttgatttcctattacaagcatgtcatctacataaagagagactattaaaagttggacatcatcagtttttacatataaggttgcttcactctgacttctaacaaaaccaagtatagtcaaatgcttgtccatggtttcataccaagccctgggggcttgcttcaagccatacaatgtctttcttagaaggtacacatagtcctctttgcttggagccacaaccccatctggttgctctacatatgtctcttcatcaacaaatccatttaagaaggcagatttaacatctagttgatgaatatgccaagaattttgagcaacaagtacaaaaagtagcctgatagtggcataccttgccacaggagcaaaagtctcctgataatcaacaccatactgttgagcatatcccttcaccactagcctagctttgtgcttgcatatcaaaccatcaggattgagttttgttttgaaaacccatttcactccgatcatcttgtgatttttgggtctctccacaagctgccaagtttcattcttgttaatcatcttcatttcttcttgcattgctctcctccacacttcaaaatctttggcttctacataacttgttggttcaattattgttgaattgcacctttgataaatgtcctccaagcttcttgtgcccctcactgaaaaatcatctacggattcaaaagtttgaaaatcttcatgattattgaagtcgacatcaaattgtgcatcttttttatttttccaaacccaaactgtcatttcatcaacttttacattcctgctcaagacaattttgttagtttgcaaacaaaatattctatagcccttagttgatgtcccatagccaatgagaatgcccttctgagctctgctatccagcttgcttcttttaggttctggtacatgataatagcatattcttccaaatattttaagatgtttaacaaagagcttgacaccataccatgcttcatatggtgctttgttcttcaaggattttataagcaatctattcagcaaatataaagaggtgttaactgcctctacccaaaaattacttggcatttttttttcaaatagaagacacctggccatcttcattatggttcgattcttcctctctgagacaccatttttttgtggagtgtatggggttgttagctgatgtttgatgtctgcagtgctacaaaactcaacaaattgatttgaggtatattccataccattgtcggaccttaagattttaatgctcaagttgctttgattttctacaagggctttgatttgtttgaaaacagagaaaacttcattctttagtttgataaaatatacccaacacattctggtatagtcatctataaagagaatgaagtatttgttaccactgaaagaagttgttttcatgggactacaaacatcgatgtgtatgagttgaagtttttcggtggctctccatgcttgattatttttgaatggcaaccttgcttgtttgccttgttgacaaatctcacatatttaagcttcatcacatacgtttcgcatgtcttccaccagctgaagtttttttagctttactaagttcctttggttgtagtgtccaaaccgtttatgccataggtctaaaacactttgagtaactccagcatatgcatattcaacagcattttcccaattgatggcaaagctcttgcttttcatcttcacacaaaaaaatttctctccatagggatcaaagatgatgcactggttgtctttgaattgtagggaatattgcttttcaagcatttgacctacactcagtagattttgactaatatcaggtagaaataacacatcaaagatgagcttgatacctgaatttgttttgacagcaatcgtgtcccttcccttgacatccacgtatccaccattgccaactttcaccgtagagttgtaggttttgtcaaggtcattgaatattatagcattgtgacacatgtggtgtgtgcatccactattaatgagccaagcattataagagtcttgacttgagaaacatgatgctacaaagagtttctcctcctacaaatctgcatcagcaacttgtgtttgctaagattgaggacctttatttttatatttgcaaactttgataacatgcctaagctatttgtagttgctgcacattgcgtccagcctccaccaatagtatttctctagatgcgtagtcttcttgcaatgtgagcaggttggatatttcttctgttggggcccttctttgctgctcttctctctacttttacttttcttcttgctaaactgatttttttctttattagattgtagggtatgcatctgaaaagcaccatctgtgacgttctcttgcctcaaagctcttctttactcttgtgcttggagtgcgttcattagttcagtaagtgaaatttgtgaaaggtccctagatttttcaagagatgaaatcttggactcaaacctctcaggaagtgtcacaagaaccttctccacgatccttgcattatgaaattcttcaccaagcgacttgattttgttaacaatcaaagctattttgtcagaatacttggtgatagtttcatcttcttgcatggttaaagactcgaagtcccttttcaaattcagcacttgcatttgtttggttctatcacttccttgatactccaatttaagcttgtcccaagcttctttggttgccctgcaattcataattctatgaaatactaagtcagcaactgaattttggattaaagtcttagctttaaactttttagtcttttcgtcagtatgagctttgatttgtgctaaggtaggattcatcggaagtggagctattggtttgtcttcagctacaacttcccaaagatcaaatgctttcaggtacgtttgcatctttacggaccaaatttgatagttttctccagcaaagatttgaggagctaacaaagagatgctatcagttgccattttctagtgtggtttcaaatgggttatgaggtgaattttcttggttttctctcaaaacacaggtcctataagatcaactgtggctctaataccaattgttggagaaattacaggtatgaagctacaggtataatgaagaaaagctgcaaatatgacagagagaagctgatcaattttattccatttgagatgagatgtttatacaataaaaataacaaattcttcctatctttcctgcatatttatttaggttgttacacctgtttttgaaatttaaaacaaactaagtcataacaaacttgagctaatcttcagcaaagactaaggtggtgtttgtttttttagctttttactgaaagcaatttagttttagaatttaggttgtttgtttttctactttttcatgacttattataaactttttactaaatagaaaaagtcaaaatatgtagctttttctaaataaaaaaaataacatattggttttttttactttttaatatttaatataaataaaatactacaaaaacaagcaacctaatatttaacactattaagcattaaggttctatttagaattaagtaaaaaaacaaacaccacctaagtcttcaaggcttggaatctggaatgccaacaactgaatagaacagctacttacgataacaaaagacaatgcagaataggggtaggatgaatacatgcattctgtgacatctttgccagtgaacaaggaaagattatataagggcattccacccaatgctctctgaactggtggcagcattccaatggcatccagattaggctctccaagttctacagcataattggaaggtgggaaggtcattcttttggacaaagtgagaaagatagtgatcctctcagcctgattggggactcagattctggaaggatttttttgaaaaccaatcctattctctttcacataactcccatcactatccatgctcgcatatattctctggggggccattctgcacatgtagtaatccactctactcatgccgcttaccattctccgcgtgtggtagaccatcctgcagatgtcagggaccattctgagcacgtcagatcccatcaagcataccacttctcaacagaagttccccccggttctgcaagcgatgctccaggatctgcccatcctctcttctcaagcttcccattttcataacagcaggaatgttggcaatagagaattcttctgatctggttaaaattatttgttttttgcattccagctgttaatagagcacagaattgacaatacttgcttgcacgatcacaactcagcagccccaaagcaaaacccgaagactcttgattcatcgtgtaaggagcttggtctgacgttcaagcacgcaatcactgagattcattattctatggacgattccatagggtcgaaaaacataagcagtgacacaattgacaagcaggctgccatccaatagagttcactaacactcca

SEQ ID NO: 13219 - DNA, 2182 bp, Vitis vinifera
  Intron number 1 from transcript GSVIVT01012864001 (locus G SVIVG01012864001) derived from phytozome v7.0 (chr-ID chr1 1; pos 6336775 to 6338956 reverse strand)
tgagccgtactcttctgtccttacctttttggttggtaagctctcttctctctgtgttttccccttactttcactttttaaaaatggattttttgcatacccatttggcggcctggttattacatgatggattcttttaaggattggaagttttattgggttttttccccacatatcgctttctgaatcttggtctagattgtgatgggattttattaattggcttgattttccattttgatgtgttctgaggtcttctttgaattagagctatctctgagttattttttgttcttcctctacctatttcagtactgctgacacgattgatataatttggtaaatttggagttgatatgatcttagtgattgattttttttatatatagataaattatatgttcaattaatgtttgattggaagtgtcttcagatgattagtaagtttgagaaaaactagaagttgattataagaatgggacatcgatagcatctttacagcatgatccaatgtcattttgctgagtgaatagcaattcagaaggatcttgaggtggctcaatacatgaatgagatttttataatttcactactgagaaatgaatagttgggtttcagattgcaaagttgtcaagctatgtgcagggcttgtaagtgggttgttatattaaattaattcaattaaacatgatttagctcttgaagactctggggcatggtgcttaatgagtttgatggttggattgaataagtggatttcaaaattatgattaattgaatggaccttcattgtacactgtgcttttgtcagtcaagtggattctgattaggccaggcacttggagtccaggacgtccaatacgagtaatggcttaatccttacacactaaaaaagcagttggaattcaactttacagttgctgactactttttttcctaagcaagtgaattggttgaaatttgaaggattaattggttgatcaagaacatggacagaaatgaaataccttttgatctccaaagtgggatatatctttatccatggaaacaccttctgcattggaggaccaagtctaagaatactagacatttcttcattgtgaaatctcatatgaaggctttaaaaagattactatgtgtgacagtacaaaatccagcaattacaatgatgaacagtgttaatttggaaatttggaaatttttattgaatttgatcaatcttatgtacagttgactgagcatcttgtggaagatggaagcaaaaaatgagcatgttcttgttgatgatttggttgcattagagctaagttacactaatttggtgttatgtcatcatgtgctttacctgaccaaacagtgagaatctctacttaagtttctagtgtgggctagctacgtatgtatactcttatgactatgttgagttggttattgagttttatgatggatgaagttgatcaacatgaggatggagcattagtataagtctcagggaagttaagttattttgcaagatacccttaagggaaacaagggagatttctactatcttcactactcttttttctttaaatctgtgaccaacattttgcttagtatgcctaattacgagttgcaaaatgtctttaattctaggaaataaactgaaagcatttttcttgaatgtaatcttattttatcatcctttgataagttgcatggatatagcaatataaacaagagatgaagtcattgcaaatagcctttatgacaaggctaataacagcaagctggatattcctcaataaattatacaaaatgaagtcacttcaccgacatatcaatcagcaaaactggtcataaactgaaaagggtattcaccaagttattatgaaatatggcattgttccttgaaaagggtattcatgtcaagcatgtcttgcatctaagtgatattagcttccatttcatgagtaattgaagagacatgaatagacgttctaaatatgttgtggagaatcatcgttctgttaaatgaaactcgtatttctcagtaagtcgaataaacacagaatatggtaacttctttttgaccaatttatttatagcaaaaatatatgaatatccaagttcatacatttaagttttgtagcctggaattttcaataaatgatatatacattctttttatgacatggcagtt

SEQ ID NO: 13220 - DNA, 6306 bp, Vitis vinifera
  Intron number 14 from transcript GSVIVT01016353001 (locus GSVIVG01016353001) derived from phytozome v7.0 (chr-ID chr 13; pos 4699995 to 4706300)
aggttagtacctttcatcattcattgtatttattatcttagattttaaacatggtcttgatgacagaaaaagaagatttcattcttcttcctgtgctttctcctggtttttccctcattacatcaaatattccttgttatgttgctaccacttagcatttggtgtgtgtgtgtctttttttttttttttttttgtgagtgagggagtggtttggtttgttgcggagggcacttttatggagtatattagttctgggaatttagaaaatgtcgtgaatgtgttgactggcccaaatttttacatccttgctaacttgagatctgactgatggagtcagaaaagattttaaattccagtaggcaacctgacaccacagttccagcgtggcttttatgctcatgcttgaaatcttttagccttccctgaattggaacagcaagttaaaggaaaaagtgcaggtttttagatttttcatactaaggagactctgaattctgtcctgactaagatttagtcatggatattggattatttactggctgattgactcatattgggggaaatgtgactttgacaaaaccagtcaagtgttccagtacatgttctttatgtccaattcatcggcttaacttgcaaaccaaactgttcagcatcatcttgttccatcaaactagctctttcttatcctaataatttaccatgtaggtagaattactgctgatcatttgcttaacatgaacaaagtccaatattgttcttcctttactttttcttctttatatatacatataacagaacacttctttgttctatatgtagcatctagcttttttatcacttcccctccattttagcagcaagtaatatcatgttatcattttttttcaaagattctggctcggggcattgccattgttctcttctgtacaggtggctcatagaagcttcatttctgtcaggctttaatatccatatctgaaataatattcccaccaagcatgtaattcttcataatctttgtttgcatacttataaagggaaaggcccctaaggagcataaccctcaagggggaaatgggaatgaaatcccccactaaagcctctaatgtagagtctccccacttagctaattgctctattgcttgattagtagatttgagagcgcaactaaaatccttttgggagttaatttgtttgggaagccacacatccaatctccaagagacccaatggagaatgccagtggagtcactttcaacttgaaacttgttaaggcccaaggtatttgcctaaaccaaactattgaacatggctaagatctctgactctatagctaaccctttatcagttggcctggagaacactccagtcactgtgctgtgtgatctttggagacaccatcaatcctctgcctaaaatttgccaataaatagacatcaagttgagcttaaggcacccacccatatgagggtggattccacactgccaagacccctgtctaactcctgaaaccacagtatgcctgtctctattctagcttaaccaaaatcaatggagtgctttggaactcctccagaccgactgatctctcaaaaagaggcaagaaagttgactgctacccttgggattgtaaagatctatgcttatcctcaaaaaaattggcatttgggtcctaccagctcatccataggattgctagtgttgccatcatccacgatactggcccctaagccttatagcaaggctgtcaaaagaagtaatcttcatatctgcctcagtccttgggggatctagctcatatcagctaagcctgaacaatctgtaccataatcctaaatcaactgggtaatgaagggatgtgtgatccactgtttggcactgcctatgaagagaacatagttctttgagctaagagctttaaaacatctccttatctgaatcaagttgttggtattgatctttttgttagccatcagtcaaacaaaggctcttactttgggtggaattgggttgccaaataaaactagcccgaaggaacatgactagacataaagacttggagaggtttagctaggacttcaaaaaaggtgtctaagggggccaacatgcttacatgcatgtatgtgtgtatgtgtgtatgtatgtattctttatattgaaacttggggagtaccgtgaaggatgataaattcaaggtttactaaaaactggtcaaaaaggaaaagtatgcatataattacatgtgtaagcaaaacaaactgtacatcttatgaaggaatcaaaacaaaccattctattgggaataatgagtgtttctctgtactaaaagttctgcgagttttcaagtgactgctcaagtttagcaaaagctgctttgtggggttgtatcagttggttggaaggcctaatagaaaacgtcattctggtggggatgatacctattggtactggattcaaaggattagtgcactgttcaagacaatgcaacatccccttggaaaccaaaaagaataatttgattcaggagggaaaggagagatatcttgttccaccacagagaatgatttgattcttggatttctaagaatttccatgatacataaactgaactgcatatctcagggggtataaagtccccaacaaaaggcaccaatttttaagcacctcctttggctaaatgatttgcatgttttagcaaaacaaattgcacatcttatggaggaatcaaaacaaagtacaaccccttacatatctcaagggggtataaagtccctaacaaaggatacaaagtttttagcccctcatttgccttaatgatttgcatttttggttagcgaccttgagttgcttgcaaaatcaataatttgatggacccaccatcatacttccatagacttttttccctcttggacacataggaaatgacaatagcaaagtctctgtcacaacccataactttgaaaaaccccaagctttaacttgttataagccctctaaaagaacatgaatctttgtctcaatagtgatactttctccagctagtataaaaaaatgctctatgtaatgtaccataataatccctaaacactcctccctaaatcctaagttgaccaaggtttaccctaggaacgaccatcaaaattgaactttatagagtttgctaaagggggaaaccacttagttcaagtcttcttagttaacttcttgaatctacaaatgtgattttcctcctaacctttagaggcttgaggcaataggacctttattcaccctatctttttgtattagtcatggaagcctttagttgcctaattgagaagggcaagcaaggaggtttcattagtggctttaagatcaagggtaaaggggaagaagggattcaagtctcacacctattgtttgtagatgatactcttctattttgtgaggataatatagattagttgaaatatcgaagtggatagccacttgctttgagactaaaaagtgaaattattccaatgagggaggtagaggatgtggatagagtggcttctctttttggttgcaaagtagggagacttcctacttcttgtcttggagctcctcataagtcttgtgatgtgtgggattcaatcaaggagaggtttaaaaggaaattggctgcttggaaaaagcagttcctatggaggaagcttagtccttattaagagcattgtatcaagcctctcaatctattttatgtccctttttgcaatttccttggaaagtgaggatcatattagagaattccaagggacttttcatgggaagatacaggggaaagaagaaagatccattcggtaaattggttagatatttgcaaagacaagaagtacagagggttgggtctaagaagattggatggtcttaatcaagccttgctaggcaaatgattatggaggttttcttttgagcgagagaacttgtgaaggaagattttaatgccttttaactcctcgtagaatgtgtttttttgcacaggaatctgtttgggagaagatttgaactgtagatatgttaatgaagaggggatccatggtttatagatgtagcctttgtaaagacaatgaaaaatcagttgagcacatcttgcttcatcttgataagacgagtgctatggacttttctgttagtaggtatttgacttgaaatgggaatttccgattttaatgagaaatctcctccttgaatggaaatttaaggggctagataagaagagaagaattgtttggctcatggctttgatttgcttattttggtgtgtttggaaatagcataaccgaagtactttcaatgatgaaaagctctcaaatcaatgattgaaggagtacattaaataactattagagtggtcccatgcttcattgaaatggagaacctctctattttggatttcttaaatgctcttccttgtggatagcttgggttgttttgttggctaaccttgtatatatttggtgcttgtatcgtgaggttttgtgtatactatctatatacatagagtgcttgcttcttattgtctatcaaaacaaagcaaatgtgattttggtctagcattaacaaactcaaaagggtaccaaaaaatgcatctatagtgtctaatttaaaaaataataataaaatgaagtcatagaaataaaccaagtcacaaagaggcttcattgatgtctatccatcctcaaaattactttctttccaagtagtccacatcacaatgagactagacctcatctcttgaaagacccatacacttctagggggtgcccaaacaatcccagcaaataaaagaagcttatgctagagtcccaaactagcaagaaatgtaaaaaaaggaaaaaagaaaaggatgatggtgatttcactaccaggcaaacacataagagagcatgagagagcaaaggacataaattttttgatcaattaaattaagatgcaaatcaaagttataggaatgggaggaaagagactatccaagagccaaagagatagaagaatttgtaacccttgaaggctggagctaggggctggcagggtgcatgcccggttcgccgttgttccaaattctattttgttatattccattgctttgaaattctttttaactgtatttgataaataaataaataaataatgaatgaattgagaatgttcttcaaattgctatattttttttctacaaaaattttaatgaacttatttaatttcttgataaaattaaaattttcttaacatcaattatatggttaatcaaaagatctatggataaatgataagatcttgttgaggataaagataaaccattaaatatgaggattaattcatcaatatttgaagttttgtatttggttgcctcctctaaactgaatttctggctctgcctttgggctggactatttgaaaatgctggggtttctttccccaccatagatttaaagcatctggcataggatgtgaggcacatgtagtttcagcaagccttataactgaaatgtgcacatcagatgtctgctatgaacaattcatttttctgttcctctattttgaagttagtttactaagacatcatataaaatccattttgtgttggaaaaacaatcttcaaggctttatttgcattaaggattaccttaatggatattaccagttttagagttaattgcccacatctagtaatagtccaaatctctgatgttaatagacaactgaatcttgtttttttgagccatgagtctcaaaattattaaaattcactgtgctttgaagtttttcattgtagggtcataaaaattgaaaccgaggcaagtttaaatattaaaattgccctatggcattaagagcattggtttatttcttttatttttcttcaaatgttttttctcttaccttttaagcattttgccattgtcttgacactgtttgtcaacccaaaacttctctctattcatcaggcttgggactagcagtgtgaaaagacacccccaaaaccctgttcaatattaaaactaaaatattaaaaataataataatgacaacttactaaataactccctgcagaccctcacccacaaggttttactccctaacacaaaacaacgcatggacgcctgcatgcttatagttatgtgtgttgaaactgttgtagttaattattttactttcatgttttggaaaagagtagactggggctagagttgaacgcctgcatgcttttagctatgtgttgaaactgtgatatttgttttactttcaggttctggaagagattagactggggctagagttgaa

SEQ ID NO: 13221 - DNA, 6095 bp, Vitis vinifera
  Intron number 1 from transcript GSVIVT01034233001 (locus G SVIVG01034233001) derived from phytozome v7.0 (chr-ID chr9 ; pos 13191269 to 13197363)
gtgtgggaaactcccctccacgtgtcccttttccaactcgaacaccttgaccggctagcataagtacgcaacccgtctagatcatttcatctggatcatgatcagttccgtcttacactaggcataagaaggtcattttcccctacaagatcagacggcaagtcggaccccccaaacagatagggttatccaatcaagtcttcaagacccacaggtatgcgtgatcattcacgcctgacatgtgaacggtcgattagatctcttctagccctcaagtccatgtcaattaattgttgcacatagcttcaggccatcaacgtgctgaggggataggcaattgcacaatccaaactcatggcatgtcagctgatgacacctgctagccacccaaaactatgatgattgcccagccgcctacaagacaatcatcattacaaagaaagtcaaagtgtctaattagcattacagtagcactctcttcaacactataaaaaccctccaaaaaagcacaaacaaggtacgcacgctcatatgcctatccactttctcccactaagtagcttaagctattcttgctggacttaagcttcggagaggtgtacctggaccacccgtctggaaaaaatttttgtgcaagaaaagaatccatccaactttattattgcttggtaaactctttgagaaacacaaagaaaggaggaaggttgtctgattttcttataattggacaaacctaactccagttgacctagaatcaacacatggtgtattaagtttctcaattcattgattcaaaaaaagagtacatagagaaaatatgcttttggttggctgtgtgattacaagaaaatctagacttagtagtttcatccaaataaaatattttgcaaaatctttttctagtatgcttatattataggtttttattaatttttttaattttttatattactcattttacaaaatgaacaaaaactttaattaaaaaaattaatttgtaattaggaaaaaaaaaaaggaattaaaagaaatgcatagaacatatggtaaaataatattaatttatgtattattaaataatatacaaattattttaatatattaaaaatataatataatatttttttatttctaaatttttaatattttaatcattaatattagtagcaaatgaatgaaaaattacttactaaattataaatggtaaaaaggattcaatacatttcttatgtacagataggtggtatgttagattgaatcatatttcagatcaatatatattgattgattgtctccattatgttgttgctagcaaataccgttattttttgttttagatcttccaaatccataggaaatccgaacctactttttttttttttatcctttgatacaaagattcattcttttcacaaaaattaggaggtagaaccgataaagatttcttattttaaataaaattagtcaatgataaatgctcttactaaactgaaattaaataataaataaaattagtcaataataaatgctcttactaattagtattattataatgaatggtttctcaaagttaaattaaacaataactatagataatgtttattttttttgttgaatagaaaaagttaaaatatttactttttttcattcaacttaaaataactcattgatatcaacccataaaagtaaattgaaatgattgataacaagttcattttaattatattaattgatatcaacacgttattttaaaaaaacaaacacacttcaaattcaagtttgattgaaattactacttagacatggccaaatactcttgcaaagagacactcaaaatacgaattcttgacatctagagtaagacccagtccaagaatccttctttgcatcatcttaaaaaataaaacaacagccctgatcggactgttcaacaatcatcataatgtaatttagccaaaatccaaagatgttcttcaacaatcatcatataatataagatagtcaaaagtcaaaaaatggttaaaatacatcatactttaatttcaacactatagtttaaaggcaatgagagagcggtagatgtattcggtgcccatgtcggcatgctgaatgtacgaacacggaatcgttatcctgaaggctgaaagtgatgtcattgagatatgtttgatactatgtatggccatttcaacacaagataagcatgacaaattaaactatcttatcagagccttggagcccaaggttgaatccttaaggatacatgcaccggcgttttcctttctaatatcataattgggaattgattttcactgctaaggtttagcaattaaatgctatataaattataaattataaattcatgacaggatttttttttttttgctttattttttgttttttatttttaaacaaaaattttctctatgaaagaataatatcttataaaaaaaagtataaacttattttatattttttaaaaattttaaacttaaagttaataaaaaaattttgacatcaagacccatttgatcatactttcttaaacttgtatttaaaaactatttttattctttaatttaaaaatagtttttaaaaacaagttttaaaaaacatgatcaaatgaactcatgtttccttttattttaaaaattttgtaaaaacaattcatacttattctttaaatattattctatatttcattttgtttttaaaaacaaaaaaaaaaactatttttaaatcacaagttcaatataggctctaaatttttaaaaataatttttaagagtttttatgtttcatataaaatttattattatttcttagaatttaaatatttttaagttcactatccatatatgggctaaattaaaaagaagataaataacaagataaaattttataaaatttaaaatttgttttttaattaaattggttaaaaacacgatggtaatacttatccattcaatttaaaatttttatagttcaccgataagatcggtcataaataataggaacattggtgaattcaataattttttctctatatgattccttttgtttcgataagattcttcttggtgtcagcgaatgtttcaagctacaaagatctgtaatttaaaaaaaaaaaaatattgatattataaaatgtgtagaaaataagaaataatttaaaaaaaaattgactaaaatttgtagaaaatatgaagtaatttttttaaaataaaataaaaaattgactttttatggaaagtaatattttctccactatcttattttaaaaaaaaattctttaataaagtagttaaacaaagcaaaagttgttgttgaagtgattggtccaaaataatagaaggtagagactagaagggcatgagaggacatgattgaagaggcaaagcaagtgggagagaaaccaaggtggtaatctgaatttggccggtagagactagaagggcatatgagaggacatggttgaagaggcaaagcaagtgggagagaaaacaaggtggtaatctgaaatgtggttttaagttggccgggagacactgggccacagagccctactgctttgtattagaaggtacacaataaatgcaatgcagcagtgttggttgcagagtggaccactcctccactgccccactccctctcacttttccccgacatacactgcaagccatatgagccatgcccttgcgcccgctctcaccaccacaaaaaatatctcacttcttgtttctaattctaaaattccactggcccccttcttcctcacttcctcatctgttaccaacaatactaaaattaccttgtgaaaatgttagcatgtaattggtaataactatgaaaatatcttttactttttttttttttaagaaaatgaagtaaagaacaaatttagtgcatgtttgttgattgttttaaaaaataatataaaaaaatatttaataataaaaaatagaaagtaatttttttattttttaaaatgtttttagataatatttttatttaatgttttaaatatgataataaaaaatgtgaaaaaaaaaaataaaagattttatattatgtagaaatatataatacttttatagacagtaaactaaaaaaaggggtctttaatatttgaattatccaattaaatttcttaaaaataattaagaattattttgaaaaaatgtttttccatgatattctaaagggaacttggtcaaggcttgaattcggaaatgtggtgactgatagttcagtaatttagtgagaagctgcgtgggacggtgggaggcacaacccaatcggtgaggaaggaggggtgaccgggtgagtctccgtgggcgggcgagagacttccatggactgaacacatcatcataacagacaaaacatgtaacatgtgcacacgttttggtcttagaaaggtgggctatgtgcgatgaacacacacatgggtgccgctcacgtggtctccacgtgctacgcatcaatcacttgacgaccccgtgacgactgactactgccgactgggattggcagtcatcaggcactgcccccaatcagtccccttctctgttgctgaccgtctgatggacatgtgtctggtcctaagattctcttctgtggccccgaccatcaaagtctgttaaatataaagcgccacgttaatatgaccgcgcggtacatctttgattttgatgtctgacttttcttctttgttgccttgttcgctttggcttcctccctctttctcaccgccttccgtgttccagtcgtaaactcccaccaccccactcatatttaatcttattatttctttatattttttatttttcgttttcgtgaaattaaagatattagatttacaaaaatgagtaaaatacttttatcataactgatttgcctaaggatatcatatgtttggtccggaaaatttgaggggaattacaagaaaaaaatagagagaaaaaaagtaataaaaatattaaaaataagttagaaggtaataaattatttttatatgatttattaaactcgttaaattgatttccctctattatgcaaatgttaagattatgtttagtttatgaaaaatttaagggaaagtataaaaaaaaagaaaataaaataaaaaaaatagatttaaaattaaaaatttatttttatatgtccttttagactcatttaacttatttttttttgttatattaagattaaataatttatatttatttaaatttttaattaattttaattttgattttcttttatattttttatggtgaaataaaatatgaaaaaaattatttttttaacattttttttaagtactttgccaaaatcatatataaaataaaagttaaatatataaatttctaattaattttaattttattttatttttattgtttttgtatttttcattataaaacaaaaaaaaatcattttccttataattttgggaatcaaatatagtaaataaagcaatattttttatgttagttgactcacttgatcaaatttttttcttttttattttttctaccaagtttaacatatacgccgatataacaattaaatatttgattaatttcctataataaaatggaaatttgatattgttaattaaatattacgtttaatttctatatttatatttatgaaattattattctgtattttaatttaggtatgatttattataaagtaaatatgaatccatatttgtaaattataattagaataactaattaactattgtgggacattgaacaattatttatgcgctggaaattgccttgccacaactccaccgaggttgccactgctgagggcccaacaccgattatatatacattggagacagccgagcctggtctaaacacaagcaagagacaccccagaatcacactatcccaatcaagcttcctcttccagggaatgcagaaatatggagagatcttctctctcaaactctgagttgtcggtgaaggggaacaagtccatcggcgaccggacttgccataggaaacacgttgaagacgggtagtgcaccagaccagaatcggaaccagagctagtagaagcaaaagtttccg

SEQ ID NO: 13222 - DNA, 9474 bp, Vitis vinifera
  Intron number 1 from transcript GSVIVT01013170001 (locus G SVIVG01013170001) derived from phytozome v7.0 (chr-ID chr2 ; pos 7207221 to 7216694 reverse strand)
ctgatctcacttcccagaacggtcctttaacttttgtgagtttctgatttctgttgttttcttgtttttgtgaagatttattttgtggtttgttgtgctctgttaaagcgaaggccttggtttgatcgaggtgacaaataggatttttgcgattttgattcgttttcttgggaaacgaccggattatttggttctgattttgaaaggttgaagcttttgtgaggaattgtgttttacgtggctagcctgcaggtgttgttggaatgaattttgcaggtgttactttggagtgtaagctgcagaccaaaactaataaaatagtaacgaaattttttgttgaaaaagaaagcaattttggaaggtgctttcatagaaagtgacattgaaagttgcttgctgctagttcatctttgtaagttttgctttggattgtacaagcaattttcgtgtttgaaagtttcttgtaatttggcatcattgagacatcactggtttttgtctatgacagatgttggtgaatgattttagtggtgaagtggcacttggtaatgcctaacccataaaaaagcggtgttggagtggatatttattggattcgagtttcttctgtgaacttattgtctcttatgagtgagaagttttaaatacagagaggtttaagtttggattagtttagcttagctcatttcttgaatctttctattcattctctttcgtttggagatcaagctcttaaaatctcaatattaatggagatattgggtttcagaaacacagagctgttgacaatttctttataacagatttgatttggagaaaataacccaactaagcaccaaaacatgaaaaatgtcaaattagactctcaaagcctcaataaaatcagtaatgcatcatttagtgtcaatatgataataaaataaaatagaagtctactttattgaactaccttatttaagtaccaacaaatctaataataaataatttcaaatttaattttttttaatatcatttcatatcagattaagaagaaatagtgaataattgatataattttaaatccatagagtatatatcatatattcacatgaatttattgtcatattagaagttaaaattaccaaaaagagtttgaagaagttgaatgattgggttcttcggagagaatggtgaaataaagattcatgaataaatttttttatctattaccgaactttgttggcatcttctgaccattatttaattaatgcttggagcaagagaaatgaaatgctgaaaattgatgaaagtagaatgtactaaagagggcaaaacaaatgcaatttattgcaggcaagtagttcttaatgatactgattttattttattttattttattagtttttatggacaaatgagaatatatattaaaagcgcctaaaaagaggcgtaccaatgtacaaacgatgtacacaatagatggctaatctaggcgagaaaaaaaaaaaaaatccttctccttacttgaaaatcaaccaatttgcaaaatttgtcatagttaagtggtcttctatgtacatcctagtccaattcacaaaagtatgcataaaattgggtttgattgcccaacattgttaaaagccttcttgttccttttcctccaaagagtccaaaacaagcacaaggatgtagccctctaggccttttttcgtttcttccccacaaaagagccatgccaacccaaaaagtccttctacttgaagagtacattacccaaaccacttcaaagagagagaatataaactgccacaacatacttgttttagaatagtggagaagcaagtgacctgtcatttactcctcgcctttgtacaaataagacctatttgacaaagtccaccctattcttcagagttaattaagagttagaattctacccaaagtcacttccttgacaaagaaaccaaccttcattggtgcccatgtgctccacactacacttgttgggaaagactcactatctctcttggtcaaggatgaatacggggatttaacctaaaaattgttgttcttggattcattccatctcattttgccctcctcgtcccctttaactgacagcaattgcaattttcgtgggaaagcctctatttcctcaagatcccaatcattaaactaccttgaaaattgggggctctaaccacccccttcctccacctgctcacacaactttcccactcatccatctttgtgagatgcgatatagagtaagctctttcaagggtaaatcctcataccataagtcttttgagaatttaacccttctttcattcccaattgagaagtgagatttgtttttatgcctttacactcgtttatgaagactttcacccccatttcatatccttctcttgaccctctcgaacacaacccccttcctccttgccgaacttccctattatgatttgtttccataaggacttcctttcagtagtaaatctccaattccactgccaagagaagccttgtttaagcttgaaagattgcgaatatcaagacccttgtcctttcccaagtagactgtggtctaattaactaaatgaggtattttctttggagcacctcctccccacaaaaagtctttttggatcttctcgagtcttgcactgacctttcttagaatgacaaatgaggacatgaaataattggaaggcttgataatgtgtttttgatcagggtaagcctccctcccttaatgatattggattgtgagtaattgcaagaaattgtgagctaaaactcatgatatcagctttgttgatatttgggttgaaacatccaattctcagtgaagaaatgtaaaaatgaaattggaggttcaaattttcttggtataacttaatatttaagatctcatttcaagactcgatgactcgttgagattttggtctgtgttatagatgtaaaatcaaatagtaactttttttggtagataggttgcaattattctttctatgagagagcaggtccaacttgagtatttccattgtctttttaaattgtattatatggcatgtgtattcaggccatagtacattgcttcatttgtttttcatcggttttttggatgtaggcacttaggttggtagaagtttgacagttggctgatgaatgatcagaggtggtgttcctcaaccaataactgaacaactttaaaggggatgtttcatagtttcaagtctagatatatgcatttattttggtggtacttgacaaaaccatagctttaagggaattggaacatgagaagaaaaacagaaaatatttgtatctactgaaaaaaaagggcataaatttgattaactttaatggattaaaatgcgtgtcactgtgctgatttcctttctaaaaagaaattactaacttgtgatgaatgttttatggaattgcacatatggaaactatagggtgtattatttttatttattatttatttaattttttgcattggcctcccactgaactgtgatacatgttgctgatattaagaaataagattaaatttaagggaagaagacttagtaagaagttcattaaacaactgggcaactgcagcatgaacaaattataaaaattagaaaataacagtttctgaaataaagataaaaggatagaggctgcatgcttggagacactagttggactcatggagatttttatttttttattttttggtgattgttccctcgtgctaaactcaaactactcattacgagattctgatcctatccttctagctgttatagcctctatgcgattgtcataccattttccattaccatagaatcctaacaagcatcctaagatgcttcttaagaattcttcccaagcccttaagcctaatatggcacatatttggaatattacttttaattccctttaccaaatcccatatgatgcgtatgcacttaagaagtatcatacccatgtttctttgtatttgtgttggggaatggttcttggggtcaatgtcctggatgtggctgctggtgtgaacttcaatgtgcaacttggatgggaatgtgaacatcatccatggggcaggtcatcttggtcaccaacttctttcaaaattgacacaaatgctgccaccaccaccatcattatcatttcaactgttatgctgcaatatatggaaagatgtcacttcatgttaatcgccagcttgctcctgtggtgtgctctttattttaatcaaggtttaacatttcaaactctagcctacaaagtgttagatttcctctttcttgaactctttggtgtgatgtcattctccttgaagattaggtgtgatcaataggattaaaatggtcattggtatcttctcattcattaggttttaagacttggcacaagttgtactgcagatttttgtcagtttattcacgggtttccttttttagcttgttttaaagctcgaataaacgagctagaatatagtccaagtgacttcacagctaaaggataagaaactttggtttagcaccttgatggtgatactttatttgtattggattctaaattggaggaggttagtcacttgagattgtaaggtgtccaattttgggggggagagggagtgaagtgagaggtaagagagggttgagagtgacaatggtcttgtgagaagattacaatgttgtggacaatttcaaattcaaagagaatattgagaatttagtagagcaaggtttctatttgtcttcctttttaggaaatggagccttttataatgctcctgaatactaactctctaccaattgctgaatgatagggggaaacttctgatggtagcaagtttttcatagacaccaagaatccacattccctcatttttttgctgaaataggcttgatgcttcccaaatgcacatatgtgaatccccaactttcgccatcagaaaaggatcttctcactagtcccaaaagccttgaccttttttcgacctagtgggcattgattcctgactaggataagtgtactactattaggatgttatgtcaaggatgacacctttgaaaggatattagagaacatcttggaagaacgcattggccttttgcctttaaaggcgcatgacattgcctctaccaagtgatgaaataagtggaacccccttcatctatcacacatgtttgtttagattttatgggcatctaaagtatttaggcatccatctagaagtaggcatccttgcccaaatatagcaatattgctaggtgggaaggggtatggagacgatgaatgtaggagaaggtttgaagctggccatgcagtgcatgtctgggagtgaaagacacttggggacatgctagtggagaactatccttccccaaatagtgcaatattgctaggtaggaagggggtatggagatggcgaatgtaagggagggtttgaagctggccatgtggtgcatttgtttggaggtgaaagacacttggcaacatgctgggggagaactttcttgtctgcatgctattaggctgcatcgctcttggcatgtggttatgtcataatgatgacaaggagacacataattgaaaacattacacacacaattaggccatgtgggatgttcgaaataggacatgcaaatattggaaaatatggtgtactctacctagatttggagccaatagttcttactcttggttacactctcctttttgggagatttggcggaaggttgttaggtggtggtgttaggcgttgatgagagaacaaaatttcaagtatgctagttagagtgcatgatatacaatgtgggcctaaatcatacaagcttaagttttgtgtaaagttggcaattgaaaaatgttgaaggcccaatttttttcaaactatttgtaaataatcaaaattaggtaatatgtgacttctctttttcttctcctttttgtagttaatgaacaacacaagaatatggagtcttctagggcattccgaaattttgtgattattatttccaatgaggtagcaaaaagcacaagttttagtaaatttttttttaggtcttaaagcatctgttttgttttagtactagtagctttcaaatgaatatcactttgtaagcatatgcacatcctatggaaacgttcatcagtcatagcaatgaagggatttgcctccttagcctcatttgtattaccatgcatgcggtaactctaggttcctacctaattgctcttttgtgtgaataaaaagtttttggcctcaagatcttggttggatagggtttggctagaaatggataaattggataaaatgatgtatccctttagccaatttctctgttttaattgatggcttacctatgggatttttcaaagtttaaggggatttgagacaactggaccctatctcgtcctacctgtttgtgatttctatggaggcccttggtagattgctcttgaaagcttaggatagtggttttattttaggattaaaggatgtgggaagagggggtgggggtgggggcgaagggatttctcatctcctttttgttgatgacatcattgttttttgtgaggcctcttaggagcaagtaactttcttatgttggttgcttatgtggttcaaagtcatgttgaggttgaagattaacttggagaagaacgagatgattttagtgggggaggtggacaatttggcttgtgaaattgggtgtaaggtgggatagtcatcttcttctgacccgaggcttcccttgggggcctcatacgagtctatgatggtttgggatggggttgaagaacagttttgtaagaggctctcgttatggaagagataacacttctcaaaaaggggaagactcactttacttcccagtactctagccaatttaccactctattttatgtctatgtttaccatttcaagaattgtaaggttgagattagagaagattcaaaaggagtttattttattttattttttttgtttgtttgtggggaggaggggtcttagagaacaaaatacacttagtcaagtggttaactgtttgtaaggaggactaggttcgttttgtttttttgcttaataaggccctttttagcaaatggtgttggcacttctctagtgaaagagatttgttgtggaagaaaatcattaggggaaagtttggggaggaagaagtgggttggaggtcagaagtggtgagaaatccttatggggttggggtttggaaaaagattgggaagcagtgagaattttttaataggaagatttcttttgaggtgggtaatgggagaagggtgaagttttggaaaaacacgtgatgcagtgaggagcccttatgtgagactttcccatccttgtttgccctatttgattcgaaggagacatgggtagctgattttttggagcaacgtggggaaggaggtaattagaactttcattttgttaggaaccttaatgattgagatttaggtgtcatggagcggtttgtttctaaactccaagaatagatagtgaagagggaggagggggagagagtagtttgaaaggaagataacgaaggtcttctttggaagagggctttcctttttgttggagacaaattataccacccctttccctttaaagataatatggaactcgtagattccttcgatggtgagtttcttcacttgtgaggcttgttggggaaggttttgactttggattagtttcaaagaaaagggtggatgttggccaacaaatgtgcattgtgtaagaggagtcagagtccattgatcatatcctccttcattgtgactaggcgagaattttatggcaggtggcattctccatttttactattcggtgggttttatcttgagttgattggggagactttcctagaatgacatggttcttttatagatagaagacatattaaggcttggagagctattcttccttgtatttgctagatgatttggaaggaaagaattaggagagtctttgaatgtgaggaattgttagatcaaaggctaaacaatattttacttaataatttctctatgtgggttaggatgtatataggcggaggatatacacatttggttgatttcatagattggttggggcttggacgagggagtgtttttttgtgtgtaccctctttcttgttttttgtttaatgctctttgtatacaacccatgtactcttgtgtgcttttagcgtttattaatacactctcttacttgtcaaaaaaaaaaaaaagggtttttggcctctcaatctgattagtccacttagtagattaatattcaaagacaggcttcacttgatgtttctcaactactatattaaaatcaaaccctatcagtaatgcaaaaatgttttaagatattaggatgaaaaaccaatagttaaagcaggaatataagaatccactataattggcaatgctgataagattgatattggttgaaggccaatgcagaatttggtagaagaggatttagaaagagagagagagaagaaaaatccagggcgtctccaacatgaagccttaggtcatcaaattctcaattcaaaattcatcactcttacagcctcttttataaattagaaatccctaacattgatcaatcctagtcctgaattaaaccaactctaaccattagttaaacaaaaaaggcaaaaaattcattactcttacagcatcttttataaattagaaatccctaacattgatcaatcctagtccttaattaaaccaactctaaccattagttaaacaaaaaaggcaaaaaaatctttattattattttattaattgaaaacaacaattttattgcattggaatattaagtacaaagaaggatgacaaatccttccaagaagtacacggtcctctgtacaatagaactactgtaacttgctgcaatagcatgatcagtatgttacagttacttgctattgtagtgtatcaaaatcaataaatgaatctgtaatttgtgactctaatactaggtaatttctttctaaaactcaacatttttaccttgttattactattttccttttttctttgatgattgctatcattgactacctagtttgttgttaattaaaccaaataccaaacctttttttttttttctttttaaagtttaaatataaagaatgtctaaaacaaatcccatttgatttgttgttgcatcacaatcagattgtgtcattattgtttcatggatatttacatatagaaggattttgtttggttacatcctgggttccaacgcccatgaaaagaacatatcatatcaaaatacagtttatgactttatggtgagagtatatctgttttaagagtgttaaggatcatgtttattgtgttgtccttttatatttttatgatattcatcatattttgcaatctataatttggaaatttcatatttttttaggatacggtgaagactccttttgaacttcaatctag

SEQ ID NO: 13223 - DNA, 6052 bp, Vitis vinifera
  Intron number 5 from transcript GSVIVT01009623001 (locus G SVIVG01009623001) derived from phytozome v7.0 (chr-ID chr1 8; pos 9995472 to 10001523 reverse strand)
gctctttgggctaaggtgcatatgatctactgaaatcttctactttgaaatttatgatatgcttttcgatctcaatatgccacataccagtgatattttttaatttcctatacttaaattagtgttacttgttggtattgcctttatgaatgaatattttcataaacagtcagcactctcattgctatgatgaataaatttgtttttgataaaaaaagaaaaagaaaacttccttgcaactattattagtggaaatgggaaaataaaagggcctattaggccatataaatcagttaaaatgctgaaattcgcttagtagagattgcttttaattgtggaaggatttgaaagggcttgagttctctgattctggcattccataacaaaaagtcaagagctcctttgtcctcagtagtgatatgataatagatctgtccttttttgaagattccagtactacaggattaaaccaaacatagccacagaattctggcctgacgccttataactgtaatatgctcctccactccaggtccgtcttcttcctccgggtttggtctggggggtgggatctcttcttcttctacttctctttctcttgagggtgggtctgagctcttgggtgttgagtgcattgaggagggtacgcagggggtgtgcaggaagctcattgtctcttcacatttcgaggatgagggttctttaaaaatggtccttcaagatggcagtgtagtagacccctctatttcaggttgtggaaatttaggggaaggcctttagtcttcagtctggtggttttgaaggtccagagtgtgggaaggatctttcagttgaatggtcaaagagcaggtcggctgtgttcagtaagttcttgggtttgccaactgagggttttgagaaggaaatgacagccttgttaaggaaaatgaaggcaaggaagaagggccctcttgtttgttgctaaagtcagcaagacttcttctcgcaccaaaactgagagagaacttaggaagttggaattttcggtgaaatatgatggtccaacagggagttcagggaaagaaaggtgaggaggaaagaaggggtgggatttggtttccgtttcctcatgaagattagaattttgttcaataatgttagaggggttaatgacaaagagaaacaaaaggttatcaagtctgtaatcagaatgcaggaggttgatttggtctctgcttgcaagagaccagggtccaggaaatgtcggggcatttggttagaagtcttggtgtgggtcgttttttggattggagagcagtggaagcgaggggatcagctggtggccttgtggttttccgggataacagggtgttggagttattagagatggagggaggtgctttctttgtttcttactgttttaaaaactgtgaggatgggtttgtttggttgtttatgggggtttaagggctggggctaaggggtgaatgggatgatttttcggtagaattggggtacattagaggcttgtggggagatccagggtgcatcagagaggacttcaacatgatcagatttccaagggaaaggaggaattgtttcagtccgcagctaggcggagattcttagagattattgaagagttgaagttgattgatatccctttgaatggaggggcctttacttggtgtggaggtttaaatgatcaatccatgtctaggttggatcgattcctagtgttagaaaagtgggagaatcattttttgtgggcttctgcagtgtgtcttgctgaggctggtctttattcattcacccattctgttagatgagggtggcttaaagagggaaaaaactctcttcagatttgggaatatgcagattaaagtggatggtttcaaagaattaattaaaagcaggtggatgagttacagttttacgggcaacaacaattttgtcttagcttccaaattgaaagccctgaagaaggacttgacgatttggaatcgggaggtctttgggtgtgtggctaatagaaaggcaaatgctctcaatcggctaggtttttatgaggtcaaggagagggaagctccgttggtagggggatgagattatggctaaaagattggctataaaagattttaaaaagtgggcactgtttgaagagatttcttggagatagaaatctagagaattatggttgaaggagggagatagaaatataaaattctttcacaaaatgacaaatgctcattataggaggaatttttttgctagagtaagggtgactgggaaccggttgtttggtgaggaggagattaaggagggggtgaccgcttttagttatctctttactgaaaacggtgactggagacccaacattaatgggttgtcttttgagtctttgactcaggaagacgtgaggagtttggagcatcctttatttgaggaggaagtcttttcagctctatcagctttgaatggggataaagctttgggtcctaatgggtttactatggctttctggcatctttgttgggactttatcaagagtgaggtgttgagcttctttaaggaattctttgtcctggggcagtttgaatgctacctttttggtcttaatcccaaagaagggtggtgtagatgatctaaaggattttatgcctattagcttggttgggagcttgtacaaactattagccaaggttctagcaaataaacttaaaaaagtggtgggaaaggtaatcttttcttcttagaatgcttttgttgaaaggagaaaaattcttgatgcagtccttgttgccaatgaagccattgattcgaggttaaagagtggttctaatggcattctatgcaagttagacataaaaaaaaggcctacgatcttatcaattggaatttcttattagcagttttggataagatgagttttagccataagtggattgagtgaattacttggtgtatttctacagccaaattttcagttttgatcaatgagacccctattggtttttttcaaagctcaagagggttgaggcaaggatctctatagaggcacttagctttcttcttaagaaagttagggtgagggggatgaggggatttaaggtgggaggtagaggtggtgagggagtggaggtgtctcatcttttgtttgtggaagacacattgattatttgtgatctaaggaccaactattgcatcttcattgggtcttgatgtggtttgaagtaatttctaagcttaagatcaatcttgaaaaaagtgagctaatcttagttggaagggttcctataatggaggagttggtggatattttgaggtgtaaagtggggttgttaccttccaattatcttgggcttcctttgggtagtatctttaaattgacaacaatgtgggacttggtgaggatgcaaagaaagctcgctaggtggaagaaacaatacttgtctaaaaagggggggtgggggtttaattcttatcaaaagtaccttgtctagcctatcgatttatttcatgtccatttttgttattacaagaagggtgtgctatagattggaaaaacttcaaagggactttctttggagaggggggcctcttgaacataagcctcacttagtgagttgacacaaagtttgtaagccaagggcgaagggagggctaggcattcaaaatctttctattttgaacaaggctctcttaggtaaatgagttggaggttcatgttagaaggggagcctttgtggaggaaagtaatcattggtaagtatggggtagaagaagggggttggtgctctttggaggcgaggaagggttatggcatgggattgtggaaggctataaggaaaggatgggatgctttcaaaagcaagatttcctatgatttgggccatggaagaagggtaagattttggaaggacatttggtgtggggacacccttttgagtatctctttcccctctttgtttgctatagccacttcaaaggaggcttgggtatgtgatgtttgggagcatactaattttggggggtgttggaacccccgttttgtaaggaatttccaagactgggagttaggttgtgttgaagcactccttttgcgtttgcatggtaaatcagtgagtagggaggtggatgacaaagtggtgtggatggctactaagggaggctagttttcagttaaatctttctatgatgggatagttcaaaggggttaagattctttcccaacaaggcttatttggaattcttgggctccaataaaagtgagtttttttttttgtttgggaagcaacttggaaggggattctaaccatggacaatttgaatgggagacgctagactttggtgaacagatgctttctatgcaaaggcaaggaggaatcttgtgatcacatccttcttcattgttctaaggttagtttgttatgacaattggtcttgtttggagtggtttgggtgttgcatacctcagtccaagcaacatttcttagttggcatagccaatccgttgggaagaggaaaaagaaggcgtggaatgttgctcctctttgtttgttttggactatttggaaatagatgaatagaagggcttttgataatgttgagcttttagatcaagaggtaaaattctcttttctttgtaactttttagagtggactcaagggggtctagggcaagagtccttctctatgattgattttatcaattggttaggttgctattaagaagagggtttttgtgttttttctttggtgcgcacacgtatacttcttgtgtacttggtgaagcctttttggctctttaatgtatcttttgctcttttgcctatcaaaaaagagtgaatctgagccactgcctccagaatccacttcaatgtaatcccaccttttggaatcctccaaattaacaactccaaaatcctttatcattctgcaacaataatccaagtctgttgtattcggtggaaaaattctcaaaaaacctcaatcattttttttcttgtgaagaacttgtttggagagtatttttctttttggattgtatcttgaatcttgtctaatattttattttttatgcttaaccctagttaattctgacagcagcttaggaataattagataggtttcctaaatccctaaattgattggacaagaaattgaaacagaatggagttttgttcaaaagggagaactacaacaaaaaaacaattggttagttggcctaaagccttaactgatggagttcactgtcccgattgatcccagtttatgcatttgattgattctatggacgggctttgattgatctatacaaaggcttgatttaactagcaaatgtcacctgtgtttctgtcctacatgcagaccaagagcaattaggtctttttttaagagacaaagggccaaatttaatgaaccttactatggcctctaagtcacttgccatgcttaatatcatatgttgattatgctgaaatgtcttcaaatgatgcaaatgggagccttcatctttatgtctttgatttgacaaacctaggctttgtttgagaagtgtttttgaaaacagttctaaaaaacaatttttgaaaattgttctttgatgttttatagaacaaaagtatgtttaggaacttggaatgtttttaatcgttttctatgtttttaaatgtattttaaaaataactttaatatatagtgatttatttttaatcattttccatatttgtataattattttttaaaacagtctttagaaaacaactgaaaataactaaaagattttctctcaaaacatttttttttttcgttttttggttgctaaatgtgttttcctattttttgttttggagaaaataaaacctttttaaaaaatagttactaaatagggccttaatctataacttgttttctccatgtaattctcaaatacttaaacatttatgtttatttatttattttctttcctaattatccttataaatctcatcttcatatccttataaatctcatcttcatatttgcccataatataggaaaataaacctacagttactgctcaagggaatct

SEQ ID NO: 13224 - DNA, 3190 bp, Vitis vinifera
  Intron number 10 from transcript GSVIVT01000850001 (locus GSVIVG01000850001) derived from phytozome v7.0 (chr-ID chr 13_random; pos 2914585 to 2917774 reverse strand)
agaatatttgcactcaattcaaaattcaaatagaggtgagcttttatgactcttgtatgagttaaatctttccaaaggttcattgagtatcaatggaatataaatattgattttgttggttttgatttttccttagccatcatgcaaatcaaagttcaaggcttgtcaacatatgggggactaacatttttcttattaagttgatttttttgatgcaattcaattgcaataggaaattaattattatgtttcttcttatttgatataattaagataaatatatttgaaaatgaatcatttgaaagcaaatagtaatttaacatattttcaaatatcccaaaatactaaaatttactacaatacaaaggatttataataattaattatttaattagttaggaaattggtaattgatatcaattatggattccaattatatttggtcaataaaagaatgttagaaatttcgaggttaaatgtcattgattactcattggttctaatgtggtgcatctttggacttatggatatgtgattaaaatatgtattcaattattaaaattaatttgttaatattcaagattttaatttgaggaaaacattaaatcataactttttatttttttaaattaattggaattgttgattctattagatatttagatgaataatatgaatcatgttttgggttccaatttgagagatttcattggaattggtgatggttcacttatttggtttagttgtattgtaagcactaatggagcctgtagtggccaagggggcacatgccctcctccccaaaattttgcccccaaaaaaatctcatacatataattttcaaataataaaaaataaaatagaaactttgtactccaaaaaagataaatttaattttgaaattttaaaatataatttaatttttgtcttgcatacaacatcttatttatctttcattctttcagcatatttaaattttaattttattataacttttctaataatattaaatttttttgataattttgtatttgagattttagtgaacaatttttttttaaattgtatgttctctttaattttgagtttgattgtttttttttttgtaaaattttgagatttaattaaataatatctaatttagaaataaattaaataattatattaggttgtgtgctatttaattattcacattatgagaatttatatttagatttaaaattttattttgctaataatgccattccgatattatcatatcatagaaaattttaaggaaaaaaatctcattacttttagttgattttatacttagattttgtttgataacaattttttaaaatagttttatgttttctagaacaaaaaaaaaacacatatttgataaccagaaaaatggtgtttcaaagaacatctattaattgtttttagttgttttcatttgttttcttagggttgttttaaaaaataattatacaaatatgtagaataagtaaaaataaagcattgtatataaaaattatttttaaaacatatttaaaaacatatttttaaaataggttaaaaatattttagaatcccaaacaaacttttattctacaaaatttcaaagaatagttttcaaaaactgtttttgaaaacattttttaaacaaagccctatttatttgaaaaaaaataaaattatatttattagaaaaattataaaattccttgaaaatttttaattttttttgctacaagaattattataattattgaaagttttataatcatatttcttactattttctagtttttaaaaaaaaattcttttgaattattattattattataaaatctaagtatttatatacattatgatggtacatatttcaaccttgtcttctcaaaccaaaatatctggctctgactttgattgtaaggggttgaatttagaaaaattgtattaaatttacttgtaatccaaaacttatgattttaatgttattattattttttttttaatgaagaatctacaaaaatttatgagtttgattttgttgagaattggatgagttataaggtaaaaatagtggttgcatcctatatgtagttaattcaattttatctttgaaaatttgtggatttattttagatacattttttttccaaattgagtgatttctatgttattggttttgtttttagtaagaattcacgagtaaatttgagatctaaatttacttaagaaataagggcaaatggacaaatgaacttgttttactcatatttgattttttattttttattttattttttatttttattacgatgactttgctaatttatggtaaattgatttcccattcaaatcgcaaaacattgggtgttcgatttatttttaaatcaataattatctgaaaatttcaaaaatgaaattacttttaatttgagtgagaaattgggttcaagtgttgtaaaaaatttaaaggttggaaagagaaaagagaaaagcgatgttttccattaagataaatgtaagaaatattgctttttgtattgagacaaaattatcttaggaaaagtgataagttaagaagcaaattacctttagaatgtctcaagtcttaaagcaagttgctttaagactggtcaaaaaagcgaacaacaccttagctgtgttttgaatcatatgttaggctaccaacatccctaaaagtttaacctattagaatattggcctacaatgtaaattaggctaacaccttccttaccctaagctccattttggcacgtggagagacagaatgacagtagttatgaattatacatgaatacatggagacattagtagtaggagggacttgaatttgagacttctagttaaccatcatctagtagcacattcagctatgaactttcccaaaaacttaagcttttaagatatgagtccacaatatataccgcactaacaataatgattcaatttataatgatctttgatttatttccttgcctccaggtaatatttgttgaaacgacttggcttagtttattttattaaacaattgaatatgcatgtttattgttacaaatgcaaaaattgaaatgtgaaaatgtttgcttttttattcaggattagagtgatatagctgatgttggattttccatatgaacccttccacaggttagacggttaccagttggag

SEQ ID NO: 13225 - DNA, 2927 bp, Vitis vinifera
  Intron number 2 from transcript GSVIVT01015425001 (locus G SVIVG01015425001) derived from phytozome v7.0 (chr-ID chr1 1; pos 3554634 to 3557560)
ggtagtgtcttgggtttcaatcctcatctggagtcgtcagacaattagctacaaatttccactttttctatctccatagatatatctttctctttcaggtagcctataagagaatatggtcagaaattaatgtccatttgcagtacatgtgttttcaaggcttggtgggctagctagagattggaattggtataagtttagtgttttattttgacttgttcttgaagtcattgtctatgttgtgtaaaaggagtggtctggattgcatgtttaatttgtgttgttgcttcaaatgtgaaagttgtacgcagaactcagcttcagatgcatactagcttgtactccaaacataccattgtaaccttccattacttaaaaaagattaatttcatttaccttctcgggtttttgactaaatatactgacagcaacaaatgaaaatgatataagagatatttaacaaattttcaaatcaaaacatgaaggtgaatgaaattaattcctacttacaagatgttatgatgaatgttagatgagtttgaattaattaagtcatggaattggggattttgaaggaaatatcatagagagttatcggtgaaacatttttaagatatttgttctaattttaataacttaagtttacttttaggttgaaatattcttaggttgttaaattaaaccttattacttaaattttacttttaagtgtttagattcattgaatatcttttctaaattttcaaattgacacattttttcttactaattttaactagcatttaccttcatttatcttaagtaataaaattgtttgtttaacattcatattaaaagttttgtatacatacaaaataaatcataacatggagttatagatgtaaaaaaactctcaatattggcaaataagatcagagaaatttaagatttaaaataagttaatcattttgacttaatacttgaaattatttttaactttaatttacaacagtaagttattttacccaccatgtttaattaatctacttattgaaattaaattattaaattatatcaattaatcacatagttgaaccatccaacatcctctaacttaataacttaattttatttaataatttaatttaaattattatatatattaaatatgtttggtaagataacttagagagtgtttaataaatcaacctatggaactacgtgattaaatttaagttatcaagtatattaaatatgtttggtaaaataatttattattataacttaaaattaaaaataactttaataaatcaatttgataacttgataaaacttaataacttgagcataaataatttgacttaaagtcattttaagtcattgagtattaagttttactaaatggctattttgaaaagtgtttaataaaataaatgacttaaaaaatactttttatgtttttaaataacttttatatatagtgttttattttttatcattctccatatttgcataattatttttaaaataatccttaaaaaacaatggaaaacaactaaaaacacttaaatgatgttttctttcttgtttttaagaataaaaaattgtcttttattttttagttgtcaaatgtgttttcttgttttttttttttttttttgaagaatagaaaattgttttaaaaaatggttaccaaatagaccctgaggtcttgtttgttgtttggtaactattttttaaaacaattttgaaaaataggttttaagaacagttctttaaaactattttgtgatgttttatagaacaagagttcgtttgggaacctaaaatatttttaatctgttttttaatatttttaaatatgttttaaaaataatttttatatccacaactttttttttaaataattatctatctttatataattattttttaaaacaattcttaaaaaataagtgaaacaattaaaaacaaataaaaaatattatttgaaaacaccatattttttgttttgaagaactaaaataaaccctaagtttctcatttctccttttaattcttcctatggtggtttatatatttggtttgtagagttacaaatttctttacaattttggctaagatcaatttatttttatctaaatttaattgaagcatatgcccataattttgaatttctcaacccttttaagaaggttaaaacttttttcggaaaccagttttttctttccacttcattttttttttttttttgtttaccttctgcttttatgtttatttctatatctctacccatttaatttggacatttgcatatatatatttctattcattaggctttgttgaagccaaccaaatatatgaaatggttcacctttggtataaaaatatattttttttatagataccgagaaggcaccattaatcagatggtgtcacgcatatattttcaattcgtattatttttatcataatctcaattatttatactcttatacctggtatatgcagcagatgttctcagacatagaatccaactttgacaaatgggcttcatactctgcttctatgactatgagaagtccttaagaacaataaggcccaaagtcgctctctccgtggccgagagagtgttttgctgcgaccaacgtgacattcttgcgaaggtcatgaccccttgcactataatccaacccgctaatgatgctgctatcccaaactctgtggccgagtatatgcagacgaagatcaagggggaaacgacagtggagaagatagacatggatggccatttccctcatctagatgcacacctccagttccttaatgtgctaggtagtgtcttgggtttcaatcctcatctggagtcgtcaagcaattagctacaaatttccacttttgctatctccatagacatatctttctctttcaggtagcctataagagaa

SEQ ID NO: 13226 - DNA, 3615 bp, Vitis vinifera
  Intron number 33 from transcript GSVIVT01028290001 (locus GSVIVG01028290001) derived from phytozome v7.0 (chr-ID chr 7; pos 5768524 to 5772138)
ttaataatctatctgcagaggtggaaaaattgaaggtaatgctgatgggggtacctctgtttacatttttcatgtctatttgcttacaaagttgttggataacttgtgcttacagttttgttcagtagaattgagtccactaccttgtactatatggctattcaaatgtggcatagtattgcattttaagtatctttatcatagtttcttcacaaatttacattttaagtatccatcggatataatattacaaccttttagaggaaaagaagaagaagaaaagaaaagcaatagaactctcactgcataaaaggatgtgaaattgaatatgcatctgtctttcaaataatgagtctgaacaattttataggtaatacacaatagaaaaaaggaaaaagaaattaaatttctaaaatatctaccctaaaatcaagatatcaaaacaaatcaaggaatcaaaattacatggaaaaatagggaaaaaaaaaaaagtaatttcctaaatttgaaaatctgtttactatcagcctttgacttccctattgatccaatcgaaacttgttccattgcaaatagtaggaaaagcattatcaacaacaaaggccatacatagagggattcttaactgattagtcaacactccctcttaagctagtgaatagatcatccatttcccatctgactcatgataatatggaatgtttgacttggaagtccttttgtcaagatatctattaattgtccttccattaaaacatagggagtgcaaatcagaccattatacaacttctctttgataaagtatatgtcaactttcacatgctttgtacgatcatgtctgacaagattgtatgcaatattaatagctgagttgttgtcacaatacaacttcattgtgccttcccattttactttaaaatcatcaagattagtcttcaactaaagaagctcacatattccctatgacatgacccttgaactttgtctctacactcgatttaaccataacttgttgcttcttaattctccaagtaactgagttgacctttgatttacaatacaatatcctaatgctgaccttcaatctacatttgaccccacctagtctgtattagtatacatttccaaaatcaactccatattccttttaaatagaattccctttctaggaatgaatttcaaatatagaagaattttgtagactacttcaagatgactttctttggttaaatgcataaattgacttgtgacactcacaacattagctatatctggtctatattggataagtaaatcagcttttcaactagcttttgatacatacttcggtctacaaatgcctccttaacatcaccaagtttgtgattatgttaaatagcggtgtcaaccagcttacatcctagcatcttggtttcccttaatagatcaagagcatagttctgttgtgatataaaaatactgctctttgaatgagtcatttcgatgcctaagaaatactttaatctcctaagatcttttatttcaaactccatagcttgcacacatggttgttattgaaattctcattaaatcccaatggagcttccatatagacttcctcctccaaatcaccatgtaaaaatacattcttgacatcaaattgctgcaaggacttattggcatctagatttatgcacaatggaagcaatactaatttttaaaatttgattctttagagttaaaatattgaccttaggtctagatgttcccaaacttcaaattccaagtattgaaggcgatctcgaagaccaaagattttccacccaatcactcttgtcttttctttggcactagagtagagtgactactcttcttgagggatggcgattagtgtttctattgtattactctctacgaaagatgaaagaataaaagatcaagtctattaacccaaaaccctaagaaagttcatatagaacacttgtgggctttagtgactattgactaggcccatcattggttggtcacttactctagcccatgggtcttatttaattaattaaccctaatgggtttcaattaattaaacacccaagtagagaccaaaaacatttaatcgtaagcacttgtgcaaacttgtgcttatgcaaaagcacttaagtgcttaggcttattcaaccttatgcactcttatgattaaataaaaattacttaaaaatatgtaccaacaaaaattgtgtgctcaaatgagtaccattaagttacttatcaaaaaaaaaaaaggtaccatacagacctatgggattttcactatgaaggttgcagttttctctgcttcaagtaacacaccatttccatcctccatattaaggtttctcaaagctcatcttgcaaacacaaaccactcaatcacattgagattggtatgatagctcaatgaggcttttttgttgactattgaacaaaataaatttggaaaagtgagtcttcagactttgtcatgctacaaattccaagttctcaccttgcttagctgaggaatgcatgttccacgtgatttcatcaaagtctattattgtgtcttcctaccgccatatgttgaaaaggttgacatcattctattgcctactgttgaactaccaatttttcctaaagtttaagcttgtaggatttgagcttacaatgtatatcatgcattctaacaccctccctcacttgcaaccccatacctgcacatggagacacacacaggcccataggcaaacaaccttaatcaacctcttttgggcttactaaataaattataaatgtaaatatacagtagtgaggttcaaacacatgacctcccaccaaatgaggctttgataccgtgttgaactactaatgtatatcatgcactctaacatctacttttcttacgatcattctttccaagatttgaagtgtttcctctatcttcctttacatcttggtcctcataatggttaagtgcccatcaaaaaagtagctccatgttttatctacagatatataaggtggcttgaattggtggatgggtttcaagttgtgatgataatcataaacgataatgattgctatactctcaagttgactttgatccattcattaaacaagttgagaattctcagcctaaaccaaacccactcacactatactcaaccctaagccaactgtatgacttactaaatttccccttgtctctatctctctgctttttaactttcccgaattacaaggaactagacttattttttaattaaaaggaattttatgattcactggagttccatataatcaaaatactattttgatagtttgatgatgatcaactgctgcaatgtaatttcaaaactaggattgctcatcatgcattcttttataaaaatggctattggcttagcatgtcatgtgcagtttttggtgacgcatgagctccatttttaacttgttacttcagtttgcatgacttatttaataaatattctttttatttgttaattaatttccttgtttggttactgtttgacttggttctgtagtgtccatgtttctttttcttttaacaagaaatctgtatatcacaggctttgctgcaatcagaaaaacaaagagctg

SEQ ID NO: 13227 - DNA, 3016 bp, Vitis vinifera
  Intron number 1 from transcript GSVIVT01013563001 (locus G SVIVG01013563001) derived from phytozome v7.0 (chr-ID chr5 ; pos 20934537 to 20937552 reverse strand)
gtctgccaagaaggaaaaggcccctgcaattctcagtatgttttcttttggttactttcatgttcataatcgatctttagttaacatcttggtttgaattgttatttatagtcgtagtccattcctccttggaagttattggatgacattggatttcttgttagttctttgtgatactgttattacatctgctgtcttgaattatggtagactactacttgttatataagaattggaatgaactatcaaagcgcatcaccagcattgttcaaaatataaaatacaatcctgctattactttgctctatgactatgcaatcctgtttgcaacttctcaatgtagtattgaggctaaatatgccggttcggttttgttgtatttttacatacacatcttacaagttcgcagtcctctatttctctcccatccagctgctgcatctccacagcacaatcttccaatgggaaagaatcattcttttgtctaaatcatgcagtctatagttaagaattgtttgaattctgtaatacttcttaagatatacacttaacagtgcatcaaggtttcttcaatgtgcttgaagaccacttgaaattcctaagcaccttgtctatgtatctgataggtttttcaagaggtatataaaaatctaagtacacatatttctgtgatcaaaatttctgggttgaattaggctcctgatccctcttttatccctctttctgtgaatgtggttttttgttggcaatcctgaaatggtttggactaggaccttggataactactggaagaataaagctgctttgaagaaattagcagtatggactttgtgtttgtttgtgtgagcacgggtatgtggagggagggagggcgagggatcccttataggactggaaatttgggtttctattggcaaccttgaaatagttgggatctttgtaatgtctgggttatgttaggctagggatccccagtatgactgtgaatctgggttttcattggcaatcctgaaagagttggggttagggctctggataactactggctgaataaagctgggattgacaacttagtctgcattttttcctccaaaatagttatcagaactgaagaacctcttatggtactgctaatgtatctcaattcttgcagattgtgcgttgtcttgtgaaattttgaaattatctttgatattcttgttctcatccaattgaagtaacaattcattctaggaggggtatggactgtttacttagttgtgatgtgaaagtatattatactgcaaactgattgagttatagtcaactacagaaagtgcattgacacaattcttaaaattgaagttcattatgttctagtgagctgcaagagttaatatgtcacatcaagaaaaggataaaaaaagggtgctgtctggtaattgagtttcatgagtaatactaattttaggcagtggaatgtattttaactgcttcactccttggaaaattaaattgcattcaactaagcgtgttttcctgctgggtatatgcttttttttttttaactcctctttcatttaattaatgcgattgtggttcttgctgagagatcccataaactattgatattccaacaaaccactggaaccaaaaacatacgtgctgtaaaccactagaagcaaaaacattttatttaaattttagtagaggtctcgcaacttgcaatatagagaacatcccaaataagttggggaggtaaattttggaatggtggtgtgtttttttttaaagttattctacttcattttccccaattctattacttgtaatgcttgaattagcctttttatttttttaatgattaaaagttttcttgtcagcaccaatagaagtaggaatctctgtttcctccatgttattttgacttttttcttttctttttttttaaacccaaaaagattcagcaaattgtattttttgtgtatatgcatatatgtagctatcttcataacaacaaatgcattgtggattaaatggtttatcttcttattggaaacattattgtctttttttacctttgtggaattacactctttttaccatcttttggtatcactttgtcagtgcttgttttgttttataaatatataattatcagttcagctgatccattgaaagttatgtgctacttattttttggatttcttattattgttgtcatttattactattattaccacttctactgctattattacttctattactatttttttgttatttatttgggtggggatttgggttgtggtttggtcgggcttggtttggcattgttgtaatttctctaatcctttttgtggagcttctcctgaagttctgggctttctagaagtgtcattagtatcttttgaagctgtccgaaccaatatgtcaattctaaattcttttcttcacctattctttccctattccttttcttcgatatctggttctccttgtgtcaacttgatgtgttcaattctgttgtgcacaggtatggtggctacaaagggaagagggaaccatctgaaaatctatgtgcattgaagatgcctagaggaatatgtgaaagaacttatgtgcaacatacctgacacgcctcttgtttttggatgcttaggaacatgatagttctagttttgtacaccacttgtatagtatccctcaacatggaaattctttctattggctagtctagatgctattctttacaactcatactgatgttgttatactacaatgcattgtatatgaaaaggaataaagggaaaatagtactcatcagataaatctgatttttcagaaacttggtgcctcaattacaagagatatatttttaccctgtgctgctaattacaaagacttctccattgattgctcctccttttggtttttatttttcattttattggggtattgagacctcagtgttgctagaatttgtgtgggaaatctaaaattttctgacctatttcaggggaagttagttcttcaa

SEQ ID NO: 13228 - DNA, 2586 bp, Vitis vinifera
  Intron number 9 from transcript GSVIVT01022436001 (locus G SVIVG01022436001) derived from phytozome v7.0 (chr-ID chr8 ; pos 2999776 to 3002361 reverse strand)
aggtctgccattgggctgcatactatgtaagttaatgatcatttcccattcttcttcttcttttttttctttaatcttttgtttttttttctatttcttcgataagaaagaaccttttcatttaatagtaggaagaaaaatgttacaagaaggatgggctatccttcaaggccaataaaagagaagtatcatggataaggattcatcatcaacacaactgtgagcctaaaacatcatcctaaaatgctagtaatgcatcaagagcctagataaaactagcaagaatgtctaacaaatgtctcttgcaactaagcttgtctcttagccaactgatctgttacttctttgatgtcatcatcattttggaagagcaattttagagatttaagatctttttgagtcctcatttcccttttccatgttagcctccttccctgataaatgaataatttagtcctaattgacctgaaaaagctgaataatttagtcctaatgaacaaccttagctttgcaacagtaaagtccaaggctgggattccctctattgtcaaatctggaaaagttggcttagacagagccttaatcatactaccatggtgatcttggagaatctcaccaacccctaattgacctggattctcctacaaacaccattcaaaatttaaatcctgaaggtggagggttctttgactatgctaaccctagtctgagtccagctaccaactcttccactttacacctctctagtcttgataaatgaatcgaaatcatagttttgggaaggagaagaatgggatgacctaaaacttgagatatacgaatttcttcactcctgaaatatgacaaaggtctaggtggtgaacacaaagaagatgtttctaacagtagagatcattccatgaatgaattcttaaaccatctcccaattggttgatagtttcctaatttggaagttgctttccaatgaccatgtccttctgctctgtgtcaataatcaagttgaggtgtgattaggtctggcagtttatacttgccgtctgtgtgatttgcccaactcagtaatctgtctgctacatgcttggggcatatgcataaaatgatgatgattgtgatattgatcccagctagattctttgtgctggaaatcaagccaatcctataaaactgttcatttccttctggaaagttccctcattctgtgtgccaactgccctaacccccagctaaaataaaaaaataaatgaaagggaataaaaaagagcaagaaataaagagaatagcttatatgtccttttgtccattccatcttttggtagaagaggaattcttggcatttatgcctactagtacaactcgtccattccatttcgtggctgaagaattcttggcattttaactgatcattacagctttttgatggacctgctaaacaatatattcttgatgatacatgcagaacatgcaagataagaaggcatttggcagttgcccacttcttccatttgttattattatatctttctggttacctatcaaaaaacaaaaaaaattctatctttctggtgtttagctggaagaaaagcagaatttttgctatggggatgagcaagtctggttgtataactgttatgtaaggattgtgatatgagttcccttggagatattgaagagtgataagtagtttaatatccctttgtcccttgcttggttggttatttaaggcccttgcttggttagtagtacatgggaaggtaaaaaccaatgacaagttgcagttgagaaggacaaatccttttgtcctcagtggtgcattctatgcaaaggaaatggagaatcgattgaccacctttttcttcattgtcctttatctattgggctttggcacaaactcttcaatctagcagggttggcttgggttccaccaaggagtattatggacatgatgattattgcatttaaaggtttaggaaattcaatttgaggcaagacactttggcaaatcgcttgcctcactttgttgtggatggtgtggcaagagagaaatgtttggatttttgaggataaggggagatcaaaagagatgttataggatttacttcatttctattcctctctttgggcctcttgtactactgcttttagaggagttcctcttagtgttttacaactcaattggactgcagtttgtgattcaaaagtttgagatagttggggtttttctttgtatatagttttctaaagttgggtgttttctgttttgatcagtttctgtttttgtgggaaggacctgtcatccttctcttgtatcttttcttttattaatacatttttcttcttttctgataaaaaaaaagtagtttcatatctagtatattaaacataagctctgcctacacttaatgcactagcagttggataggaggtgcaggagtctcatgattgtagcatatttgcatatgtcagcaggtttatggccttcttaccttgaaataaaaatgttatatctaacttttaaaatgttccgaactttgcgggatcttatttaatttttttatttttattttattttttatacaggagcatagg

SEQ ID NO: 13229 - DNA, 8710 bp, Vitis vinifera
  Intron number 2 from transcript GSVIVT01013612001 (locus G SVIVG01013612001) derived from phytozome v7.0 (chr-ID chrU n; pos 1444916 to 1453625 reverse strand)
ccatttattggaaatttatctaaattgcagtttttgtaagttcttacttgatttttcattcttttagaaacttttttttttcatattctttaatagagtacctattaagaaataaggaaacctgaccctctaaattccaaaatcaggtcaactctttaggttatttttcagttaggacttgggagaaaaaagatgtgggttgatttaccctaataatgaaattgttagtatacttcattaatcaaatacgaattattttgatcatgtttgagtctattaaacagatttaacaagtctccaatggcagctacaaacagatattttgttttaataatttagcactaaaattgtcataataaaatatcagtgtttatggttgtaaaagaggtcatctacggcataacaccttgaaagatgatcgttttgtgggtggtgtgatgaagatgatctcttccaatgtcatcttttccttcttagttcttccttaatatgaatgttttgaaatatgtattattcgattttgttagacaccatttttactgttttcttcacctacacttcctcatatcttctaagcttttgtagcacatataagttaattaaagttagttggatgaaaagaaaaggtcatattatatggtcagaatcttggagaaggggatgattaattttgggaagataaattcatgtactaggacaaacctcatgagggggagttgtaattttccttgaaataaattcgaagcaataaaagttgtttactacttacttccaaagaaacacatgataaccatatttttataaatctttactgtcttcctcatagccagtcaaaatcttccttgctatgctgcaagtattgatagccgatagttactttaaggtaaagcattgcacacattcatgtgaagaaaattttcaaattaactactctgtcatgatcaattgcattagaaataaaaaataatagcacaaactaatgaaaaattgagagaagttttagagagttgaggaatagagagagtggttcaattttctacatttataaatgatccataatttaggggaaaaccaacttttggacagatcatgtgagcttatataatacccaggtgaaggtttccatgaccaaataatcaaaccaataaagatccttaatctgtaacaatagaactgtttgccatgcaagagtaaatattcgtaattatcttgtagcccatgaaaagaaaaaaaagacattggaaattcctttcttatttctcctattggctacccctctcagtgaaagtactgatgcaattttattagtttcccagtcgaaatataaagatcctcctgctttatatctctttctttgtcatgtatattttaatcatggtgaggcatcgatctatacatgttatggacatagttctaatacgcatctgtatccctacttgacatgtaatagtaagtgctaatgtatttttctcagtattgtgcttgtttgatgagcaataaagaatggccaattaatttaaaattacagttctgtttaacattgttttttggatctgtggatgccttatgttgttttcatcttgaccagttcaattgcccacaatgcattctctgggacaattccaaaggatcttggaaagcttaaagagctaaaaatcctgtaagttttgagaactttatatttttcttttgtaactatctatcaaatattgtgggaaaacaaaacaaaacttgcaatacttttttgaaagagtattaccactatgataatcaaacagcagaggcagctaattacatggagaaatcattggtcattagttaagtctggatcaacacaaaatgaaaattaaattattcaagtattggatgtgcattgtaccatgtttttctgacagtggaagtaggacttggaaagtagggaagagaaccaaaatatttttggaaggtaaaccttattttttggttattgaagaaccattaaaacttgcgaggtcaagttgtaagttgtaactaatctatttggatagatctcatgcatatttctcattcttagtctttaggtttttttgtcatggtctagaaacttgcttgtctatgaatgaagtactataccctctaagagaagtccttggtatgacaaataaggaaaaatggtcaagacaatgaagtttcaaactaattaatgaagtagttgttaattgtagtgaatgcaatggtagtgaagaggtaagaaagcattttatggagattatataagctttatgctaattaaagaagatattaatggggttcattgaatttcaagttcctcaatagcacatggaaaaagcccttgcttaattggttcaaaaaatcataagagtttttagagaaagactaaaagaagtcataagatgatgaggatggtttaatttaaagaaagtagcaaggaaggatgattgggaggctctttatctcatccacctaggcattagcaaaggcaattttgacattactaccatcaagaaagagtgagggattctcaaaaaggacttcacaaggtaaaactagatggcctcaaaattttttggtgtaagtttgaaccctttatttacaaaagactttgaaccagtttccaatttccatgagtattcgctatgaggtattaattaaaatatgctttgaaagttctctctcctctactcacgagtttatatgaaaggtatttggatttggatctctatggttcattctccccaattctttactttaagccctttctgagagttgattcttctatatatctcaagccatacttattttggaaatccggatatcacctaaaatactagtgattcttagattattgtatcatgtgcttgaggaatgagaaatttgcaatcctattttccttcatcgtccctttgctttagatttattatggaaactcttttcaacaatgcgaataacttaggtgctttctaaaagtgttctattcttttcatggttttagtaagaacactatagagatcattaggctggaaagcatactagctaggatctacgaaatgatagtggcattcttcctagattggtgatgtcaagttgtggaaaaatatttgctttagtaaatctctttggatgttagtcaatagagtgttcttagtgataaggacaataatattgtaggagttaaagctcttgaaatggatcttaaactctacaaattattggaatatagtcgatgaagcaaaattaggcgattaaaataagtggaaatggaaataaaattccttatgagcctcctaaatttgtgtaatatatcttctattatatatatatagatagatagatagatattgattctacaatacccgatctatgaacgaaaaaaatcattgtattccttcaatgcaccctttagcgttctcaagtttagccaatgttaaaacatcttgatatttttcaccatattttttatgctagaaaatcatccaaggagattaatgatgatggtggaaagcctcaaccaaacccggactatcataagtcggttaacaaggattggttactcacctcatggcttctaggtacaatgaccaaagaaaccttgagtctattcctgggaaccaataccaccttctaagtatggcaattggcagaagactaactactgcccatgacaaaggaacaagaattccatttaaaagatcaacttgcaatctttagtaaaggatctcgatcgatggaagaatatcaatgaaaattcaagtagaattgggatagtttagtagacatcaacaaatcattatttgatctagacacagtgtttgctttttgtagagaactcaaactaaagcacagtcattttcaaatagccatgttgacgaaactgccttaatgtaccattcaaacaactctcaatggatctacaaaaccatgataatttttaggtagcaatgaatgaaaaaaaataaaagccagatgaatcataatcaagccattcttagacagaataatcaaggtacaagaggaaggggaggagagtattttagttcacaagggagagggtttacacctatagggagtcgaagtcttgcaaacacccctagctaacaatgctgcttagaatccaaatacaaacaagtagtaggatatataacaatttgttaggtcaaatctctgaaaatatttatggtaaactaatttgtcaaatttgtggaaaaactaatcacagtgttataaaatgttggcacaagtttgattatgcttattaagtgaaggatgtctcactagcacttggcaatcttagtttgaaggaagaatcaaactcaaagttctatgcagatttgggttaattgcacatttaactaacaatccaggtaaaatttgcaattccagccttataaggaatgagatggtatttacgttggtaatgacaactagcttagtatttctcatattggttatatctatttggataccaggcatagaaaaaagaatttgttgtgagttggacaattaacaaatgattattcttgcacttttgagttctcatctaatggttttgtgataaaggatcccaataaaatttttttgatgacaagcataaacaaggataactatatgctttaaatgaagactataagaaggcatttgtaagcatagactgaagaaattaagcctattataaaacatgacatctaagcttgggtcatcgtggctcaatgcttttaaagttctagaaagaaaagatagttattgatgtttctagttggattaataacccttttgtttgtgctagttgtcaaatgggaaaaagttgtaggcttcactttacactatctaataaaatttcaactttcaacttttcttttggacaaaattcattttgatttatggggcctgctctagttgcttctacataaaaataaaagtacaatgaagtatttattgataattactctcatcatacttggtttttccattgaaaaggaagttagaaatttatgaatgctttcttgaatttcaaaagatggtggaaaattagtttaataggcatatttaaaattttcaaagtgttggtgggtgtgaattttagcgtaaaggcttcaatgatcatttaagtaattgtggaaaacgttcattaaatttctgtcttaggaaatctagaacaaaatggagttgttaaacttaaacatagagctatggtggaaatggtactcacaatttgacttcatgctaatcttccacaaaaattatgggttaatgcttttttaactattgtgcatattattaatcaattaacatcttcaaaattgtacccaaatactcattttcaaaagttgtataaaaggcatgcaattacaatggaatatgggtttttagctatgattactattcttatttacctaattatggagaaaatatatttagttgccttgtatttgtattggatacagatcttagcacaaagaatatacatgtcttcacccaactattaatcggccatgttgtgttgatgacaacaaatttccttattcttcataatcttctttgtaggaagatcttgagatagttaagtttctaaatttaaatgactagacaatcaatgaatcgcctatgaaagccatcaaaccaattaaggaagctgatttatgcctcacctttgcttaaagagaatgcatcggagtcaataattcatccatagatttcttgactctcattgaaaatcatgagattataaatgattagcctttacatataatggtgaatgatgcaatctttttcataagtgagctccctagtaatgagtccactccttccaccatcaactcatatgccgattcttctattcaattcaatgtgcaaaatcctaatggaaagattattaattgattgttgatcatctttcttttcctaagaccttcctactcaagctccaacaactcccacttatatcaatactcacccaatgattactagataagagcttcacatgaaaccaaagatggtgtctcaaatgacgcttctttctttttgtgttgagcctagtaagctcttaaaattcctccttgttcttcgtaatggaagagaaaattgatggtttgcataaaaaaaacacatgggttcttgttccatgacctatcaacactaatgtgatcaattcaaaatgggttaatattgttattattattattagtttttaactacatataaagaagataggatgatggactgatataggcaaggcttttagcgcaattattttcttaaacactctcatacaagactttaatgaaacctttagtctagttttcaagccttcaacagtctttttaatcattgatattgttgtgacttctcattggaatcttcatcaacttcatgtaaaaaaatatctttctacatggacatcttagggagatagtctaaatagaacaaccttcgggcttttgaaagtcatcacttccagatcatgtatgtcttctacaaaaatcatttttaggcttgaacaagctccataagccttgtttgattgactattacaatttctcttgtagttttgtttcattgttgtaaggatgattcatttctcttagtgtttaaaagttatcttacaattctgctcttttaaatatctgttgctaatataatccttactaaatacaatgaggtatttattaatcaactcatttgtgaactaagagtttattctaaaagaactcgacaaactatttttttttaggaggaatttttttattgcaaacaaaatatgtcaaggatcttttaaactttgctagtgctcttatatggctgcacaatggcaactaaatctttcttctcttttgaaaatgaaaagactatggatgcaatttaatattgacgtcttgtaggagcaattcaatgtctcaccttcacatagccaaatcttatcatgttgtcaaacaagtgtgccaacatttccaatctcctacttttcatcacttaaatgaagttgaaggattttacattaccttaataggtaacttggcacatggcttacaatatattgctcaaaactcattcacaatctagtttttgtgatgtagattgggctagttgtccaaatatcaagagaattactactggttattttatatttttgggtgcaaatcatatttcttggtcatcaaataagcaacctactatagttcggtcaagtgttgaagtcaactattgatctatgggatctacgattgttaagttcatttagttatcctttttgcttcaaggtataattgtcaatctcactcaaccttcgtaccttctttgtgacaataagagttctttacacctaactatcaatatcgtgttctcaatatcgtgttccattattttacagaacacattgagttggataccattttgtttaagaaaaggttgctattagaggtcttcttactctttttgtttcatcacatgatcaaatagctaaagtattcaccaaagccatttcatttaattgtttcctcaattttgatccaagttgaatattcattccatttccctcactagcttaagtgggcatgatatggaaaacattattgcaaaagttaaaagcttttgaaatggaattctcacctccacaaatcacaaaagtgtagtcaatgaatcaaaattagtgaaaacaaatttaggaggggaaaagtgggttttgattcactaatatgaaaatatatgaaacaaaaaacttgaaattttttatatcagtattatcttcatatatttaaaaataatttaaaatacatgcactttttaatgagtaatctaattattccctaaaatacctcttttacttgtcatatcattaacatcaattgagaattagactccttcatgtgaatgtttccttcattttattattattattattattgttattattattattattattattattattattattattttatttgagactttttttcactacttctaatgtccatactcttcaaattgtttcatttttggcatgtgatatttgttcctataaggtgtttgtttttggagggaaaaaaaatctaaaataaaataataataataataataataataataataaatctaaaaggaaaagaaatatttacgtggaagagtttagttgtcgattgatgttaatgacatggtaagtaaaagagacattttagaaaataattaaataactcattaaagagtgtatgtatttcaaattatttttaaatagatgaagataatattgatttaaaaaatttggggttcttttttgcatatattttcatattagtgactcaaaacctacttttcccttaatattaagcatcaatgaagaaaaatgaattaaacacttatcaatgttcaactccatccagatttcatatttaaaaaaagaaaaactaaacaaccaaacacaaccttatatttgttaaacctgtttgttggtcagcattaactcaataatttactcaacatgacctgcaatgtctatatctctgtgtgcttttatgagcaagataaaaggtatatgcattgttaagtttggaaggaatttaaaaaatataatttttataattaaattatagaagtagtcataatacagcaattccggttgaaaccttgtattgatcttgagaatttttgtgctacctaccttattgatttattcggtgcagggctcttggttccaataacttctctggagctcttc

SEQ ID NO: 13230 - DNA, 5003 bp, Vitis vinifera
  Intron number 6 from transcript GSVIVT01031426001 (locus G SVIVG01031426001) derived from phytozome v7.0 (chr-ID chr6 ; pos 18734537 to 18739539 reverse strand)
ccatttgagcttgaggttagtttagtatcatacatcctagaatatgttggtctttttttgtatgtctatttctatttacttatggcctgtacttattgtatacatagttgttaagtcgtaaaatgcatcatggatcctttccttataatatcatttatctcaagtgttcctatgcaataaaaaataaatagagaaaaaatatgcatatattaaaaagtgcacgtgtattggaagagtgaagtataaagcaatatatagccaatcaatgaaaggtaataagattaaaagagttaagacatagatattcatcaatatcatatatatcaaagcatttaatacttaggttgtgataatttaggttaaaaaaatatgacgcttattgtataaattcatcacaaaatcaacaaaataaatcttttgaattaaattttaactataatctttagttccaatctcaataagtcatatacatttgtatatattgttgatatttgttgttgggaccttttcgatagtagaacatcctttgaggtgggaaatgggaaatgggtgaagttttggtaggatggctagtgtggggaggaacccttatgtctatcttttccctctctatatgccttaactttgtcaaaagaggcttgggtaatcgatgtttggcaagaacaagggagggggacactagaatccttgttttgctaaacacttgaatgattggtagttaaacaatttagaagcatttttctcaaggttgcaaggaaaatctatgaagagggaagagaaggatagggtggtgtggatggacttgtggtatagtgtcttttcgagtcggggtgctcaattcctttctcagagggcactatttggaattcatgggttttttctaaagtgagttttttgcttcgaaagctaattggagaagatattgaccctagattagtttcaaaatgagaggatggtcattagcaaacaaattttacgtatgtaaaagtgaattggaataattgatcacatcccccttcattgtcccaaatctagggttttatggtagttatttttctccttatttgatgtcgtttgggtgcttgctttttcagttggagagactctcttaagttggcgtgactcctatatgagaagaaaatgtgtgaagatttggagagccaactttttgtttattttttgaattgatgagcattctaaaatgtagagcagtagttcaatcattgaagagctactttgttagaagttgtcatcatgggttaagatttacatagtagaaggatcgatgcctttaatcaattttatagatgtggtgggatctatatgagggagaaggtaggttttttttttctcccttttgttttccctctttcaagctatgtcttttgttatcctttgcatataacttatatacatgggtgtatagcttttttaaacttttaatatattctctttgcttatcaaaaaatagactaaaataagttcttgtgctagtggaagcgctaatatcacatgttatgcccagtggaagttttaatgtcatttgttggtaaataaacataaaaaatcattcacacacaaagatacattaagctttaattggcttgaccagccatgcatacacctacaaatgagaaagaattattctactatattgtaaaggatgttataaagatcagaaaaaacacacaaatattcagccttgaaatttcccaagtttttgaactccttatatttacaccctaaactgtaaccccttactctatcatgtatctctcactcttcctcatacacctgtataccatgtatgatctttatatgtctttttcctctcatttactgcattatggctatcgaaagagttagagaacgagcccctcttcccctcatcatccccccttataaccagcccctgcacagagctagctttagacttctctctcctttggtctgagcacacaccaaggcttctaagcttgtcagccaagatcttccacaccctccaactttgagagcactgcaggtctctgctccttccaccagcagagccaagcccttgccactgaatctaacccaagaggagaagtttggacccctctcacaaagcctcccagtcaccttccctttgacctccttgactgaaatctcaaaggtctttgaatccagtccaaaccaacacttacctccgggagaaaccaccgacatgttgaaatggaaaccttttgtcctatacaaaaaactcaagatccgctttattattctggatacctttcaactcatgaaccattgcttacagaaattagtgtaatgaatgagctccatttcaaccatcatgcgccaacaacacagcacaaggcattttgttaagtaaggggtgggctcttttgtctttatgctgccttgtttttttgggcgtttagtgtatacttcgtgtgtactgttttctccgtttctaggagtttctaatacatgctcttatttaactatcaaaaaaaataaggatatatttttacaaggaaataaaaatatataaattattatacacaataatcttttaccaaaaaaaactatatacaaaatgggaatttaagacatccaacaatatctatatgtttatgtgcactttcatagtttgaaccatctaaccttatcatctcctccctaaaaagaggaaaatttggaaaagaaaaaaaaactaatatatttaacaaagtttcattgaccattatattcaaggcaaccatccaaatcattaatataacaacttcccaatattcatcataaaatttcaaactttcatgtttgtatttgacaagtgttgaatgtttccatgttgtgttattttacccttccctttcccttttatcatcaatcttttaaccttaaagtgcaacttaatcaattaatgcaacaattgaaaaaaatcgaacttgatttttctcaaaaactattcaaaagagtcataagtttatgtatcgtgtatcatatatgtgtaataacatatagttaaagataagatatgatatgtaatagtgatacatattttttttacgtaaaaaatgtattctatcattataccataatggatacctaagtttttaaaaactacggttatttatggcattggatgtgtaccctaaagtagactttgataacaatcatttcagatctgaacacaagctaattagcttgtatagtatttataaataattgatgtctaaaagtatctacttagtaagttatacacaaaattattgctttagactggcatctgtctttgagcctctcaaatgtttccatatgtcagacttaaccatagcggaatgtaatttatagtttatacctgttggtagttttccagaaaggtgcatgtaaagaacagtgttattgacaacaggaatagtttccacctttctccctaatcagcattgggtttcaaataaaatggaaatttcctatttttagttgctgatatgttgaaaagaataagagctttaccatgttctttgaagaggaaggataaaaatgaggagaatctagaaaaaggagcatgtaaaacaaagtgaactgttgattcttttactatctagtgtaattaccttttttctttgtgaaaaaaataaaggaaagaaggcagttgtgttcctttaaatggaaatcagtaagaattcaaccaatcatgcaattcggtaaaacctcaatgaatcactgtctcatatggactccacatgtccctatgagcaacaaccaatctagggcctgtaaggaaattcagagcatagattcttgatcacaggtttgcacatcttcgatcataaaatgagagaactggctgactacacattcccctaaattttgtcatcaatactacctgataacactctagtatgctgttggcaaatatagataaagtttaatgggaaatcatgtatccaaattctagagaacctagcagagaacctctcagcaatttatatcagccaatagattagactctttaaaaaatgtgatcacaccacaatcatctaaggtgtaaacaatcatatctttttaaactagtagcttgggcattaatcacaacttcagagtcaccttcaaattcaatgcttctagtgtcttaatttactgaaaacagtggttcatcctatagaaatgtgcattcaatgatcagatagaagtattacggagcaatttggtggtaactttatcactccattactatccttcaaaacccaaccagcagaagtacctgccatcaaaattaagcttccaaccaaaactaaggggtccattgtatcaattgtcactccaaacatagacattattagaaaaatgcagctgttgcaaaagaggtaaatattatgataaccatcctgacatttaaagaatgaattattatcattattaataataaaataaggattcgaacagtggtagagccaggaaattaattttaggggggcaaaatttaggacagggaaaaaaaatggttttcagtcaattaaggacattgggctttcatctatatacatctttgtccaagacaacaaattacaaagaaaattgcttcagtcaatttttctctcattctgataatttcttttctggcctcaacttcaaggccataccatgtactgattgtgtaatagtttatcctcagtgcttttggtaaggagccaattccaaccatcatgcattaaaaaaatttaaacttatatttgttgcaaagaagagatgatgcgttaatgttgctcgttagtgtacttttatgggtgtattgatctcaaggttcaacccatggcaatcaactatgtattcatcctatcatttgtattttacaatgtttcaaccatatggtcttcgggagtttaaaattatttttagttcatcttaagcctttactatttaatatttctaccatatagttatctggaatttatgaaaaggtttgcaatgtggtactttcaggtcgttgaagcagccttgctttcaaggatacagcg

SEQ ID NO: 13231 - DNA, 10719 bp, Vitis vinifera
  Intron number 4 from transcript GSVIVT01026461001 (locus G SVIVG01026461001) derived from phytozome v7.0 (chr-ID chr4 ; pos 23209978 to 23220696 reverse strand)
tctttggacaacaggtttgcctttgatcattggattacaaattgtatttgccttttcctatcagaagtttattattgtttaatattttctctgtatgccagatctgcattatcacgttttttatataccatattgttttgagattaatcatgtctttatcctcagatggatttttattagcagatacagtcctcattcaacactttgtactaagtatttgtttaagagaagtttatgattgtcctatatggtgatgaaaaatgcttgacttatggattttctcaaatgcttgttattttgtggagagttgacctaaaaatttaatgaagtttttcatttacttcaaatagaaatgaagaagaaagcattcatcagcttgtagagaaaggaaatgagaagttggaaaaaatgaatagaattacttcgtatgctcttatctgtcctctatctaatgactaatgcaatgaagaactacataaggtttatgtcttttgttaactgggtctagtctgtggtaactatgtactgttgccgatagcactgcttacagtgtagcataaatacccaatttgctaatgattatatatttaagccaatctttgctcactcccttggaaaagacatcagagtgcagattagtttgtgatgaaaggacggtaaaccttgagtagttggatcctgtcatgttaaattagttgtaacaaagactttttggttccattcttgttacaataaaaatttaaaggaccttatacgagccataattttgacaagaatatttttagcttcctaactaatattcttatatttcagggattttgattctgatttctcgatctgtagctatgagcctacagctgtctttttctccatgttgccaatcttctatgagaattgcataatatccagttcagtggaggaatcaagtagatttggcatcttcacccttaagtaatgtgtacacctcattcaaagcggtgaccacctccttctccacatatactccagaaatttcctgctagggcctaagaccaagaaaaaacttgcatttttgtgccaattgtcatgtgttgacaactttggcaggttggttgttaatctgtgtaagaaatgtctaagactccactctcgatcatctccttgataaaatgttgatcaacttcaacatgcttggttctgttgtggtaaaccagatttcatgaaatttctaaaggtgccttgttgtcactgaaaaactgcattggctggtgtactcttatttttagatcttccaacattcatttaatccacgaaccttcacatattccataagcaattgcacggaacttcgctttggcgctgcttctagccaccacactctgttttttacttctccatgttactaaatttccctaaacataggaatagtacccaatagttgaacgtcgatcgctttttgacttaacccaatcagcatctgtgtaaattttgactcctctttcttcattttttctagaaaatagccccttactaggagtagttttgagatatctcaggatcctgtacacctcatccatatgatctttagcaggccaatgcacatgttgactaactcgaccgattgcaaatgtaatgtttgagcgagtatgagacaaataaatcaacttaccaactaggtgtttgtacctccccttgttaattggcgttttctcatttaaatttccttcctttctgttaacttccataggtgtatcaattagtttgcggcctagcatcccggtttcttcgagaagatctagtgtgtattttcgctaacacataacaattacctctgtagttcttgccacttctatgcctaagaaataccttaagaagatgaggtctttaacttcaaactcactgactggaactctcttcaacttctccattctttctatatcatcctctgtaagtataatatcatctacatacatgattagtatagtaaattttccatcaagcgaatgcctatagaacatagtgtgatcagcatggccttgactatattcgtgtcttcttagcacttgggagaaccttccgaaccaagcccttggggattgttttagaccataaagagatttgtttaacttacacactttgtttttaccttggtcatcaaagaatcgaaggggaagttccatatgcacttcctcaacaagctctctgtaaaaagagagaaaagggagaatccctaatttttgttattaaaaactattaataatacacattggacttaggtatacataatacacattggacttaggtatacatatacatgctagtgggacccacaatccaataaggaaaaaaaaaaaaggaaaagtaaataactgaaataactgtacactatctaacactccccctcaagttggagcatatatgttatatgcaccaagcttgttacaaatgtatttaattctaagacctctaagagatttagtaaaaatatctgctagttaatcatttgaattgacaaaactagtcgccacacatcctgatgcgatcttctctctaatgaagtgacagtcaacttcaatgtgtttggtcctttcatggaaaactggattagatgcaatatgtaaagcggcttggttgtcacagatgagcgtcatctgttcatcctttccaaatctcaactcctgaagcagatgtttcacccatatgagttcacatgttgctagagccatagctcgatactcggctttagcactagatctggtcactacatcttgtttcttacccttctaggatattaggttacctccaataaaaacacaatacccggaagtggaacgtttatctgtgggtgagccagcccaatctgcatctgtgtaaccaacaacctgggtatgacctttgttctcatacaacacaccttggcctggtgtgcttttgatatatcgaagaatgcggattatagcatcccaatggctatcacatggtgactgtaggaattgactaacaacacttacaggaaaataaatgtctggacgagtaatggtgaggtagttcaatttacctacaagtcgccgatatttcccgggatctcctaaaggctccccctgtcctggtataagtttgacatttggatccataggagtgtctaccggtttacagtctaacatgccggtttcttccaagatgtctaaagcatacttcctttgggaaagaaccacaccggaactggattgagctatctcaatccctaagaaatacttgagtttccccaagtctttagtttgaaagtgggtgaaaaggtgttgttttagtttatgaataccattctgatcactgcctgtaatgacgatgtcgtctacataaactaccagataaatacactgccccgaagagttatgatgatagaaaacggaatggtctgctgtactgcgaaacatgccaaactcctgaacaacagaattaaaacgactaaaccatgctcgaggagattgtttcaagccatataaagaacgacgtaacctgcacactaaaccagactctccctgagtaacaaaaccaagtgattgctccatataaacttcttcagcaagatcctcatgaaggaaaacatttttaatatctaactgataaagaggccaagaacgcatagcagccatggagagcaatagacgaacagaagctatcttggcaacaggagagaaagtgtcaccataatcagaaccataaacttgagtatagcctttaacaactaagtgggccttaaggcgatcaacctgaccatcagggccaaccttaactatgtagacccaacgataaccaactgtaaatttaccagagggtaaaacaacaagatcccaagtgtcattggagtgtaaagcagccattttagcaaccattgcctgttgccagcctgaatgggaaagagcctcaagggtgctcttgggaagagaaaccgaagatatagcagaaacaaatgaagaatagggtgaagataatcgatagtaattcaaaaaattgtaaatgagatgaggattatgagtagatcgattaccttttcaaagagcaatgggtaagtcagcaaaaggaggcagagccggggcaggagaagccgaagggataggaagtaagttagcaggtacctcggccaaaggaggaacaacgacacgatgatggcgatgataaacctgaagtgggcgagaaggcactgcatcaggtggggagatgatgggaaagggtaagacttcagaaacaggaagagactcagaggtggagaagaatggtgagtcctcaaagaagttaagagtacgagtgattttgctgatggagataagattaaaggaacactcaggagtataaaggacaaaagtgagaggtagagaagggagagtatgtgccaaaccaatgcctttagccacagtttgagaaccattagctatggtaacaataggtaaggcagaggtagtagtaatagaagagaaaagatccttattaccagatataggtgcaataggtgcaatgaggacgttagcctctacctcggttaccactgcgtcctccttgagagttagtttgagaaactaacacagacgaatctgaagtgttatcagatggcaaagtctgagtggaagagatacggaggaggcgagcaaacacgtcatccaaggatggaacggaggaactgccaagaatctgatcacgaacagtctcaagatctggacggaggccaataagcgtaagaaccatgaagaacttgtcaatctgtgttcgttgatccccaacatcagtagtaagaggcatcacggtcaagaattcctccttaagagaggcaatctggccaatataagtagataaatccatgtcttgttgtctgacattgacaatagaagaagccaccttataaagacgttggatatcattcgtgtataaccctttcgcctgattccaaaatttaaagcatgttttgtaggcccgaaaatgaagcagaatcttaggatcaactgattgccataacacactacataactgtgcatctatcttcctccattgtactgtgtcaaccctagggatatccgcctcttgtgtaacaaggtgatcctcataaccttgacccataaaccaaagctccacagaggcagaccgggacaaataattttcactgccaaccaatttctccgaagtactcataggagatccagatataacagaggaaaaaagggaacttttagtagccatatctacttatctggagaacgaaatatgtttggattgaagagaaccctaatattgctttatatcgcggctgaaagaagaaaaaccgaggatccgcggctgtgagagaccaaatagtaaaaaaaaacaaatgtggcactactggaagggtagaagaacacttcctaagacgtgtacagggctcggggtggagaggaagtcaccgaaggtcgccggaaaggctgtttaaagggccgacggagacaaaaaccccaaaaaatgcacttgcagggctcggatggtacaagcacagatggagagtggctagacggcgtcaggcgaggctggaagtggaagcgcgttgccggaaagtgctcgacgtgccctcacgagtcggtgcgtgaggttcaagccgctggagaagaaatgcgcgtggccggtgcgtgactgagattctccctccggtgctttgacaaaacttgaagatctcctccttgcgcacctgatggtatggtcggtatcggaaaaagacttcgccggaaaagtggccaacggtgagggttttctgacgatggtgagggttttctgatgacgatacggttgaccagaaaactttaggagatggggaaggtgaccagaatgaaacacgatcaatgaaaggtttcctatagttgattcatggataaactggaaataattaggttttttttctccctaggctctaatgccatgtgaaaagagagaaaatagagaatccctaatttttgttattaagaactattaataatacacattagacttgggtatatatatacatgctagtgggacccacaatacaataaggaaaaaaaaagaaaaaagaaaagtaaataactgaaataactatacactttctaacactctccattcaagaaggctttcttgatatcaagttgataaagtggccaatcaaagttagctgccaaagaaagaaggatccttactgaatttagtttttctattggaacaaatgttttagaataattaatttcaacaatttgggtgaattattttgctacaagcctagcctcttatctttcaaccttcctatctgggttgtacttcaccgtaaatacccatttgctggccaccgaacgtttaccacctggtaaatcaatgattttccatgtaatattcttttgtaaggctttcatttcctccaaaacaacttacctccatttggggtttttcaaggcttcatgtttattctttggcactgtttcttcaaaggaaagatgggtaacaaatgcttgaaatgatgttgatagccggtatgagacaaagtttgagattgggtgtttggtacatgatcttactctcttttgaagtgctattggcttgtctaagtagtcacccgtttcctcacaagtttcacgttgaacatcaactggactattgctttcaaattttggttctatctccggttcaaacttttggtcagcttgtgatgtgttgagctctatttgttgagaaggctgccgttgagaatagacacaggagctgttgttttggtggttctataagtattgaattagtatcttcccttgtaatagaattttcaagcattgatggcactttagatttggttatggtgagtgattcaagtagtaatggtggccgttgcttggttggcgagctatttagcaactggggtgatgatgtttcttggaagcaatcttcactcatattctccccttgaagagtggtgatgggaatatggtgtttttttttttttttcaaaagatgtgacatccatgatgataaaaagcttacctgaaataggatcaaaacacttgtacccacgtttattggatgagtaacccaagaaaacacatttaatgacacaaggctcaagctgagacctactaggagcaatgtagtgaacaaatgaggtacatccaaaggtttttaagggtaaggtatgatgaagttgggagttagggtaggattgaagcagtgtgtctaagggtgttttcatgctgactatcttagagggcattcggttgattaagaaggttgcaattaagatagcttcaccccaaaaacattttggcatgtgggtagtaaacatgagggatcgggctacttctaagaggtgatggttttttctttcgacaatgcggttttgttgaggggtgtcggcacatgagctttggtgtatgattccatggtcttttaggtaaggtccaaggatggaattaaaatactttgttccattatctgttttgaggatctgaatgctagtttgaaattgattttggatcatagaatgaaactatttaaaattttgggttgtttttgatttttcttttaacaggtagactcaacaaatttgtgtgtgatcatctataaaagataataaccatttagtattgattaagtttggaactcctgagggaccccaaatgtcgctatttatcaaggaaaaaggtcgtgaggctttatacggtcatggtggataggtatttttatggctttttgcaatttggcatatttcacattgaaaatgagaaacatttttattaccaaatagggctggaaacaaatatttaagtacaagaaattagggtggcctaacctaaagtgccatgacattatttcatcattactagaaaaagaacctaactcactacttgcagcttgagcttgtccattctccatggccaaatcccgagctttccaaattgtcctccccgaagatagatcccaaaactcacaacaagaagaggagaacttagcaatgcaattcaagtccttggataactttcttactgacaacaaattgcatgataaatttggtacataaagcacaaaatccagttctaatgaatctggaaaacaaagtctgttttctcttgttcttctttttctatcaatatatccctttgtcgtttcctatcaaaaaaaataatgaaccatttgcaatctcaattttctgaccattgttacatagtatataggatgaaaacactttagtggttcctgtcatatgatgtgatgctccagaatcaacaatccacaccattccttttttatttgcagcattaagagcagtaagaaagttacctttctaagctaatgaacaggatcctatattaggatccccattctttctagttaaggaaggctgattgagaagtttgtacaactgctcaatttgttccttgtcaagatgggtggtagcacttttgaatccttctgatttgttgaagttaatattcggatcattggttgaggtttgggctaggaatcctctaccttctggttgtctccttggtgtctattttgctagctttccgtgaattttccagcaagtgtgactgcaatggttgcaccatgggagtttccgttgctctccattgcttttgttcactggtacgccacatgagacaagggcagggccatcaactagtccttgattgttgtttttatctccaagcatgacttgttttctatcctcctctcttttgacctcagcaaaggcatcatcgattgacaggaatggtgattttcttagtatccgtccatggacttcatcaagttccttattaagtcctgcaaagaactcaaagacacactcctcgatcattcgcttttgttttaggcaacaatcttcacatcctaaattagattcataagataaatctaactcatgccaaatattttgcaatttgcttttgttatattgagtaacactcatcgtaccctgcttcatctcttttattcttgttttaaaataaaaaatctgtgctgtgttgtccatatctgagtgtttttttcttgctgagtcctagattgccttcacggatgagagaaacatgaaaatctaaccaatctttggctccattgaatttatcagacacgccattacaattaagttatctgctatccatgatgaataagttgaatcagttttgtttcatgcactcatttccccggtgaggaagcccaactttcctctgccgcagatcaccaatttgacgaactgggaccattgaagataatttttcccatttaatttgtgtggtaatatgtagggatgcactatcgttgacttggaacgttgctgttgtctacattttcgcctgaatctggctggatgaaacaattgatgagttatttctttgtgtgtcagttctgccgctgctactattcatggccgtctttgccattgtcgggattcataagattttctgctctgataccaaaaagtctttaatgcatagactttattgaattaaacttgtggaaaacaatggaaataaataggtccttgctctaactgatcatcaaggacttctgctaaaaactagggctacatataactccaaagaataattaaaaaaaaaaaaaaaaatcctaatcctaactgaaagtcatattcggatgaccttattgaacacctaacatataaaatactaactaatagataaaataaaaaaaactcataattatctaactaagagataagataaaaaactcataattatccacagttaattatctttccactatctttccttgtgtaggaatgggccacatgtaagggtgtgctagcctatatacattgttgaccaagtaccaaacaaattaagattttggatcaaattgataacgtaattttctttttcagaatctctgggccattctataactccacctatgtacacaatcttagtggatgtagtgcagggagtgatattaggctttttactgttgtgccttgttctattaatcacatctatgttgagtttggtgtggcaattgcgatcatctcacagtttcttgccaacaaaattttgtggccttgtctctcaagagcattttcaggttattggtgtttttatttatttggattattaacatgcttaatattttcaattcaagattaggatttaaacttactgcttaacttgattataaatgggatgatccaattcttatgtttgaatcccctttttttaagaacttaatttttttttctttccaaaccttagggtctttgacttgaatcccaagttcaatccaatcaataaatgtctttaagatgtaatttggtaggtatgcctgtggaaacctttaactacaagatacaacatgtaaacttgtaaagtaatgatgcccttatgtgtaggaaaccattggtagtagatgcaggaaaaattagtaactgaaatgcgagctaagccaatgtatgtgtatagaaatgaggaaaatgaagaaagatgaagtgccagaatgataattgttcgatgagctacttagtatcaaacattataaaatcatttaatttgataattgttgtattttcttaaattgtttgaccagatgctacactgatctgcatggtatcataatttctgtgagtattggcagtttacatatatgctttatattgtataatgcattagaaacctataagaagtcatgattattccctaattatttggtaccattgcagtttattccaacaacattgactcttgattctggagt

SEQ ID NO: 13232 - DNA, 1948 bp, Vitis vinifera
  Intron number 2 from transcript GSVIVT01023199001 (locus G SVIVG01023199001) derived from phytozome v7.0 (chr-ID chr1 2; pos 21232414 to 21234361)
cttcctctcctctccccgcttccagccaccttaaggtttctgtcgtctcctctcttctcttccctcaaattgttttttaattttttaatttttattttttggcgaattaagagtgtcatgatactgtagtagctgtaaaacacaaggccatcgtcattacagtacatctgtgctgcattcacaattttgattctttaatattctatttgtttttttggtttcattttcatcctgggttttgtggggcttctccaatttttcatatttatgtttttttttttggtaatatgatatgtgggttatgggttttgaacgatttttttttttctttgggatttcttgctatgtatgattggatttttttttttatttaatgggctttttcctgttgtttttgtttccaattactgaaaaattcaacccagttaagctaaattattttcttaggcttattgtttgtcctgtagttactgtaaaacacaatgtcctcatcatcatcatacatgtatgctacattcaaatcagtgggggggagggggggtgtgtgtggcgcgcgggcggggagcaggcgttgttggattgtgggtattttgatttcttgcagtatttggtataatcaagttatctttgatttcttggcagctgctgcttctttttcttcatttttttccacaatgaaattaaagttcaacctttttaagctaaattattgaattttgattttgtgggcattggtttcctgttaattgaacctactaattatcaataaaaaaagtcgaatgctagtgaaaaggtaggaattgttctggaatatggaaggtgacttgattggaaaaggttgaatatttaaacacacatggatttgatgatttaggattggagtagattgtggttaattggtgttgttgctgctctcggattgaggagatggcaaccacattcttctcaagtggcccagtttttgtgggctttctcaggtgcagcatttttcccggatgagctctctgacttgctggcatggaattctagttgtcacaaagaagatgaaaatgagaaaaatcttttgaaatttgaattttttttggagttaggatagtgaagtctgaatattaagtatggatcctagttcatgtgttttatatttcagatactaaaatgaatactcaacgagatggaaccatctctatgaagggcttttggagcttttgagggttgagatcagaagcccattttttacagtctttactcttgtgattttgggattacttagggaaaggaaacttgccctttcagatttcactgggaggttgttattagctgaaggcattgtttatagccattgttttccttcctttatttctataggttgttctcatacacacgctgtgaactaaggtttgcttctaatgcatttagtatattcttcttactaatagaagaaaaggattttgaattgtaattctttgctccatattaggtgcatgtgtgttttcacatgtatgataataggaatgccatgtggaattctcagttgatacctataatttagattacttgactgcattttttatttgtgttttcttaccatttactattagaaattcatgttcatagatcattggaaacaactttagccatgtgtaaagttgaaatttttcgcactttaggaaaggttgaaatgacaaaatatggtgctttggttcatctcggcaatcaacttgacctttgaactttgaactactttagtttttcctttttctcatggatccttttttttcatcttatggccttttaagaccgaatagttggagcttccatacaatattttatatatcagatttcatgtgcttattgttccttttctagttatttttttaaccatttgatgttatcagttgagcgtgaaaaatgtgatttctattatgtgttgcagtgtagcaccgcttga

SEQ ID NO: 13233 - DNA, 4675 bp, Vitis vinifera
  Intron number 3 from transcript GSVIVT01023303001 (locus G SVIVG01023303001) derived from phytozome v7.0 (chr-ID chr1 2; pos 19918846 to 19923520 reverse strand)
cccataacctcaccttctgccaacaggttagcataatattcctttaattcgtttctacgcaaagattttctgttgcaaaaatgctagtcacttcaatacctatttgatcctttcacaactatatatttttcacacttaaattgaaactcataataataaaatatagaaaccttctaagaatgattattcaaatgtaaatcaagtttaactttccaatatgtccccttacgcttgattttttctaagtatcatccttaactttctaaaatctttcaacttgagaggcttggtaataatatttgtaatttaatcttgagattttgcaaattttaattataattctttctttataatgcactcgctaataaaatgataccatgcatcgatgcgcttgtttcaataatggtatactagattttttttataatgcaattagtgatttgttatccacatagatctctattggttcctcttacaacacattaagctcatccaacaattttttagccaaattgcatgacatacacacgatgttgctaaaaaaattatgtttcactagttaaaaataggctacttctttaagtttcaagtgattgtggtatctcccataaaaaattaaaaataatataaaataacgccattggttctttttttatcatccaaatcttcaccccaataactatcaatatatccaataagcttaaaattgtcaaaatgtgaataatataaaccataatgaagtttacctttgatgtgataaagaatttgtttgatgatcttcttgtcggtcactatatattggtgcttttatacaacaactagtaagtctaacttcaaaaagaatgtttatccttgtacaatcaaatagtgtaggcttccaactatgtttttattttgtcttggatccaccttttctcctttttcatgttttgacaatttaacatagagggaaagagtatcatagttgcttcttgagcaccccaatctcattcttcttttttattaaacttaagacctcttgtaatagtcatgatgatcattatttagattgtatatcatgtaacctttgtaccttgagtcataaccaatgaaaatatattttccactcttttcatctaactttgatcgttttttatcccatatataagcatatgcaatgcttccaaacactctcaaatatgaaatgtctgactttcttccatttcaagattgttttggtgttttattccatacattttgattaggagaacaatttgacaaataaatcgcacaatcacccattttggcccaaaattctttaggcatctccttacttttcaacatacttcaagttatgtcaagaatagttctatttttttcttttaattataccattattttgtggagaatgtgaaatcattacgactaatacatcatatgacaatttacttttgtcttttactagaattttgaatgtatctccaaaatgaacatgaccactttttgattcatcaagttctacaaataattttgaatccacacatgatttcttgttctagtgtcaaggtatcatgtgtttttatcttcattttatcctttatatgccaacaagatagtaggttcttcttgacatttcttttgaagataattggcttgtccttccacattgttagtgacacttccatattcacaagcataatgaccatattttgacaattataacattgaatttgggatttgttcattttgtcttgagttgtgtcatcttccaacctctaataaggaatatgaagtttgactttttttttcattatttgatgaattataatcacctctttctctattaccctggtcatgcccatggccacgtctacaaccacatccaagattattctaacttcttttaatgaagttttctttattctcttttaatataagttttgtttgaagaacttatcctaattttcttggttcttcctttttagtttctcttcatgggtttgcaatgatcctataagttgatcaatgactataaaatctaaatctttatattatttaatggttataacaatgtaatcaaactttgaatttaatatatatatatatatatatatatatatatatatatatatatatatatatatatatatattttcaaccataagagttcatttaaactttcacctattctttttaataagttcacaatagctagtactctagaaaaataatcaaagattgtttttgcttctttcatattcaaatcttaaaattttccgtaagagtttgaagatatatatatatattggtaccttatcaactcctttgcatgtattttgtaacatttcccaagcttctttggaggtaggtgcacttgaaatttacagaaaaaaaaaaaaaaccttaatccattgcttgatagaagatgatgagaatcatttttatctctcctaatcctatctttcaaaaaatcccttcgatttgaggatagaacgattttaccttgtggctttttatagcatttctctataacctttcatgcatcttgtggtccaagcaaaaccttcatcttgatgttctaattatcataattgtctttgttgagttgagcaacttgaaatggatacattccattagccatcttttttgtatggctccagaaccaatttattggagtaatagaattgaatgagaaacacaaactgcaacataaaataagataaaattaagaagaattaaagatttattgccctctaccactattttattcaaatattacatcatctcttatttatagatactcacatttaacaaagtagaaactcctaataacaaaatatagaaatcttctaggacttgactactcaaataaaaaatctgaagtaatcatccaaaataaaatattttcattgccttgtggagctaagtctaattataatttttagaaattttctaactcaaattgaactttccaataatccttttgatatgtgcaattttaactgtattagaaataggatataccaaaacaaatcaccacaactttgggtgtaattacaaaaataaatgttcttgattgagtcacatttaagagattgttcaaaataattaatcttttatgcattcaaacgtccttgaaacgcgaatctcatcgatagaacacacctagaggggggtgactaggtgtttttgtccaattttaaaggtctcctaacactagttaactaacctaaatgtttttttcaatttttccttctctttacaaacacttcaaaaacacaaattagaaatcacatgcaaatatgaatgcaacaacactccccaataagaataaaatgcaactcacatgcacatgttccaacactccccaacacaaaaccttaaaacaatttctaatgaataacaagagtaaaatttctcaaatatgcctatgaacaatattcagaaacaacattcaatattcttaaaggcaactcatatctattttacctcaacattcaatcaaaaattagatgtccaaattatcaaagatagctaaaattgaaaatgaaatgaagaggataatgagagacaatgagataacaccaaaatctacgtggaaaaccttcaaagagttaaaaaaaccatgaacctacaaccaatcaaaaatccactttgaagaacaattaaggtgtacaaggatttacctagctcaagatctttaatccttcacggactacttgaaaagcactttttcacctcaccaagatgtcttcatcttcaggaacatgcttggagtccttcccaatcatgatctcgaccttctccttgaagctccattaagaagaaaatgggctttcactcaaacccaaaatgattgagagatgaatgttcaaaaaactcaacccatttatttatttatttattttagaaaatcaaaaaaaaaaatgcttgaagatttgaatgaattttcttggaaagcaaacaacatcttaaaagggaagggaatgaggaatacaagaaccgactactacagtctcttatctccataaatgggaaattttcattttaaagagatatgaaaccttaatccaatggctagaacaagatcacaaaaaaagttatttggatcgatttgcccctgcacttggatcgatccaaaaatagggtaacctacaacttttagcaaaaatatttttcccatgctttcctaactttttaaaaataattcaagataatcaacattatgaaaatagggttgattcaaattcattcaacacaaactcagttacttaccttgtcctcttagcaaatccaatatcttgatcatcaagtcaaatagtccaacaatagatttagagaaccgtagctaatagacacttaggtattttttctagaattgccaacctaactacaacactcacagtcctaatgctaaatttagtggaaaagcttcaaacatgtcctaaaacccaagggcacttaccatgctactttcaatttcttatctagagtgcttaatttgaaggttaaaaaatggcactttagatttcatgtcaacactaaaacaaggtttcacacattctttttgtggagttgttcgtatccaccaagtacatttaaaatgggaaattaagctataagtttactccacacatatatactctaacaatgacgcatattggcatgggttaatgtattgatccaggtgaaattg

SEQ ID NO: 13234 - DNA, 1047 bp, Vitis vinifera
  Intron number 15 from transcript GSVIVT01031236001 (locus GSVIVG01031236001) derived from phytozome v7.0 (chr-ID chr 14; pos 976637 to 977683)
ttccaatagacctatcaaaggtttgttaatacagtcctttgcatgaattctgggttcccatgccaactttgtagcttataaatttctgaatcaacaaccagatggtttttaaagctaagtgataatggggttgcattctggctgatttagtcctgatgagatctggtagtgctgactagaattcactcttgaataggttggaaaatgccagatgaagccagacagccacaaatgatttaaaactggaaaccagctaaactatctgcttaaaacatttaaatgacaagaaatctaaaacaagatttaaaatgtaattaacatgaaagaatcatgtatggccattaaagcaaagcttatattgacaataatattctaacaataatcttggtcatggcgaacactaggaagtgtggtccctgtaagtggtacatagttctgggtttgaatcctaccactgatgataccctgaatttacctagtgctggttgttgtaggacggtcaacaccataaggtttgggtccccatagagagttctaagggtttggccatggaaggttcctcggttatcaaaaaaataaataaataaaaatctaacaatagtctaagctagcatatgtaaaaagttgggaagtgaactctcaagttttcgctttttcttctctagcataaactccctcacatccgtttctatagttattcctccccccattctcaaccacctcatgatgcaattcagattgttggatacaacttacagacactgacatatgcatttacccatgctcttgtaaaatatccttcttcaataatgatgcatatgcatgctaaataattctgttttagtgtagaatacattgctgagtggatgtttttcatgatttccgccaaatgcctctgaaatcgcttgtgaacttttgaatcatatttctggtttcaaacttttatttatttttttgcactatattctgatttatataatactatgacatgaatattctgtgacttcatgcctcatacttgaatactttattgcaggttctgtttgt

SEQ ID NO: 13235 - DNA, 3897 bp, Vitis vinifera
  Intron number 3 from transcript GSVIVT01023642001 (locus G SVIVG01023642001) derived from phytozome v7.0 (chr-ID chr1 1; pos 8350993 to 8354889)
gctgaagacgctgaacttgatctggtttgtctttttcagtgaatatttcaagttctagttcaagatgtgtggttgcattgtgtgcctaatagttggttttatttgtatgtgcaatgaatggattcaactagtttctaccagtgtacttcttttgagtctatctctctccctccctccctctaaaaaattgcgttttgatgttctctgatgcattactctttcaaattgtttccctcttttccatggggataaatgtcaggattttaatattctagttttttatgttctgtatccttgatgagcaattaacaaagttcttgaatttgttgaatctctttctctctctctctctctatctatatatatatatatatatatatatatatattgctatttcaattcagttataaatccatgtttagttttggatttgaggctgtttgaggttgctacagtaccttgggttttagtttggcttcatcataaattattttttcggttggagcctgaggttagaaagattagttggaaacctagaaagaaaaaagtgttgagaaacagactactcaccaatttgtgatatcagttgtgtgcataaatcagacaatgttaagatgtgatccctagagcatattgcttgcgtgaatcatttttatcacaagtgcaccagaatgctgtgactagtttcattattagattgtgaagttgttgtccttttacttcaaatatataatatactcaatcaacaaagtctttatgttagagtgcataatatacattgtgagcctgaatcctacaagtttaagtttttaggaaaattggttgttcaacactttattacaattccttgcattcagctgtgttaaagagcatgattgcaattgtggatccaagtcttagaagtttaagcttttaggaaaattggtagttcaacatggtattaaagcattgtttggaggaagtcatgtgttaaagcctcggtgcatgatatttcttttcccattttttttgataggtaaaaaagatgtatataaagaaaagaggaagcaccaaaagcagtgccttcaaagtatacatggagtatacaaaagatgcccaaaggctcaaaccaaaggggatagaaacaaaaaacattacctgcccttacttagaacttaaccaatcaatgaagcttacaagtgaagaagggctcaaaactatagacaccctaactcaagaccaaagattacatacaaaagaatttttcaatctttggagcgaaagctcctcattacctaatgctaacatattcatttccttccagactgcccaaaatattcataagggggccatttgccaagcctttttacgagctttccctacaaaagccccatgctacccaagaagagtttccttcattgaacaagagagaatctaggccacaccaaagagggagaaaagaagattccatagaacccgagtctttgcacaatgaagtaaaaggtgatccacctctactttagagagacataaaaaacacctatttgccaacgagtgtcccctcctttgaagttggtccaaagttaatactttaccccaagaagcctcccaagcaaagaaagccaccttaggaggcacactcgccctccaaatactaccactagggaacaaagaagaatctccgggctccaaaatagaataaagagacttgactgtaaaggtgccacacctcgaagctgtccaaatcactctatcttccaccttcctttgcaccttaaatgcttggatcttttgcaaaaaacgctccaacaactctacctcccaatcattaaatgcccttgagaaaagaggggtccaaccaccccatcaccatcagggttccaaatatccgatacccaagcttctttagacaaagaaatggaaaataaggaagggaatgactcacaaagtgactcatctccacaccacttgtccatccagaaactcactctcttacccacttggtaggccaacataccacttaaataaatccacaccttcctaattgatttccacaatctcacaccatacctctcactcattgcacgggagcgccaacccccatcctcttcaccatacttgtgactgatgacttacttccaaaaagtctctctttcatggggaaaccgccaattccacttacttaagagagctatattcattaaagctagatttctcacacccaaaccacctttcctttttaccaagcaaaccatgttccacgtaacaaaatgcggtttctgtacaagagctccaccaccctaaagaaaatccctctgaatcttctgcaatctcaacctcacttttcttggcatgtaaaaaagagacatgaaatagataggcatgttagataaagtgcttcagattagagtgagtctccctccttttgagatatactgtcttttccacattgctagcctttttcgaaatctctcttcaactccatcccacacaaccattgatttgaaggggccccccaaaggcaaacccaaatagcaggaagggagaccacccattttacaccccaacttcaaggccaagtcctctatatcatgcaccctgcccaccggaattaactcgctcttctccaaattgattctcaaacttgagcaagcctgaaaccacatgagaagccaacttagataagtcatctggtcttgagacgcctcacaaaacaccaatgtatcatcagcaaataacaagtgcaagattagaatcctctcaccactcttgcctctcaccctccaaccaaataagtagcccccactaatagccctcctcaataaacaactaaacacctccatggctatcacgaacaaataaggggagaggagatctccttgtctcaatcccctcgaactttggaaaaaatcggaaggagaaccatttattaaaacaaaaaatttcacagtagagatgcaccattctatcctatttatcaatttctccccaaaacccatctttctaagcactgcaatcaagaacttccaaattgacatgatcatatgccttctctatatccaacttgcacaacacaccttcttcattgcttttcaaccttgagtccacagcctcatttgcaatcaatactgtgtctaaaatttgtctaccctccacaaagacattttgggactccgaaatcactttgcccattaccttttaaattttattagccaacaccttggccagcaacttatagaggctgcccacaaggctaatcggcctaaaatctttcaggtctcctacacctcccttcttagggactaaaaccaggaaagtagcattcaaagactttacaaatcttcccctctcatgaaagtctctaaaaaaacccataacctctaccttttacaatttcttttcccaatttattaagcctgattgtggttgatatttcttttcccaatttgttaagcccaaaagaggctgattgtggttgttttgttatggtctgtgtgtctctctgcttatggttatggggctatacatgagggagggtgttaaaaaacatgatatatattgtggacttaaattttgcaagtttaaggtttcaggaaaattggtagttcaacaatctgcatgtgcaaatttttgtgatttctctctatccaagttcagtaattcctatgatgtcctttctcatcaccttgactgatattctccacaagaattgcgcaatagtttacttttactttaagaatatcaaggaactcttgccttttgcttggagctttttaagctaagatctccgttgtcttgtttgcctttttgttctgtgttctttttcttttctctacttttaattaaaaaaatgctattttttacttggaaactcatttgttttttaatttcgatttatgcaggtagtattatctccgg

SEQ ID NO: 13236 - DNA, 4536 bp, Vitis vinifera
  Intron number 7 from transcript GSVIVT01032210001 (locus G SVIVG01032210001) derived from phytozome v7.0 (chr-ID chr1 3; pos 21525248 to 21529783)
aaatcttcatagagtgtgacaaggacactgcccatgtgattggccttaaccttggcaacaactatctctatggttctatcaactctagtagcacctcttccaccttgtgcatcttcaagggcttgatctatttgataacgatttcagttcctctaagatcccatctagaattgtccagcttttgagtttaagaagtctaaactgctcgtcttccagattctccagccaaatcccattggagcttttagtgctgtccaaactggttgtccttgatctctcacaaaatccattgaagcacaacgccattaacctaacctggctttagatgcaggggtgagaaacatttcattcttttaatataaaatgcttttgggaagttggttgtatcgttcctggtgaatggtgatttcccctaccaatttggtacactttcagacttgatcttatgcatatcattgaagaacctttttttttttcctcaatattttgtttttagaaagattttaactaaaaatattgtgcaatttcatttgaaaaaattttcaaatcctcttctctgtaaaactatggatctttagtgttctgtagacccctaatattaggaatatggtggtttatgtttgaatacacgtttttctctttaaatccttgaacctagtgtaccaatatttcaaacatttttttttgtttacagatatatgctagaaatatgatagggtgatgaaagccaaggaaccactttggtgttgatttggagatcaatcactaaaaggttcagatgatttctttttctagttttttcttatttaggtaagattaagaggtatccttatggtggcaaattcttctaacctaaagattaagtgatcatttggtgaaacaaaacataatttagaaacattccctcattcagtcactgttgctagcttttaggaagctgacaacatttacagtaataaataaatggtaccctgctttccatactgatcatgttactcagggtaggttgcttttcttgaacttgagcatttttttttactaaaaatgatgaattgagactataatctacttccatttttaacaacttgagaaggtaacatttttcaagcaatggcataaaaaatctgaagatgatgaattgagactagaattgctccttgctaaagaagatgacattaagagactctttcttagtagatgtaggggctccatccactaagtaagcatagatgttcggaatgtagaaacgctcttgaaactctcgtttaataaggagtttaataggcttttccgaatgagtacggtcggaacctgctcttgtatggacaactttctggcccttactagccattggtaaaagccatatcccctcttgatgacatgatgaagaaatgggtcgtgagaaacctacatagcacaacgaccgattgtcataaaatagtcgcccagtccttctgacaacagacagtgcctcatatgtacaataactagcttacccaagcctaaaatccacatttaggagaagcacttggcccagcctgtagggtaaaccctaaccaagatctcgctcaaccatactctcatagtgaccccaagccaaaaggccaatgtacacccctcaacgaaccaacaaaaagaaagcaaaccttaaccctaccaaacgctacttattccccaaatggtgagtgtcttcgccataaaaacttcaaaagccctacattatggacctcacaacgtccatttcatacccaaaaagccccaaaattgcaaaaatagttccaaggcagcaaactaaccaactcgataaacaaaaaattgaaaccagaagaaggaagaagaatgggcttaccatagtctaaaatgtgcgcgtataagcataaaatgacgctcaccaaaaataagataagaaatacagtaaagtcatcggaaatgatgagcgacgaagcgacggagtgcagaacaaacggtggcagctgaagttgcagcaaagaaaatacgggagaagaaaggaagaagaagagctccaaaggcagaaacatccaaaaaggtaccccaaggggtctggagtcccttatttataggggaccaaaaccttagggatcccaaaaagcaggtcgcctgggaacgcgcaccaaagcgacatgccgcttgacagcgccctcgataaaaaacaaccctcatttaaatccctaattgacacatgtcccacacacattggggaattccagggggtatttttaaacccgttcgtctctgtcggacaaagacactcgtgttaaaaaggggcattgtgggggccttccccacgtgccagtccgtatgatggtccatgtggcactcctctcagtattgtacggatggtcaccatagtatccggagcttcccatccgggccatataggctggtagctgagcaacattagacttcctaagttgacaacgttttccgtatagcttgcgactctctcctcttgacaaaagtatggatgatgggacttttcctgatcttcacatccgtgtcagaagattatcacacattagcaggttgaagtgatgagcaaatatatcaggacacaccatctgatggcaccaactatccaccttaaattgcaatgattaccctaccatctacaagatagccattattgcagtaaaagtcaaagcgccaacacaacactacagtggttccatcctaagcactataaaaggccctcccaagcaaaacccatgtacgcaagaataaagggctagcccattcactctcctctttaaaggttaatcctcatcatcactcagtccattgtcactaggtagaggctttgagtggcacaacaaaaggaagatctaactctagttgaccccatatcaacatttggacttccaacaagttcaaaaaaaaattgacagacacgttagtaggaaaaactcttttactcattctagatgacgtgtggaacgaaaattattgtaattgggatcgtttgcaggctccttttagtgtagtggcaaaaggaagcaaagtcatagttacaacacgtaataaaaatgttgcattgatgatgggagctctctggaatgttcatgaactaaaccctttatctgaatatatgtgcttgttggtctatgtttgggaagcatgcatttgaacatagaaatatcaatgatcatctgaacctggtgtccattggtaggaaaattgttggcaaatgtggtggattgccgctagctgcaaaagggtgtggtggtctcttacgctctaagcaaagcgaagccaagtgtaaaaaagtgttgaatagcaaaatgagagatttgtcaagcacggaatgtgagattcttccgattttttcatcactggtccttagcatacaccaattcaagttggtggcacaatgctactttactaataaaacagtgggtggcaaaggaaccatcagagccatggttggatggagagtaccaaggaaaggaaaaaaacaaaaaaaaagtaataactagccttatcaatacatcaatttacaaatttttgaagtacctaaaatattctcattcttttcttccacattcaacttttattttattttcttttattttttttctcttttaatctttttcttcttaacaaaataccctaagaaaaaaaatgttttttaggcttatcctttatgtaaattttgataaaaaaaaacttataaaaataattaaaaaatgattaggaagaatttagaaataatttaaaagtgaaaagttataaaaagaaaatgtaagaaaaatgaaaaaaaaaaaaccctcatttcgttgtgtttgaagctggaaaagccattcccatatcacataaatacttcaacttaatgtgccaaggagtgatctagactaggaaggttggactatattttgatggttggacaataaatattaaatcttgttaaatcttgaagtgcatttgagagtgtttttaaaaaacattatttcaaaattatttttaataaaaattaagtatttgataaaatttataaaatatttttaaaattatttataatatcaaaaatcatttataatgtttttcaaagaaacattttattaaaaatattttaagtaaaaactatgtttgatattaattttaaaaaatatttataatatttttaacatgaaaggtaaaagcttttgtaataattgaaaatttttaataaaaatatttcctaaaaagattgcaagagtaaaaatattcgacttttaagggggtggggaatgaatgtgtgcacatctccgtagtttggttatttcgataaggatatttttgtcccaaaagaaattattattattaagatagatgaagaaaaattgaacggatgtaaacataaattccctaaaaagaatattagaattaataccataaaaaggtaaaaacaagccaaacgagaccttagcgtagagttcaaggcttgccttgaatgatgcctttactggatcccaacgggtttcgatgcctttaccctctgctgaagccttccccaccgcagaaccactttcacttggttcc

SEQ ID NO: 13237 - DNA, 1954 bp, Vitis vinifera
  Intron number 3 from transcript GSVIVT01015159001 (locus G SVIVG01015159001) derived from phytozome v7.0 (chr-ID chr1 1; pos 1453892 to 1455845 reverse strand)
ctaagcaggggacaggtgagagattggacattgttggtactcgcttttgtaggaggactgattttgtcttcaatggaatactctatatctttctgatatgtttatcttgacaggaaactggaaatagaaataagctatagtgcctttaattttttttaatcaaaatgacagctattcatctttcttcttgctgacctctgaattctttcaataaacatctttctctagaacaagccaaattatattaaaatgagaaaaaacatataaggaagaaggatgagaaattcttcagaaatgagaggagaaatttgtcttgatttctctattttattatctattttatttttataattctttcttaatttgtttgcagataagcgttaggccataaaaagtatgcactattggcttatatgtgttttacaattttgaccatagaaaatattaacagtgactgtgagatccatatctttcagtgggtactttttacttcatcaatgatctatggttacaaaatcttcatacacaatcttcattacatttgcgagttgcgaatgttcaaattttattctttgtggtgatctgaatgttccctttttaatagttagtcaaagtttacaggaaatcctagttccattaatcataataagtttgttactcaggaaactcagtttctttgcaatgtctttcatgatgtatttatgaatttaagacacagatattaatctgtaattgacaatattattgcctttctttctgcatttttttttttttgttattacctccctggacacactgaagttgaggtcccatggtttaagttgtttgctgggacttgttggagttgaagacctttttaggagtaaatgccaagttaaaactatgaaaatggcttagaattcaaaggttttgggatggctaggattaaggcagaatgtgtagcatgtggtatgtataaagcaagagtgaaagttcaggaatggtggagattttttactaggaaatagctaacagtttatattggtcattcatattatggaagttattgaagaggacacttattatagaattactgctggaaggatgaagaaaatagttctggagtctttgagtgattgctcaaagaaagctaatttaaatggttataaggctttccatgctttatgaataatgttagttcaaaaaatattttcataaatgggtatcaccaaactgtgtatgttgagatggatgagtggtaagactacaaaaggtaaaactagaaatgattgcttttgatagaagtttgtagtgtcagttgaaaagataagttaggagaaatccatcatacaggttttggcaatgtgtaataaagctttaatgactttgccattaagaagtgaacggtttaaggtgccatcaggatcaggggagggccaaaagttcatggattgagactctggaaaaagactgatagctgacttaaagttgttgctttaaatagagcaggatggtggaaaaaggatttatcaagctgtgatgcttaattattggcttttgaattaccaacaataaactgttgtgtttgttcctcttggtagcgctggacaaattatcaacctagtgcaggagcgaatatatccagaaaagattgcctttttattttcttgtcaacttagaagtcggtttttcttttccttatatgtctgtttcaaaaccataaagaggatgtatctattctggcttatttaagttattataagatcaatctcatgccatctaaccttgaatagtagtgaattcagtgtttaagcagctatgttaggcaacaactatagttactttttctattgatcttgttatcttttcagggtatactatttatatagatcttaccaatcgtctttgcatattttatgtagtatcattatcatctctacactcatcaattgcgtttttacaacataggtggaac

SEQ ID NO: 13238 - DNA, 2820 bp, Vitis vinifera
  Intron number 3 from transcript GSVIVT01008793001 (locus G SVIVG01008793001) derived from phytozome v7.0 (chr-ID chr1 8; pos 2134986 to 2137805)
ggctgaggtttgtttatactttactggctgtatgtgcttctatatttataattcatacattaaatgcaaatatattatatgttgttctcttgtttaatagctttcctttccatgtgatgttgtacccagaaaaaatttatggtgctttaccctctagaagttgagggttcggctttgggcaaaatggagcttatatttactgattgaatccaaacttatggagaagcatgggaaaaactgatctattttttcatggaaataagcctttacgtacaggaaggggcatagctttggtttggttaaaaagaaaaaaaacctagtggtgttatacatgatccatgatttcatatattgcttctccaaataaacaaatactataaagtcccttgattttgcaaatactcgttcactcatgtcattgagtcttttggagaagcagtttatgaaatatataaatgtgttttccttaaaaatattacatggaaaacccgatctaaaatcaacagagtgtgtatgtaaatattgaatagctttgaattgtatcttctctctctctccactcttctctttttttatccctctttgtcattagctcttgtcatatctttgaaaggcaagcaaggttgcctttattccatcatttctttatttcagccaatgtcccaaaagaggaacaaaatatgaacaaccctagatgaggctatatcactttgtcattgttttcttcatttcactttcctgcatatgtataccaactaccaaatacagcctagaagtgatgaaaatgaaagctgagtcttgttcattaagcttgtatctttgtttcatcagcattcaatatggtattaagatcatttgaactagcttattgaataaattgcatccaattgatggttttaagctatcaaaggctgaacacattgtctcatgaattgcatgatgaatgtctgctttttttgatagcgccaaaaacagggggcgcacccaacatatacaggcagtatactcaaaaaatcaaaccaagcaccagaaaaggaagaaaaaacctaggaaagaacaggctagccacaataaagagcatccaaaaaattcagaaaagagggattttccaagttttcaaaaactgctgagaccactctacaagtgatcagatagagagatccctcaaactttggtttgacaattcttcatctttgaaggtcctttggttgtgctctccccaaatgcactaaaatagacaaatcagagccaaaggccaaaatgctcttttcttcttcccttgccccttgattttccattctaggagaagatttctcattgaagttgggaacacccaaaccaaaccaaaagttgttaacaacatggtccaaagctcccttgtcttatcacagtgaatcaaaatgtgatcagctgattctttgctacctttacaaaggctacatctattaaccatggaccatcccctcttcattaacgtgtctatggttaagatcttcccccaaactgcttcccaagcaaaaaaaacgagttctaagaggggcacatgatccccaaatctctttagttgggaatgataaattattctcagcccttagagaattataataagatttgacactatactttcccttcccatcatttttcatcgcctgttgaatggtattcaaattttgtttacacaatttgaacttatcaaaaagaaaattttgtttacacaatttgagttgctacatatgagtcttaaacccaaatgatacactatgttaatactcatcagtttctaatcaacaatgaggtatggtgcaatatttataataaaacttcattgacatatagatttgatagaaacctggaaaaaaatagtagtccaagcattaatgtgatcacattaatcattgctatgaaaccaaggtttgtctcttcttgttattcctgcatattactcaccccttctaattagataattcagaagttctcttcatattatggatgtttaggcaatattaatcacatatagaggataatgtatagcagttgccacttttcttttatctttgaatctatttctttttgacattttttatctacatctgctacttttttcttcgtcaaattattatattatcgaactgatcctcaaaatttcatctctgccaagaccttgaaccatggataacatgcctcgaagtcaagttagtttgtttccctatttaattatgaatcagagtaataaactgagcagttaataaaatgaaccattcacttctgtaatacttcttgccttttatccttgtcaattttcacattgttgcttctatgatttttacttttcccttcctagcagttgcggagaagacttgtcattattttggattgtctgaggcttcatttcgttgtcctagagttttctttgctgttccatttttcttgtaaagggtattgcttccctctgttgtcatcttcctaatgcttgtctaaccttcttcctttgaggggagaaataaaaggaacacacccctatctttgcttataatttttgcacatgggagttgttctgacagtagaacttaatgctctggttaattggcacattcagccagcacatgtatcatggagttccatctagtgctgttttacatgattgtttatcagttgttattcatgtgaaccactttttttagcatgcaattttcagacctgttttagtggaactactggaagttaaattcgttatgcttatgttgaaagtgattatgtgtttcttataagattatatttatttcaggcttggattacccttggtagagcacagttaaactt

SEQ ID NO: 13239 - DNA, 5966 bp, Vitis vinifera
  Intron number 6 from transcript GSVIVT01016691001 (locus G SVIVG01016691001) derived from phytozome v7.0 (chr-ID chr9 ; pos 392108 to 398073)
catctttctgtgaaggcgtcagcatttcagtgctcttgcgacgccgctctcggcgtcgttgatgattggagaagatgatgctactttggcgtcattcggcggtcactgaaaactgttttagggccactgttggagtcgtttgaggatcgctctagcgccattttggagccactaatgacgccgttgttagggaccttgggatcgtttggggctgcagtaaataaattaatatatatattatgggattcctgggtcccagacatatgcatctttctaaccttttcccaggtgacgtcaaatcctaactttttcccatcaaggtgcccggtgataggaagtatatgcaaagtatcctcgatgccttaaattttctctaaatccatttatgatctgcggcatgcttgcatgtatatatatatatatatacatgggtttatgcatctaaaatgaatgccttctctaagctattgataataaaggactggtggtggtttgataaataaataaataaataaaggtcttaatgagattgacatgtaatccctcctctattaaggcattccaagcatgaattatattaatgtcatctcattggaaatttatttacttttatttatctaaactaatccatgttataggaagataggcacttgttatgggtttctcatttagctttggtgagaaacactagtatttgagttatggattcagttttagagagagaaactcaactgaaaccataattcaggttattcgcatagagtttaaataatgaatttagccttttcttgctacatttgtgtttaatattttaaaataaatgaattatgtatatttgttgccaaagtaacttatattatataatttatttattctataatatataaacatgttattattatataaaataatcgacccaaaggaaaattattttaatataataataaatgaagtagtcataaatatgtgatatataaagtttatcttgcatgttgtatgtcagtccaaagacaggcatattgcttcggttttatagttaatatttctaattaattttgaaaatgataccaattacaagttgatatttttgtccaaagactgaatattaatgtttgtgctaggtattttgtaataggcccacatgcatatacatatatatgttaaatttttatttattcatgtatgtatgatatttttgtgactaattgtgagctttattgttatgagtttagcatcttctatatctgcaaatgttaataacatttctatgtttaatggcacaaacttaaagaaatggaaggagcacgttataattgtgctcgggtgcatggatttggactatgcattaagaaaagatcgcctccaaaccttactaatgcccgcactattgagcaaagggttgttatggaaaaatgggagcgatccaatcgcatgagtctaatgacaatgaagcactcaattccagaagttataaggggtgcaatacctgaggaaacccgagctaagacattcttggaccagataacaaactgattcgctgcaaacaaaaaggttgagataagtactattcttagtaagtttgtctccatacggtacaaagggaaagaaaatataaggaagtacattatgatttagagctgcatcaaatggacgttaaaactgcgtttcttaatggtaacatcgatgagacaatatacatggtgcaaccggagaactttgagtctaatgattcaaagcaacttgtatgcaaattaaaaaggtccatatatggtttaaagcaagcatcccgacaatggtaccgaaagtttgatcaggtgattacttcatttggttttaaggagagcatcattgatcaatgcatatatcttaagttcagtgggagcaaattcattatcttggtgctatatgtagatgatattctacttgcaagtagtcatgtggaacttttgcatgaaaccaagcaatttctatctagtaaatttgacatgaaggatcttggtaatgcatcttttgtgttgggtatatagatctagagggatcgttcaagaggtatacttgggctatcacaaaagtcctacatcgataaggtgttaagtaggtttggcatgagcaattgtgcaccaagagacacgcctgtggcaaaaggcgataaatttagtttgcaccaatgtccgaaaaatgaacttgagaagaaggacatggagaggtttccctatgcctcagtagtaggaagtctcatgtatgcaaggaagaaaatgtcgcgatatttcagtgatatatcgtgtatcgaagggtttcgacatgatatttcatagagaaatatcggttctgcgataaatcggtgatttagcgataaatcggtgatttagcgataaatcggctatttttcccgatatatcgcatggtcaatgcggatcaacgaaagtcaaacgcgctacagtgctactacaatgcctcccatttgcttgctgccgagaggatttgaaccccaaaccaaaaggtttggggttcacccgcttaccacttgggctaccttgccctttaatacataatatgcaacaaatatatatatacttgaactcattatataaagaaaatataagaatattttaaagagcaaattaattataattattttataattaaatgcaaagtcttttaattaattaccaaaaatataaaaattatataattttcttcataatgtttttaatatcattaataattaattaaatattaaaaaattatatatatatatatatatatatatatatcattatttattttatattgtttaatacaattgaattaaatgaatcatattttaatactaatatatattttaaaattagacatattataatcaaatatcataatattaggtgtaatttaataataaatgtacacttataaaattcatatttttatcgatgcatacgatattattatcaaatatgataaatcatgttatacatgtataaaaattttcaataaaataactttaaaatgtctattatacttctaattatattattatgaggttttctttacattttcatgagtttttaacaattttaagcttatcgatatttttttccaaaatatctgtcaatatatctccgatatatccgatatatctgtaaaatcgaaataccgatatatccgtgattaccgatattttcatccttgcatgtatgcacaagtttgtacacgtccgaatattacgtacattgttggaatgttgggcaaatatttgagtaattcaggtatggatcactggaaaaaggcaaaacgggttatgcggtatttacaaagaactaaatattatatgctcacatatcgtagatccagtcattttaggatattcggactctgatttcgcaggatgtcttgacagcaggagatccacttcagactacatcttcatgttagctgaaggagcaatttcatggaaaagtgttaaacaaacacttattgcttcttccaccataaaggcggaattcatagcctactatgaggcatcaaaccatgggatatggttgtggaattttatcacttagttgcaaattgttgatggggttgagaaaccattgagaatcaactgtgataataaggttgcataattatattctaagaacaaccgaagttcatcaaagtccaaacacattgacgtcaagttcttggttgtgaaagaaagagttcagagtcttcaagtatcaattgaacacataagcacaagctccatgattgcggatccgctcagtaagggtttgccacccaaaatatatcatgagcatgtcacacatatgggtgttgtacatattgatgatgtgctagtatagtgggagtatgtatctagattttatgtttgttttcttgatgtgttattatgtttgtgttatctgtacaaaccttggttttaaagactattgtgtttaaatactctgaattgaaatgataactttcagaagcagttcagcatcaagtgttgaaagtggaatttgactttttttttttagtcataaagtaggaccaattgaaaatagacatattaaagatcacattctatataatttccatactacaacatccaaacttgatccatgttgctaattttgttaatgttgtgatcattgatgggtctagtcataattatgattaacgaagccgctttaatcctgtgttaacataattagtagatcggattgtttaaggatatttagataaaatagcaaagaggagctcaataaagtactatcacaaacgttgttctgtaatatatgtggtccaaatgggatattgttaaaatgactatggactcacatatgtaacatagtttatgattaagctatttgcattcacgtatttgttttttgtttgttctaaagtatgggccacctcatgtgtagagcccgataccataggtgtctcagatgatggccctaagacacatatggcccaatattttaaagagaatggtccctaaggtatagaaggtatataaggctggtgtctgttcaatttttggagagatatcttttgaataaacaagaaacgttctctcccgcttcccatcgctaaagagattatagagacggtggtttcccctttatagccttagaagatccataccttgttcaaaaccaatagataaatggactcaggttctttctttttctataaagatgtctggcataagttcttcatatgattcaacatgcgatcccaatctgttattggatttataatggagttccctcaagatcctccttcaaaatttagatattttgtttcctaattgtttttaaaaacaatttttcaagtcgttgttacgaaaaacgagaataattaacaaaaaaaataaaaacacacaaatttacttgaaaaactttaaacggaaaaaatcactaataaaaaaatctactataagaaagattggtacaaaaagaaagaatatcaagcggttactacatagcccaaaatcctatgtaagtaaaatatttttacttgaaaaactttaaacggaaaaaatcactaataaaaaaattggtacaaaaagaagaatatcgaacggttactaaataacccaaaatcctatataagtaaaatatttttctttcactatcagccaatctcatgacccctcaaaaaatctataatttttctttattatataagtcataccttgaactttttaggtcgaactaaaaaggaatttgaatcatcaaaattctaatagacttaaaatattttaagaatttttatattataaataaatgtataatattttaatggagaaaaaacaaggaaaactgtttatttataatctttgattagtaagacttcgacatctcattgaaaatcaatcaatcgacatccatccgaggaagaagagcaacctttttcatgatattcgacgtcacacaatctcaatcgacatctcatgatttaacaaacaatcctttcctccaacataacgttctagctagatctggatgtgaaacttggtaagaggactagactcaagtacctatctgctttactatacatgagaagacagagaagatacgtgaaaacaagtgtttgcatttgaattgccctatgactcccacccatacctcatccgttgacaaaaggaaaaaagccttagaaggttgctctaagcattgaatgaatgagcctcagaatgtgcagtgatcccatccgaagataaagaatgcagagcatcatgcgcacccatcacccccactggcccacatctcttcaacagctagcgcgtcttgactagggggattttctttcatgttttcacaccaaggcccacacggctcacacccatctgaaaacagtcacaaagtccgaggttctgggcctttcgacatacatcatccctgataaatagccaatgtgttgagctcaagagcacaagaaaacagagttaggaggcatatagcatcaaggtcatc

SEQ ID NO: 13240 - DNA, 8160 bp, Vitis vinifera
  Intron number 2 from transcript GSVIVT01034226001 (locus G SVIVG01034226001) derived from phytozome v7.0 (chr-ID chr9 ; pos 13039292 to 13047451)
ccaaacgctgcgttttggtcgatctctgagttaaggtactgctccaatctctattcccagttaaatcaattgacaatcgtttggatactgagaaaattcttctaggttagatacaatccattggatgctgagaaaatactcagacaaatggaaagaaaaaaagaatagtaaatttatattttttctatttttttttgtcttttggattgttggcagcaaagaaagtgagggagataacataggaatcaaagcgtgtttttcttttatttttcttcattttcttagtaaccaagcagggggttggatttcactctaaacgctttataacttggaaaagctattgctgagagttctgaaatttagggtttctcttttacagacgtggaactattgcaagttcagattacagctaatactgagttttttttgttaatttgatggtctttgctgtttgggaatacagaaaaatgtcattttacttcaaaactcacactgaatgtttgtttagttgacttgggtttatgttatttttaattattattatgtataactttttcttggaagcaaaagatagagatgacataaaaatgaaaatattgttttctttgttgctcttttttcttggaaccaaacatagggctagggtttctctttgaatgcttttaagttttacaatgctattgttggaggttttgaatcctaggtttcattttggactacaactcaagctagaattttggaaacaccttgtgcacttgtacatatataaaaaaaaaaattgggttacattgacacttactaaggtggcatttgtttttttagctttttgttgaaagcaatttgctttcagaatttaagttgtttgtttttctagtttttgatgacttattattgaatttttaaaatttttggctaaataaaaaaaactaaaatatttggctttttctaaatagaaaaagcaagctttttaaacttcccccaaatcacgattgcaaccccgacccccaaccctagcccatcccatatagctctctagtctcaattgcaaccacaatccccaaccgtcatctcatccctgtgtagctcattggttccacgaccattaccaagctttctcaaggtaatttcttccccattttcgctctctatttaggtttcagctttcgttcttgctctttctcagcaatggggttaaaccataggtagaattgttgttttctgtttggaaatggtttattaatatcttctctggtacgattctttatgattctcatgccaatggtttattttggggttttgtggggaattttgattttgtgggagtgggtttggtgggtttacaggttcaacgaattttgtagagatgctcatgggtttgtggatgcatttgtgtgattcgattctggctttgaggaaccattgatgtttagaaattttgctcctctacagttcccattactctgatatgcactctctgtcttgcatctccatgtgctgttatgattgaattttgattctgaggaactgagttttgatgggtttaattgtttaggatctttttatacacttattgcatcttcatgtgctgttatggtttgcttttgataaaatcacaatccattttctgcctgcttgggctgttttctgttgcccctgtactgtgtcattcacttgtccaatgagcaatgtgaagctctgtcctcaccagattctgatattactgagctaccaggtctgatattaccgcatttgaagtccttactccttagagcctcaaaaagaggaagttgaggcttgtttgttttaatctgtaggatgtttttttcctggtttcccttagaaacaactttagtggctgcttggtgaatcaagttttgcacgaacatgaagccctaataaacatatgaatcaggttttccacaaacacaatggacctgagcccaacactattgaagttacactttttcttctcatagtcattgctgtaatcgattaagttgaaagaaagcacgacgcttggcaaccataacgcatgatgctgcactatggagatgctctggtggggtccagtacatataatcatgttcaatttgttgtttacctgtaagaagctctataaggttttcttgggcacgaccaaatttggggaaatcataaaggcagaaaagaactaattgttttccatatctttaagacaacaaaggaagagagtgggaccttggttttccattagaagaacttttatcagtttttatatgggtgtgggggttggaggttggtgttatgtatcgaatcaagaccagtcaaggaatttccaaggctagaggatacccaatacccaattctgcttcaatcattttctagtttggtcaagtctttagcccatcaatggtgaaacttttgataaaaggaaacagaatctttacgaaaagaaaatcaggaaaaggaaccctcacaagcattcagaatttgcattagttgtcattgaacaccttgaaaatagtaacttgatcttaaaaccattccaaattcatttcagaaaactgatcatggtacaggttgagttggattgcttctatgcattgttcatttttttttcttgaggccactgatggcttgtgtttgactaaaccacaagagggttctattagaacaatatagtatagcaattgtattcaagacttcgttatgatttgtgcacttagtcctcctttgctgcaaacaattttttattctctcctgtctccactacttactgatatggactgatgtacacgtatgctaaagcacaaagtgttgtaatttgctttgtgctctctctcagcctagtgcttttgggttgattaagtgaatcttttgccttgctggaagtgggcttttccttttctttctgtgagcaataggtgtaattacactctttcttaggagggcattgataatcaactgtaatttataagacccaaaggcaccaaggaatgttgcaaaagcagtcaaaatgctagtaagtacctaggtcctttgcaatggaaaaagaaaaaagaaaaagattcctccaacgtgtgaagaatccaaaaagggttccatcaactcttgctctctctgggaaagttcttcaagctgtgttgttagtggggtctttcaccaacttcaggtggtgacaacttggagcatgcttcctgtggctgcgccccagacagcttcaaattcaataccaaacacagagttgaggctttcccatcaccattcagcactgcttgtgacatatttctaaagaagcactgagccacctgggtttaatttgtaaccatatgtttttctccaatcacttcttccactttcccaccctaccaactactacatccctttagtggagcagattctcccagtgacactatgaaaatgtgtttgattttgtagaaagtttctgagctaccgggtctgtttctcgttttacctctcacaaccagttagctaccatttagtgttgttttctcataaggtttctcaccaaccccttatgcttcccacctttcctaccttcctctctttgcatgtccatatttgggtgctttagaaaaattcatcttaagggactttggacagtttttataaactgtctttaggtgttattggcataaaggagtacctagatcagtagcctaacatccactcatagtataaattttatcatgcccaaggtaaatagtcaatttagagggactttcatcttatatcacagccagaatgttaagaaaacaagttaatgtcataccatgtgttttaaaatcataatagggccaacacatttgaagataccttctcactagaaagcaaaagtccaaaatgagtagattgtgccagtcttgcacaaactcaataaaataaatattccaatatgtataattcaagatcctatatccaaaattgaactggaaggaggtccagaaagttgaatatccacatctatatagtgaaactgaaccttttttccactatcaccagtttaagactatatgccaaagtaagcattcgccgtcacaaacaccaacaaaagtactaaaatagtttaataatgtcagaggttatggtacacacaaatttcagttgtttgcaagatttatttatttatttattttatcagaatttcttgcaagattttgttacagagaagcaaaataagttaacattagcacatatagtgaatcaattgagagaataacccaaaattttataagattctgcttaattttgaaaacaacttctggacttgattgcaactaagaaaaattatctgttgcgttcaaatattcattactggaaaatgggcacaccagataaagccgcaatgaccaagcgtaactgagacaacgttcactcaccacccaaaattcaggcaaattcaaattttccagtattctacttctgacattatcagaatactcattcaaatttcagcgctaaacatccaacataatgaaaatattttgacttgatagtgaaccccagattgatgagaagtacaacaaaaccctagaaacatggaattttttaagaagcagaaccacatcaaagaaacaaaacatgaaaaaatgcttgcaaatgaactgaaatagaagagaaaggagctgaattctggtgagcttcgtggagagccagggaggatccacatttcccatcttgccttctatcccagtccactaacatgataagataaacagcaaacacaataattaggtttccaacaataattaaagaaatctaaatttttcaatcctaaataacccagacccataagaggggaaaaaacctccactgagcaatcattaatattcctccattcggcttaaggttaaccttgacaagagtaatatttacggcatcaatcttaaacagaatcatctttataggttggccgagttgcttgattgcaaggcttttggttggcctataccctacttgggtcttcctttgggagggaatcccaaggcttgtggcttttggaatccagtgattgagaggatctcgagaagattagatgggtggcaaaagacttatttatcttttggaggtaggataactcttatccaatcttgcctcacccacatgccttgctacttcctttctttatttaagatacccgcttcagtggttgcaaaaattgagagatttcaaagggattttttatgatcaggggttggaaaaggtaaaagagatcatcttattagttgggatgtagtgtgtaagccgaaggcaaaaggaggtttgggatttgggaagattgctctaaggaatgtcgctctcttagggaaatggttgtggaggtaccctcgggagggttcagctctatggcatcaagttattttaaacatttacggatcacactcttaatgattgggatgtcaacactatagtcagatggtcacatcgttgtccttgcaaggctattgcacaagtctttcaggagttttccaagtttactcgatttgtggtaggagatgggaaaaaaattcggttctgagaaaacttgtggtggggggaccaacctttgggatcccaatatccaagattatttagaatagtcacggatgaaaatattcctatttcttcaattctcggttctgctcgtcccttctcttggaactttaattttcaccgcaacctatctgattctgagatagaagatttagaaggccttatgcggtcacttgattatctgcatttgtcatatttggtttcagatacgagatcttggtctttttcttcttcagggctttttatagtcaaatctttctttcttgccttatcccaatgttctggttctcttctagttttccctactaagttcgtttggaattctcaagtccctttcaaagtcaagttctttgtctgattggtggcacaccagaaggtaaatactaataacttgctacaattgagaagaccctacaaagctcttagtcctaatatttgtaagttgtgcatgaggcatggagaaccaacatatcatcttttcctacattgttctttgacgatcaaattgtggcatagattatttcagttagccaagacggattgggttcccccgaggagcatttccgacatgttgtccatcaattacaatggttttgatttatctaagagagggatagttttgtggcaagttgcgtgtattgctataatttgggttacgtgacaagaaagaaatgcgatgattttttatgataaagcaaggaattcagagaatctttgggattctattcatttccttgctctctttgggctttttgttccaaggtttttaaggggactccccttaatgtgttacaacttgattggctagcggcgtgtaattcctttggattggtctagtctagagagtttgttcgttattacattgtattttcttgttttcgtattcttgtagtttagttttctttggtgggaggatccttatctttctcttgtacttcttttttctatcaatatattcttttttcgtttcctatcaaaaataaataaatattcctccattcagagggaactggaaattaaaatgaatacagtgaagattcatgaagaataaattcatatggaacgaataccagaaaaagatgcgacaaaagtctaccgttgtagaaacaaaaacaaaactacatccacatacaacagtatgaacacacctcattgtgatcttcctcgtctttttgaaatgagaacccagaaaaaggcggatagtgtgcaccgtagtgcttaggctttttgaggaagaggtttctatgtttcaaggactagtttccaaaccctcccttttttccttcctttcttttaatcctttattatgtttgattttaaggtattaggcaaaaaaatatgttaaaagaaaatgatttttaccattaaaaacaatgcaaaagaaaatcaactaaaagaaattattaaaaaaattatatatttttaaaattattttatcttttagtcaaataagtgaaaaaaagtttgaaatagtatataaaaatattatttttgcaaactgtttctttgatgatttgctacaacattggaggtttctacaattgtgttttgacttttgatcttgtggaggaaccatggtggtaagttattcaaattttttgagagactttgaagtggtggcagatttctgttttagggttattgggaaatctgatgtatgtttcaggtccccaaaaatttcatctagtggtagcaaagaaagtttggtggaatattttggaaacttgatgagctgaattttgtgtatggaaattttatggaatttcaggagaatttttaaaacactttgaagtggtggcactagatttttgctggtattcacatgaaattcgaatgttctgataagctctttaactttaagatctagcatttatgattcttgaaatatttagtttttaataaaattgttgacaaaaaagaacaagaatgatgtgaaaaatcataaatatgtttacttggaatattttaagattttctgaatgctataattctcgtgttagttaactgttaagtgtaatacagtttaatgaaatatcaaaacctttgggactaatatccaacaagatacctgaatttctttttcaaaatctatatgtgattataaaataatgaaaaagaaaattacaaaaaaaaaattataagaatgccaatagaaagatggagctatgctgaaaatggggaaaagaaggaaatcttgagcatgatcagggccatccgtgcattaatataagaaattagaagaataccactagagagagagagagagagagccatgaaaattgactggtgatcaggcttatccatctttcagttaaatcaattatattcacattaaagaaaagggtaacgggaaaagggaaaagggaaaaggggttcctctcctatccctctttccttcataacaaaaatatttgtagtcaaataaaatcattggcatcaatctctgacgagatatttaatttgggtgagtaggattatgtttggttactgattaaatgaaaggtttattcctgtattctctcagtttccttaactttctcagaagctaaacagagcagtattcatttttattttgttaaaatttgatgatcaggtcagtaacaatattatatcgtcagaatagaaggt

SEQ ID NO: 13241 - DNA, 4426 bp, Vitis vinifera
  Intron number 10 from transcript GSVIVT01030703001 (locus GSVIVG01030703001) derived from phytozome v7.0 (chr-ID chr 14; pos 14024026 to 14028451)
ctatatacattcggagactaagatatcttgctcaggtattccctcattcactttgagcttcttgaagtttctgtcattttaaacatgcttagaataaaataaaaggtgcacctaagcatactgtacacacaaaaaaaaaaaaaaaaaaaaaccaaaacaaaagaaagaataccaataggtatctacaaaaaatcagcctcaaaaccaaactatccgcagccaaggctatctatgaaggccaacaatgagaaatttcccatatctaatgaagctttggaccaatcaaagagggaaataatgaaactctcctttaacctttaatctgctagttcttctccatttaagattctgtgattttgctctttccaaatgcaccaaacaaggaaagcggtgccatcttccaagcaccacgaatcatccaatcccttgaactaccgctcaagaagcaaattcctcactatagctgaaaacacccaattttgacaaaaaaaaaatgatgaaaagaacgtccttaacacctttgtctctgcacagtgaatcaaaatgtgatcaacaaactcttagtctctttgcaaacgctacatctattagccatcgtccacccctttttgcattaagaagtctagagattttccctcaagccgcttcctaagtgaaaaaacaagatctttagaatcattgcacaaagaactatagaatgactttacactaaagactcccttcctttcgtccttcctgattaagaaatcatccccttcatcttgcactttcaccaacataagctccaaaaattgcgatgccccatctaattctcaaccttggaagggtcaaaatatgtatacatttacacagtgttttaaaaggctattgttaatcaaggttcagcctcacctagttgaggcttataaccttaaggctatagcctcgaagctaatgaggcttaagcctcaaatattcaaagggttccaataggttcagggtttttttacatattttataagatgttcaagccttaatattcaacatatttaatgaatagtgcttttgctagcttttagtatacatttatatggtttttcttgagttaaagactaggcttaatgtgtacatagattatcattcaatgatcatgataagatttattgattgactaagctctaagtaagaaggagcttgtttttttgtttttgcttttgttttacctgcctactagtacctattgtatacatcgtgtagactctagtgcactcttttttctcaagtgttgttaatatatgtctaattttgccttaaaaggaaaaaaaagactaggattaaatgttttattaagtaagggcttagttttaatgctttaaatggagagggaataaagggattaggaagaagaaaggccactataactgatggatgatgaagaagaatgcttgtacattaacattggtgtagaggataataaatcaattggatatgattatgattccatggattatccttactcgtgataatgatgctagtgttaaggaaaatttgataaagccatgagagacggttggattataaaagaaagaaagaggaactaaattaaaaactattgatgatgacaaacaattaatttgattattatgaattgtatggttttcttattgttcaattttcatgtgatttttttatttttatttttattttttgagattttttctcttctttttcattatttatttatttctttaatttgaggcttacgccttgtttctccttaaggcttacgctttgcttcacttgggaaaaatacctcaaaaccacctttaaccttctaaaacacttatagcccatgcaccatgactcttaagattactgataataatgtttatccaaagaagctcacatagcccatacactatgactcgaaattcgatttcaaaactcaacctagcaaccacatactgtttgttacacctctaatcaccaaattacctcccaagaaagtacaataactagatgttgacctcctatcagtaactaatcttgcccattcagcatttgcataaacctcaagtatcatcttcctagtaaataaatttggaaattaatcaatttagctatatagaaaaagaaacaaacttaaattgaatcctagcttctataggctgtataatccactattactgcactaactatccaacactccccatgaagctggtgaattaatattttttattcttagcttgtttatgatagattagaatggttgagttgcaattcccttgggcattatgtcagtcaattgtctttctaggatatataagaggtgtatatttatccactatccagtttctcctcaatgaaatgaggatcaacttctaagtgcgtagttcagtcctgttgaactggattgtgggctatactggtagtgtggattgtgggttatattggtagccgacttgttgccatagtagagcttcataggataatttactctaagattactaataataatttttatccagagaagctcacatagcccatgcaccatgacttgaaattctatttcaacacttgacctaccaaccacatactatttgttactgtaattaccaaattccctcccaagaaagtacagtagctagatgttgacctcctattagtacttgatcctgtacatttagctcatagttgtgaaaggcacgttttaggtgtgcctaggcacaaggcagtgcaatgtgaagctctgacgcctttcctgactccaagtgctgcccgttgaagcaggcgctgcttaggcgcacaaggtgctcacctttggccaggtgtgaagccctaaaaaggtgtgctttttcttcttccttctccttttcttcttcttcttcttcttcttcttcttctattcttcttcctccacaaagcaccaacaagttgcagaggcaaagccctaatctgggctttcttttttcttttgcgatacctatggctgctaattgcttcagcaactctattttaaaacaatttcttcttctggttggaagaaaacttgtctcagtttggctctaggtttccattgtcaatcattcaacaatcttttccactactgcaggttaggcaagatgatatatcatgcctccatattactctctagatgataactcaacttccatcattcatgtacttggacttgatgaggatatcactactacaaaatcgtggttgctctccaagataaaggaaatttgaagccaacatatgccatagttgttaaaggtgcacttaaagcacacctaggcccaaggtcgaccactccctagtttatagcacctcacttaccaatcatgtgccttgatggagaggcacacctcatctactttacttttctttaattaacacttttattcttgatatttctaactgtatattgaaattcatgtaattttattacttcttttgttgaattcttcttttaaatccttgggatcttaaaatttttttgttacttaaattgaattttgcatcatgctttataaaattgatatgcatcttatgttacattttactttcctcaagtgtacacctaagtcttaggagacttttgttcctcaagtgtgccctgcaccttttaaaactatgacccaaacgactactagatgtcttcaagcatactactccatgataattttcaatataaggatataataggattaacttaagaagattatctatcttgatcacccatctgtgctctttttgttctctatgatttgtttacatttaaaagatgaaaaataccctttttactatacagatacaaatttcacaaacttcattttggatgataacactaagctcagattttctgtaataaaatacaaccagttgagagcatatttgctatatggattccatacttaaattgacaaacttacaaactccgtacactatgcatgcaacatactttgattgcacattttagatcatgcacatgagcaaattaaagtatgcaatgtaagagtcttggacaagccaatctttttaggattaagagttacttgctgtttaccatgctaatcatgctttagctcttatgaaaatcagttactaaagcatctagcaagagacttcgttcaatatacaaatgctaacaatactacttgtgagtccatcccccccctatgaccaagtttaggtcatattgctaaagtggcaaggatcaagcaaattatttgcctatttccaattatgattgtgaataaggaacccactggaaatgtataggaattttatttttattgtttgtcataatcaatgttataggaattttattttccttgttagaatgccctgcttcaggtttgtatcatgtgtaattaattttaaattacttatgttgctgctccctctagatatatttaaagtcaaatcaacctgcagaggctga

SEQ ID NO: 13242 - DNA, 3189 bp, Vitis vinifera
  Intron number 7 from transcript GSVIVT01028733001 (locus G SVIVG01028733001) derived from phytozome v7.0 (chr-ID chr1 6; pos 19305439 to 19308627)
cgaataaaaagacttgtggggcttttattggcagtgtttgatatgcagagcgtggagatcatttttgcggggctggtttccatgattctgtcgaatctcttcctcatcaagtatgaaactgtgccattccaagagaatcctgtgctttctacccaacgtgaggcggattttctgtggcggatcgtgctaatgcttgtagcctttccggcgcttttaatctaatattggagaatgaagatgccggagactggtcggtacactgcccatatcgaaggaaatcctaaacaagatgctgtagatatgggtagggttcttgagattgaaatccaaaaggaaggagataaagtggcagagtttaaggctgctaacgagtactcattatggtcgagaggtgggcgtcacctgataggcacaatgaacacctggttcctgttggacatagccttctacagccaaaacctaactcagagggatatttttccggcgatgaacctggtaaataaagattatcaagtcagtgctctccgggaagtgttcgagacatccagggccatgttttaggttgttatcaaagtgggatatctagataggaattaatataaaaattcaaccattcacgagacacacagggtatatggaagaccacctacaaagcctgtctaaaaactttgcaaatataaaaaccacaaacttaatcaattactgagcgaatccattgattctaaaagaacaagcgtatgaatttacgtgaactagatattaacctctcccagatatcttttcgtaagctagtgcttatatttgtcttcacgtttgctatataaaggtccgtgctcctgactccttactgaactccccaataaatcaagttaggaatatctccctcttttggtcataaaaatcattaagtataagaaaccaagttcgaaaaaaaaaaacaaaaaaacaaaaacggcctctttttgtcataaaagtgacatagtataagcaactaaattttaaaataaaaaaataaaaataaataaaagataaaaaataaataaaataaaattataaaaattgtgaaaacacttaaacacccgcactcttttggggtgcttgaaagctcatcataaaatttcattttcttaagccacttaagttaatggattaatataaactaatttagagtgtgtttaacaataattttataaataaaaaaattatcattttaatacttgaatattaaaaaattttaaatattaaaaatattgaaagagcttcctaaaatcactgtcaaatgagctcttaatctatttgttaccatcattcaaccaagcatatatacacattcatacttgtctgaataacctaattcaaaactaacaatgatctcaagttttcaaaaaccaatctaaatgctagattttacaatttttattgaaagcccttgatttggaaagaagattttacatgctctctaggatcttaccatgtgtgaacttaacttttaacctataaataggacattggatttcttttttatagttcttggacgttcttggactttcttagggagagaagagaatactgaagatttttgtttgttttctctattttaatctattgtttctgatttcttttattcaaaaatgattttttattcttcttttatgaattatgtgaataaaatcaccaccatgagaggctaaaagccaacttgggttgtgaaacatgaaaatctaaagttagagccaagggaaaacaatgaataaaatcaaactaaaaatggaatgaatgaaaggttgaagtataataaataaaacagagatatcttctactattagtttaaattaaggatgatacataactcattctttgatatttgaaattcttagtaattcttgatccctaattatataaggttttagtattgttatctacagacaaatttaaataaagtgataaaggtctaaatcctagacctaaacccaattttcatatccattcatcaatttggtattttaattataaaataaaatattaaaaaataagatacgaatgtaatcctaagttatgaaactcgggttgatctcgtttgaccccacattctaaatactttaagactaactaattgcttgaggctctatatcaaaagttggattgtggaacccccaatcttaaatcatttgaatcagaaatcaataattcttttgcaatttaattaagtttattttagtaaattcaattttattcaaataaattttgcacatttttagttcaagaaataaagcaaaaaagcaatcatttggtcctaagttgacaatttaaaatctccaattatatatgattttatttatttttttggattttgatgagaataatatataagatttttttttttggggaaatttgagggagtgcatatgcaaccccagcccttactagatccgcccctatgtgccattggagcataatttgtgattctaatcacatacactcgaacaataattattactaataaaaagtaatccgtgtcaaaaaatataataacatagaaatgaaaatcaaaatctaataatcaaccatattatctctccctttttgtcataaaaagaataaagtataagcaacaaagcataagaaaaggaggtgtttatatatatatatatatatgaaatataagcacttataaggggcttataacgcttaatcattcacaagggcccataacgcttaagcacttacaaggggcacatgagcactctttttggagtgcttgaaagctcatcataaaattttgtatttttcagcttatttaagttaatctctgttaccattattcaaccaagcatacacaatcatacttatttgaataacctaattcaaaactaacaaatcatttaaaattttcaatataaaacaactaatccagcacactaacaatttccgtacttactaattttgaccacattagccaatattcccatctcaaagcaacaatatatataccaccttagactacaatgatgtgaactttccttgattaaccaaagacaaagccaaaattaatgacagctttgtctaggggattaaccgggccgtgccaaaacatagcttcaatagaaaattgtgatcagaaacaacaaccgtcaaacttagggttgcatatatgaaaaggactaatgattccaccttggagtaccccat

SEQ ID NO: 13243 - DNA, 4756 bp, Vitis vinifera
  Intron number 2 from transcript GSVIVT01031509001 (locus G SVIVG01031509001) derived from phytozome v7.0 (chr-ID chr6 ; pos 17785562 to 17790317)
aagttggaattaaaggtatttgaagtactcccttcaatgcttataaattttcaaaatcgaagagttcatgtttataaggtgtgactatatcatttacagtggcattcacttaccacatgtttcctcttttctcagaggttggaacccactttgtgagggctaagagtataaacatgaaatgcgcatcattatctttttgtactaacattcatttggataaacccaatcggcatttttaggtagaaattccatgtgtacatgctgtatttgtttgttgaaaatatagtttcaattgccaaaactagactacatgttaattttcagagtaacctacaaagacactttaagatccgatggtttttggttgaggaaagcctcaaatatatagattataggtttgataaaataattaggagaggcgagcaaacgatgaaatttaatggacaatcaatgtcaagaagtgatttctttatgcttcgtttggatatactttttttttttttttttttaaattagaaacttacatataaaatgtagaaacttttatgaaaaaggtatagacttaccttatatccttatcttaaaaaatttaatggacaatggatgtcaagaagggatttctttatgctttgtttggatatactttttgttttttatttttaaaattagaaacttatatataaaatgtagaaacttttatgaaaaaagtagacttaccttatatgcttatcttaaaaaatttttaaatttgagttaataaattgtttttaattaaggaccttaatttttttaattagtttttaaaaaccattaacatttcaatgtaagcctcttagagttctaatattctatatagaaattgctattattctttatttttaaaaatagaaaaaatgaagtgtatccaaacggacgcttagttgatttgattttcataagggggggacattggatggggttcataggaataaagtaagatggatggagtggcgcctttggagtgtcatgagattgtagaccatctattaagtgttctctaatcttataatacccatggattatggtgttggaagagaaagataaggtgatttggatatagtcaaagaatggtaagttttctgttaaaatcctttacttggctttggagctaggaagtttagtatctgttccggaaagtgttatttggaactcttgggtgtttctaaaggtggattttttgcttgataggctacatgggaaggtttcaaccttggatcatttagagaggaaaggatggtctttggcaaacaaatgttttctttgtcatttaaagaaagaattcattgatcacattcttattcactatatatatcaagacaaggattttatggcatttattgttttccctattttccgtgtcttaggtgttaccctcttaggttagagatacactattaggatgacataactctttcataggtaaaaaaatggaaaaaggcatggcatgctactcccgtatggatcttttagactgtttagaaggaaaagaacaatagatatgtgaaaatgaggagcattctgttctaagggctgaaacactcttttctttgtaatatttgggcttagtcttagttgtttataatttttggtccttcacctttagtagaatttgatgattggctgggctcttattaagggaggaagatgtgggggggaggggtttgtgtatacttcttgtgtactttgggggcgctctgttaatgtttactttttgtaaattctcttgctttacccatacaaaaatggcttatgtactggatgctagaagaaggaacatatttgaaaatgagagcaacttaaatcaggatgtaaaggtggatgagtacccaaagagatggaataagacatgaattctttcatgaaaagttataggtagcatcaattcatgataagaggtaacaatgtaagatggtttaattatttgcattaacatcagtgatggaattggactagtgaagtggagaggtatgatttaagatgagggagcactagaacaagtggaaggctaaaaaaatatgggtcaataccaatgttttaaaaggctaaaggcagctttgatgcgttttgccccaaatgaggtgaggcataagccttgaggtggatcaaagtgtaagcctgaacctaacaaataaataaataaaaacttatcaaaagaaaaatgataattaaaaaaatatattaataaatcacatgaaaattgaacataagaaatccatgcactttgtaataatcaaattagttgtttatcagtattaatagtttcttatttaattcctctctctgtcttctaaattcaactctctcatagcttcatcaaatatccttcaagactgtcattgctaccactagtaaggatcatccaaggaaccataatcgtatccaatcgctatcattgttaatgtctacacattcttcttcttcatccatcaattatagtggtctttcgttctttatttatcagtaatatgaaattaattatatcaagttcaaccattacaaaggccagcaacttctgtatttcttcttcccaagctctttcttccccctccatttaaaggattaattggtggctaactaagccttactttataaaaggtttaaccctagttttttttctaataggaaaaactgaatatatattaacaacacctaaagaaaagggcgcatcagagttcacactatgaatacaatagcacaagtaggcaagcaaaaaagaaggtagaaaacaaataaaaaacaggcttcctctccttacatggagctatgtcaatcaacaaatcctatcatagtcattgaataatcatttatgtacatctaaccctagtcttgaacttaagacaaaacttattaatctatatcaaaatctcataaaagcacaatttattaaaccgtgaatattgaggcttaaacatcttacaatatatatatacataaagcccataaaagccctaaacccattaaaaccttttgaatatttgagacataagcctcaatagggcttttatgggcttaagccttgattatctgtactgatgctttagcctcaaggctaattttcatagcttcactttgaggcaagcctcaatagccttttaaaacactggttaatatcatgagaaaaacttaatttccaatgcttaacaagggatatggctttgttgtgttgagtttaacttgagcaaatgataacttagactcacatgtttgttctggtaagacgcacaagaaattttgtaattttgttacatttatatcagttaatgataagattaaatatgccatattgtttgccaattttcttatcggttacgttgcattgtattatagaaaatctggatggagaacaattttttatggtcttgctaactttaattttggggcattttgcatattaaattgaagtttggatgttttggatttaagtatgagttacccattttaaacaatgctaggcagtgttcttttgtaggagccaggattgtttaatttttgaatttgacaaggccagtggttttatttataaattccatgatcccagaaatccataaggagttaaaactgacaagatttcaaattgcatcataatgcctgggattgataaaccttgcattgtatttgttaaatggggtggatttacttgctgtgcaactcccagtttattccattagggaagagagtctattagtttcaactgtggatgagttctttggtggatttaattcattaaaaaaaaaacccagagaattaggggatggagggaagggaaaatgcattagtgcttgtaaagataggggaaagagattgtactaagttaaaaaataaaaagaaatcttgtgtttggatatgacattatgcaggtctttcccacctcagtcaaagaccttctgctggaccggagtttcggaggctagataaatggcataaaaaggtttcacaattggctcccttttgcttgttttggtgtatttaaagagaggttaacgatcaagtttttaatggagaagagcattcaaatcaaaagctaaaggaaatttccattaaatatctttatgttagaattggaaaattgtacattgatagagcttactgatagtatagactgtagatggcttgatttagctttgctgttttttggtgggaagtttggttttcctgtttcttttgtgccccttgtacacatgttgtgtatatagggtgtgtcctcttttggtttggtgcctttaactagaattttgtttgcctaaaaaaaaaaaggataatgtataatttctattttatgcagttttaatatttaattgttataaaccttatttaactgtttgaatagaataatcaagatcctgttgagggagaactcatcattgaattaattaaaagaagggtggaaatgggaatgtaccttttagtcaataaaatgaaaaaagggttgaagttaatatgcttgtgtcatagtggaacaaaaggagcaatttagacctttttcttgacaaattttgtgcatgactttgttgttctggctttcaattgatcactccctatttcttccataatggtttccattctatcttacaaagaagatttctcaggattttcattaactgaagtgttttctattccatctcacaaactttcttgtgctatcatcctttatattgacagtgttgttaaatccttttgtttagagcttggatatttgaaagtgcaatattgggccact

SEQ ID NO: 13244 - DNA, 13180 bp, Vitis vinifera
  Intron number 1 from transcript GSVIVT01013029001 (locus G SVIVG01013029001) derived from phytozome v7.0 (chr-ID chr2 ; pos 9912859 to 9926038)
caataaggatttattataatagttccttacataggattttttttattattattattaactatatatgtaaccctttttaggattcaaatatcatgctactcatataactttaggaacttccaaaagggaaatagttttgtcaccaaactagaggaataacatttctttagagaatatggttgtttatggagtggagaagattctaaattatgtgataaggattataaagtaaaatataagtagttctacttgccataatggggacttcttttttggagaatgacttcttatgctgaaaaaggatggttgcattgataccctttatccatattccatgtgagagtttttgttttatatcattaagatacgtagtgattggtaactacaccatatttaagaaaatgaaagtatggaatccattttccaatagtgaatgtgttatggtttgaaaccattggttatacaaaatgctaagcaatggtcttctcaatgttttactaactgtgagcttgtgttatgtcattttcaataacttcatccaattaaatataactattattttcttttaagtaattcatttctctaggaacttgaatggtggattccatcaaatttaccttatttcatatttaaactatactatgctcttcaaaatattttcttcaagacatgagagcatcttttgccttgaagatggatttttactactcttttttctttcttgttttttttttttattattttaaattcaactaaaaaaaataaaaatgaaaaataagtgtgaaaaatattttaaactaaaattgaaaagaacatctcatttgttttctattattttggtgtcggttcatatgattgaaaactaatatggtatttgttcaattgtcatgccaaataagtccatgaatattttggattttaaaccaaactttagatgagtcatcttattgatacaatctataactcatataacatgcatagatccaaacatcatgcacatattttttcttcatcctttaagtttccaagaaatttcttcattttctataattttgattttagctcatatgagtcaacttgtatgaccatttgcctttgccaccttatctatttgcttgatggaaaaaggttgtttttactgaataaatgatgataaggaggaagactgaaaagaattaatggactaacgttatttacatccattatccaacaatatgaaattacttcatgtctatttcattaaggaataggtactcatcatatttttttctctggtctatgaagactttctttgtctagactaatggaagattcaatagtgttggtgctatcaattttattaattcatgacatcatccatgttcacatgtacccacttggttgcattattcattgttcgacaatagcccatcactaagcctttggtttctcaatttaatgttttaaatatctcatttgttgtgtaaaagcattttacttttctttctttattttttcacatggttagtctatttgtgcatgcaacatttgaattattttgttgaataggattttctgagaattctcccctcccaaaaaatattaattttccttttttatttcaggatttagataagatattgaaaaagcttcatgataatcaaattggcatgttttttcatttaggtataaacaataaggaaacaaatgcaaaaaaaatacaaataaataaaatattttaggtctaggacaagtttgacacaaatttgatgttatactcaaatatgttatgagattacattttttgtcaccttctttaagacattacctatttcctttttatcatgattttgaaaatggtgtaaggaaatgtgttttttaattttttttttcttttttgttcatgcaaagagtcataacaacaattctccttatacctttactgcattggaatacaaaaacgatttgcaacctaaaatagttatgtaagatacacataactagactttgttttttttttttatcttagtttattattaatattacaatcaataatatatcctgtattttcttttattgacaaaagaccaatgtttcttattctcaactttgagtgtttaaaacgtcaccattgtaaaagttgtttcaagcctagatgacattcttaagtgagtagaactcaaattcaataaatgtttataagatttacatttgttataattatggatggttctcaaacttctcttactaaaatttaggtaaccattctatttaaagaaaatacttagagagaagaaaaggaagatgaagaaatttttttggaacaagtacttgaggaagataaagattttttccatgtgattgaggatgattttactcctaatgatgatgattaagagtctattttagggtctgatgagattaccatgattgttatgcaagaggaggaagaggttgttgatacaaggaaaaataagaggcttcatgcttctcatggagagatggttgattaccatgaaactagtgttctagtggcgaatcttcccatggctattattactaaggcatcttattatgtcattatagatgctaaggtagacacaattgtttctattcatgttcatattgtcatctcctcaaccttagtagacattcatgctgccgaaactaatatttcagaagttggtgtgacaattactgtaaggaatatgtatgatgcttaatgactattcctttttcatttctttcctagatattgggatacattgattttttttttttttttttctttttgttgtcaaatttccacttcatgccttcaatgaatgttttagcttgttcttcttgttcattggttttgttttgtgaagtaaaggatgttgatcttccttttcaaggtgactcttcctattcttacatttttctttcaatgtactttaagggcaatgtgcctatcaagtttgaagtaggaaaaactattaaaaaaatttattcttttgaatcatttttctatttttgcatttctttaataaaaactgaaactttattaaaaaaataaattccaaattttgttacatcatgtcatgcttttgagggctctatcttaacaaagtaatgctactaattagtaggtagtacactatgacttttaaaagattacctaagtcaataaacttcaaactcgttagcttttaaggaacccatgacttgaatcttttaagaaactcctaatgcactcatgtcctatatgatacaattgttaagatatagcccttaaaagcatgacatgatgtaacaaatttagaattcattatttaatggtattctaatttcacttttatctatccttgtttcatgcattacacttcatgagtactctagcctagcatcttttgtattgtacatgatttgggtacattagaagttgtacaaaaaattcaagtcataggttccatttaaatagatgatttgttcacaaccgatccatgaacttaggcaatctatttgagggtgtagtgcactacctcttaattggagggatgactagtcttggccgttgggataggttttctatggtgagtgcactaatgtgtatggttatacattggacaagacctacaatgagtcatgaattaaggctatcaagtagtcatgacctaaccaagttgctttattcatttgaattaatttttttttttaaaaaaaaaaaggaaggaagaaggagaaagtttctttttgttttttcaaaattggggttgcctcccatgagtttcatggggcaagctgcatatggttttgaagcttaggaagtcaagaatccaacacttcaaatggtttgcaaatcagagttgaatgagggagatatggtcatttgaagcaagattaagcaaaaggtatgcttttataggattgaattcaggtcatattatttttggttgtttgggcttgattttgggccaattgttgggctcaatttatggttggattcaaggatgaaaatatcgataatcacaaatagattagtacttcgattttacggatatatcggctgatattttgacacaaaatattggtggccctaaaatttatcaaaacttataaaaattaagaaaaactcttagaaattaaattagaactataatagacattttaaaattgtttttttgaagaaattgatatatatatatatatatatatatattacaagttttacatcaaatattattcgataataatattgtgatatgttattataatatgtctaattttaaaatatatttaatattaaaattatgatatatttaattcaattgtattaattgatataaaataaatgatgatatatgtgtaattttttaatatttaattaataaattaatgatattaaaaacactatgcagaaaattattatgataatttttatattttttgtaatcaattaaatgatttttttcatttaattataaagtaattataatcaatttgttctttaaaatattattttattattttgtttatatgataatttttaatatatacatatatatatatatatgtttgttgcaatttatttaccaaggggtgagtatgccccagtggtgggtaaaggttcatgcttaaccatttgtttggggttcaaggccccttgtagcagaaaattatggcattttttagctttgactgccatcgacctgtgttgaccacctagtttgatcacgttggcccgcattgattgcccaaaatatcgacgataaattgcagtaggcgatgatttttttagtgtttcaccaaaacatggcgatatttttggatatttctaccatccaacattttgaccccctatgtcacttccatgaccctcgaaacatgatattttgatgaaatttcaccaaaatttatggaaattttcatccatggctcttgtagactcaattgtggacaactatataggagctttattttggcaagttttgatgccaaagttgctaattttgggtttttttatggaaaataaattttcataagaaggttatttcctgttttattcaaaattgacatagtgttattgttaaggaattttttatatagaaagattttttttaaattgtgagagaatctagttttcttgtctaaaaaatccttgcaagatcctttttcaaggtttctaattttgagatcttcaaggacttgagtttctatattaaaggaagatccttttattttaatatctttataaaattgaatattccttataagcacaagtattccaatttagtgaataaataaagtttttagaaattctcatgatggataatttattttaagaaggttgtcaaaattattgaaagtctcttgtgtaaataatatgaaacttttagtaatttaatgaacataaattttcttgaaaattagattccaaagcatgttatttacttaattttggaaatagcatatattaagagaataaaacttgagaaaataaattagagagcaaagtttcattttctaaattattctaaaggattctaaactatttttttaaaaaactattttgatgagaattcctgtgaaataaaagtttctcttttggataaagtgctccctagtttttatttttcaagtttttgaaaacttttttgttacattaatccttaattatgagagtaaataatttttatggaaattttcaagatggataatttatcattattactaaaagttttatttttaatttaatgaaataaattgttatgaaaattagattacatatttaagaatatttattaatttggaaaagtgtgggaataaggaaaataatattataaggaattttgaatatgagagctaaggtttgtttctaaatttattcttaaggatttaattatatttcttaaatttatttttgagaatcctaaaagaaataaattagttctaattggataaggtgttaggatagaatctttaaaagcatgacatgatgtaacaaatttagaattagttatttatttattcatattccaatttcacttttatctatccttattccatacattacactttataagaattctcgcattcagctcttgtattgtatgtgacttgggtgcattaggagttagacgaaagatccaagctataggttccttgcacgtagattacttgtttacagtcggtttgtgggtttaggcaatcaattagaagttgtattacaccacctcctaattggatggatggttggtcttggttaatgagatgtgtttcccatggtgagggcactagtgtgtgtggtcttatatttttcacatgcatcccaccttgtcagggagtcttgctttctttgcgaaaataatcacttttggtaaaatcaaagtcgccacttattttattttattttaaaggggaaatgaaacaagaaagaaaaacctaaggaaagtgactccaatgttttggaaaaacatgtcttcgaaaagctcaagtctaatatgacaattatgacaattatctaattgacttaaggtaccaagaaaggtgaaggtgattctaaaagttctactaacactagcatgtcaaacaagaattcaaattacaatcataaaaaaaaaaaaaaaaaaaaatagggtgtatacctgaactgcttcttaagcattattgcaagacatcaaagttagttaaaaaaaaaaaaaaaaaaaaaaacacaacatgaattttatcaaagaaaatcaaacaaacatcaaggcaatcaaggacaatatcaaacatggatatagttcatgtgaagcatttcttatgtaattaaaagaaagtgaaagatggagagtgtacctgagtagcatattctaaacacaatatacttgtaatatgaatagagaggttaggatgaaaattatgacattcaattagtcttttcattcggtttaacttgtgttaatttccccccagaatacaattcttcaaaaagagagttctagtaagacattttaaatgcctacaacattaatgccttccttgaatccaaggttgtgggggtgaagtgggtcatgtataaagtgttatcccaaagcacacatgtaacttttttaatagtaggagtgaaacttttgatctcaaatttcatttttcaattcattgcctctatagtttttttcaaacgcactaagggtaactaacgccaattttcttaacttaaacaaatatccacccaagctactaactactacttatttggtcattcatacgcacaaaggtgaataagaaacctaggctttgaaactttcatccaactacaaaaaaaaagtgataggcttctttaaggtcattgttcataaactcttcattgcacatgtttcaaaaaaattgtgtgttattcgagttaaacccaatccaaaagaagtttaccatgcaccatggttcaaatctatgcttgaggtataaactgatcaattcctattatcattccttttaatcatgtcatgacatgttatcattgtagtcaacatcataaatttctttctaaaagtcattgtacatttaaatggaatatatcttttaaagaacatcatttgtatctcaactaaaatttatatagttgatgatttaagattattgagccccaacttccccttaaccttcaatgcgaatgaaaatttttagttggaagacacctatattgtattttgactcgcaattataatttgataattttctattgaatatggaagagttggaaattgtaaggtgattactactcaaaaagtgctattttgtagcttgtaattaactcttttaaacactcttgagtattaattattaccttttaactcaattgacatgttaaggacccttgcaatcgtttctaatcaaattgtgttaagttttggtgtttttgatagcttttagctacaccaaagcaatccaagaatgagggagagctgtatatagttcatggcaaagattttggaagctcaaattcatgaagaaccaagatttggagctccatagcccttttccaaagtcgttcaaagtatgcaaggaaagaacaacggagagaggaaagacagagtgaaaaaaatagaggacagcagctgcagtcttctttcacacttttggagcactttccgaagtccattttctacattatatataccatttcaaatattaggaagtcaagaatctaacgcttcaaatggtgtacgaattggagctgaaatgaggaagatatggccttcgcaagacaactacatccagcccatttccatccgggtaggaattccatccgggtagaaatgccatccgggtaggatttccatctgggtagaaaatccatccggctgccgccatttccatccggatgtatcacatccgaaatccggctacccccacttacatccggcgccgcatccacccccggatgacatccgaaattcaggatccggatgggaaaggaggcgtttcaacttcctcaatcagccatgtccggatcctccatggcgtttacccggatcactccaagctgaaggcagaatgttgcatagctgcagtgttctcctgaagcttcctgatatttgcgaccgacattttgagatcttctgggatattttgctttagatatttgatgtctaaattcccaaagtctccttgtaacccacctatcataggattccttaatctttaagttagaacaaagggtaaataaacccatatatatagtttgtaatcttttcgaaaaagggagctggaggagcttgttcttagagacaaccctttgaataagtaatatatacacagagcacttgctctgtttttcatacaaatatatttgtgttttctcattctttttatttctagccaaacaagctctgaggaagtttcttcaaaggatgagtggctagaattttagttccttggagttaaggttgtcgggaaaggttccaaatgcaagaattagtagctttgtggttttagccattaatgaagaaaaagtgtgactcgttaatgatttctatctttttagtttacttaaaacgcctttaaatcacctgggccaacacttgataaggcaagtgatctccttccattgagatgcactagtttatctcttgtgagcctttgggaggtggtttgaagataggattttctagaatagccaacacttggtaagcttttggactccacggagacatccattagttatctcttacgagcttttgacgggtaatccaaggttaaggatcaccttgaatggcaaatgctaggtgagaggcacgaaccattgcaaggtgcatcagtgagagggatttaatgtttgaacccattaaggggaagcatctgtacagcaccggttagagaattgactatatgttaattctctaaagggaggaaatgaaccaaatgacctgagttctgttttttgcacgaggaacctaccttgtgaacctaaacctccaaggaatacttttctttataagtaatttctattactttctttgccgttagattacaccaaacctttttcaatcaaagtttatgttttcttttgaagctaaccttgaaatgaaaaggcaccaatttagctttgaattggtatcatttatgaattgaaaacccttcccagtgaacgatcctagagccactatgctatagtagctttgtctttgctaccctagttcatggtgtaataggttataaattttgttgattactccctcagccaaggagcaccagctggacataaatcagctgatacaccgactgggcatgaatcataaggtatggcaattcaagaggatatactaacttttggttgttccaaatagcctcataggtgttcaaatttgggattagtggttccccttagactctctattgtcctcaaccattttcgatggattgatggaggttttcatggatcaaaagatttggtgtcttgtattatccttattccaattaggcttatccaactatgcaaaaaatatgcaatgtccatagacaagcaacaacaataatccaacctcaaaaaaattaaaacaaaaataataaaaatattacaaatacattaaatattaaattaaaactaacagaagaattaagcaaaatgaattcatgatgacaatcaaaattaaaaataaaactcttagaaattccatcctttttttcttttaggtacctataaccatgccaaaaatttgataaactcaattatttgcaaagtaaaatgtccccaagtatagaacttaaagtaaaaataattaaaagaacttgatgtcatacaaaagagacataattaaaggattgaagatgatgaagtggtacaatttgtgaatggcttttagggttaatagattgattcttaaaaattgatggttgtaaggaaactttctataataaagagagtttaatgtcaagttgtaattaaaaatagtagaattatgactaagccttggttttctacttttgctctgtatttatatatgactttttaagcgttataaagcatactcaaagccacataaaaaataaaaccataattagagatatacttaactcataaccaatcatttaaatttgtaacaaattttacttgtagaataaattttacaaaagtcacctcactagaaatgaaatccctaactcaactacttatctactcacactaaggaaagtacataatacaaggctagtaagcacaaatttaatcgagatagaaaatcttataaatgatagatttttactcggttaattatttaaattttattagcattgtttaaacaaatttgaataattttaaaactcctttctagtttctcaacaacaatcgaaatatgtagaatagatatcataaaggtaatgaaataaagtagggtagttcttgagctttgtgaggtgccaaataattgactacatgaattgacattatgaaataactattaagaaacatgttcccataaatctaacaattataatatatgggatgcaacacccacacttaattaggaagaaacataacttacaattttagtataaacaagagaaagatagttttatataaataaggataagaaataaaatattaatgtttttacaccataaaatttagttcgatcaattaatgtttaccattcttttttgaaaattataacgcatatgaagtaagaaattttacagaatgaataataagaaacaataaaataaaatatgaataaaactatataagattgataaatgaatctatagtataattgtattacataacgtttttgaggatattcacattaatcacttgaatggaatcttgctcaagtagagggtgtaaatctacttcgacgatgcaatgtccttaatgcatgatgttttcaaaaaacgcaattgaagatagcttcccttattttaaaattttctatcttttaaattattattttattcattatgtttcatttttgcttggacttcttttgtttgggcaattaggtgcatatttacccaattgatgagtttcacttcatcatatctaagtgtctctttaatttaggtggcatgaagcattttgtcaatgataaagactttagttgcaacatatgcctagatgaaaggaccctgctacgttgttgttaatgatgcccaagggtttttcataaaggtagatgtctttcttttattcactaacttggatattgttgttattatgcatcaaaagccttgttatttcgtgtaagaatggaagggaaacatggaattagatatgtgcatgtgtctttgtttgaaattacatatcatgacttacttaaaggtagaaaaaaaaaagacaataaatgaagatactaagtttgacactctttcctctatcattttttttatctatgaaactactcaagggattttttccactatatgactcagtatgtttgtcaattaatgtgctctacaacactatttggttattttctcctccaattaatgcattctaatgatatggtaaatcaacattaaataatttggcattgttttccaattgtgattttcaataatgccttgctatttgattttagggttttgataactacaaatatcatatctgtaaaatataagcattctttttgggacatctcatttaacatttccttatttttccttgcgataaatctacatcactattgtattttcattttcttataacgagttgcttaatgtactttttatgttatatgtcaaactcaactttcatctaatcaaatgttattttatttcacattacatgtactcatcagccatttctctacttcacatcatagacaatgctagattctagacatttttaaaattactttcctttaattaggttgactactaattttctctattgctctagacattttcaaaattactttcctttcattaggttgactactaattttctcttttgcagaatatgtgtaaatgacaaacattgataagggttagtggttctataaattttccattctacaatatattattgcaaaatttgcagaacacaattctaatggtgtaattgtagcaagggtagcacgtgtggacacatgcaatggaaaaaatgtgaaataatctaaaaagctcaagtcaataaagtaagaagatgtgcattttcaagtatgtctaaaaaaaattcaacttgatttacatagttagaagctctagtatatattttatcctttcttagtttgagcttaatcaacatttaaatagttagtagacttgcaaaaatttgatatcacatacctccgctcttcctccataagataggcctacacaaatatcctttttcttttttcaaatcttccttttcttattttgaaaatgtatgctacattgaaagactaacttctcatctcattgttttgagtgtctaaactattattcatgtgatgtatatggaaaatacaattttagtaaatccaaatttcgtcctcgcactattatgctttataattaggtaactaacactccttataattgtcattgttttccttatacttacatttttcatttttgtcctttgattttctttatatctagtctttataagaattaattcttatatatatttgtttttgttttagttctctcaatatcataaagtcttccgcaattaatattaaaataaacataatatgaatgaattgaacacaataatgatttattataatagttccttacataagattttttc

SEQ ID NO: 13245 - DNA, 2314 bp, Vitis vinifera
  Intron number 1 from transcript GSVIVT01015058001 (locus G SVIVG01015058001) derived from phytozome v7.0 (chr-ID chr1 1; pos 773765 to 776078 reverse strand)
gcacatatcgcttgagttggccattactcaagttggtattgtcttgttcaacgacaacttaatttccattcaaatatgaatcactctaccaacacactattcaacacaaaaaaattcaaatagattaattttcaaaataattatttttatttgtaacatataccactattaaaaattagaatttaatgtaaaaatgaatatgacactttttaattttcatatttcttaacaatatcctaaactaattccaagatatgtttttgtaattatttacattacattaattgtgatgtgaatttttttgagtttaatataattataattatttttaaaatttttaattaatcttttaaagttttttaattagcagactatgtgtattatccgatgttgattagagagatcaagaccgatatgtgtcgggacttttaaaatcagcatccaatgccacgagtttgaaccatagctacgagatccatatatataaacataaatcttgtatattcatccattgatcaaatcagataaaataatatcgtacatgcccaatcgagagcctaggttggagaatggttactgaacaaaccagaaaatgcttgagctgatgaagagagaatatagcatacagctacaagagatgtgtggatcaaaatattgcatagagttaatggatcatgaaaggaatggaggttgaatattgcaggtgatactttactcagaatcatcaccatggtatcactgcttatgactcccaaaaggttagaccaatccacgtcagtttaataatttaggtgggtttgtttttctgatttaattttttaatactaaataacgttatgaagtattaatttagaaaaaattaatttttttttcagtagagagaaagagagagagagagagagagagagagagagagagagagacaattcttaatatttggacacgaggataccagcattggatgccattattcatcttgtaaactaaacatatctcctgtagaagacatgaaaatgaactatttgtggcaagcatttgtctactctactttctttttgggaccattaaggatagagagagagagagagaataatgcattcctggatatttttaccggtgaaatcctaggccttttatatattacctttcgtctcttctcttcaaaagtactgaatggtggtcctgcttctatttctctcatattttagttttatggagctctcagcgtttcacattcttgtcgaggctgcgctcttagcaatcttccttacatcacctcaagctttgttttgtcttgcccacttgcttgctcacttcaaatactcctgtcctcacctaaaaacaaacttctcataggtgatggagatagaatttcaaatatttaaattgaaattaattcccgaaaaaatataatttttaattgatgacataaaaagtacagcagatttgaaaaataaattttgaattgacatattttaaaaaatatttataatagtagtttatggacatatcaaattgaagacaatttatggagcgtacgtggcaaggcaccatgtaatgcagtgtattccttaatgaggtggtatcctcaaaataaaacctcttttgaaaaaaattaggagttatttttaaaattgaattttattcacaaaaatttaaataaaaaatcaaattcaaaaatatttttgataattttttcttattttcacttttttaaagaaattgtttaaaaaaatacttatataaatataaagaaaatttgaaaataaaatattatatataaaatttatttttaagaaagatttgaaaatatatttttacacaaacttctattcttaaaatttaattttaaaaaccattttttaaaacatttagaaaacattaaaagcaaatttttaaaaattattcttaaaatttctaaacatgccctaaatctcacttcttggttattatccatttgaaatcacaagtgagcaaagttgttgagatttgggaatcatttacaatgaaagaaaatcttaaatttcccatcataaaagaaattattactcttttttgctattaacagtgatgggtgacaatgaggcatagaatacttttccatgtagaagtcccttgataaaattggattattttaagggagaattaccctttaagggtaggttggggaaaaaaattaccgagtagatttgataattattcttaaggttctcccttattttaatatggtattctactttcatgggactcctaggctttcacaatcttgtcaactcttcaccaaaaactttggtctttcctcatcagagattag

SEQ ID NO: 13246 - DNA, 7527 bp, Vitis vinifera
  Intron number 1 from transcript GSVIVT01021194001 (locus G SVIVG01021194001) derived from phytozome v7.0 (chr-ID chr1 0; pos 2464140 to 2471666 reverse strand)
gctgtatactgttgtggcttgtatatgcattcctcaacttcattaatgaaactgcttatcacctttcttttcatctgcaagtctactccaatcaagctcagaaaaatttcagtttaagtttaaattttataaggtttattgaaggatctcatcttttgtaaatgagctttaagtcattttgtagcccatatgggatagcttttattttttatttttaacaaaatcaaaggggaaaccaaagtcattagtttaaatgacaatattcatatcgtacaaattttatgtatatataaactttttgtataagccaaaacagagcttctttgataagcaatattcttaactttcatactaaaagtatttttagttgtaagttttttgaataaaattagctaataggacaaatatatattcattaatgaaattacttatcacctttcttttcatttgcaaatctactctaaccaagctctgaaaaatttcagttcaagtttaaatattatggtctattcaacgatactgtaaagtgtgattaaagggtcaaaacttaaccctaattgatattcatccacgtaaatatatagtacatcaagcaaacctaattaagggaaaaccgtgagtttaggaaacaatcctaaacaatagcaactactttcctagaatactttcctagaatatatcataatatctcaatcgtgagtttaggaaacaatcctaaacaatagcaactactttcctaatatactttcctagaatatatcataatatctcaacaccctccctcaagttggagcatgaggttcaaaaatgcccaacttggcaagaagataatcaaattgtttctttccaagagcctttgtaaaaatatctgccaattgtgtaacagtaggaacatatgatggagcaatcaaaccatctgttatcgcatcccagacaaagtgacaatcaacctcaatgtgtttggtgcgttcatgaaatactggatttttggccatatgaagggctgactgactatcacaaaagagcttgattgcctttgggtggtgcacacccaggctcagaagcaacccctacaaccatttgagctcacaagtaactgctgccatagctcggtattccgcttctgcagacgagcgggaaactgtgtgttgcttctttgtcttccaagaaataggagattgcccaagaaacacaagccatccggacaaagagcgtctagtgactggacatgctgcccaatcagaatcacaccaaccctgtagggacagatcactatctgcacgtaacaagataccctgacccggagtacctttcaaataacgaacgactctcaaagctgcctcccaatgctcaattctaggctcatgcataaattgagataatatatgaaccgagtaggccaaatctggacgggtcactgccagataaatgagtcgacctactaatctgcgataggactcagggttcgacaagagctccccatttgcgagtcctaatctgtgattttgctcgatcgggaagccacacggcttggctcccagtaatccggcctccgatacaatgtcaagtgtgtacttgcgttgacacaagaacaaaccagccgaactcctggccacctcgattccgaggaaatacttcaaaacaccaagatctttcatcttaaaacaatcactgagataggctttaaaggtcttaagagcagcggaatcattcccagagataataagatcgtcgacatacactagcacatttatttgaacattgcccgtagtgtaagtaaaaagagaataatcagagtaggattgtaagaaaccatatcctttaagagccgtgaccaacttggaaaaccaacatctcggagcctgtttcaacccataaagtgattttcgtaacctgcaaaccaagttcggatcggaacgctcaaatcctgggggtagcttcatatacacttcctcctcaagatctccatgtaaaaaggcattgtgaacatccatctgatgaagttcccaatttttcgaagccgcaatagccaagaaagcacgcaccgtagtcattttggcaactggagaaaatgtctcatgataatcaataccagcttcttgatgattccccaaaactactaatctggatttgagcctttcaatatcaccgtttgagaagtacttggttctgtaaacccactgacttcccaaagcacgcttaccctttggaagaggttcaagagtccacgtaccattttcctccaaagcccgaatctcctcatgcattgacttttgccaaccgacatctttcatagcctctttaaatgacttaggatcattgctcgaaataatagttgcaagaaactttcgataatgtacagaaaaattgtcacaatttatataatgtgctatgggataaggagtacctgagggatgatgtggagacggagtggcgggagatggactttcagcaaccaccgtatgagtaacaaaatctcataatagaaccgaaggaaatttatccctcattccctttcccataggagcagactgcccattgcttgaattgtcaagtccaagtgaatcaagcccaacagtgggaacaacttccggcccaggtgaaagaggcgttgaagaagcctcgggattttgtgtttgggcttgtgggttaggcaaatcagcatcatcatcgacaaaatcagcaaaatcactatcaatttcaacatttaccgtaggcacaatgttttccggaataatattcacagcacccgggttaccaaacggaaaaacatcctcaaaaaacttgacatcacgagaaacaaataattccttggtgtccaaatcaaacaacttccaccccttctttccaaacgggtaacccaaaaacacacattttctacttctacttgcaaatttgtcacctttggatttttgatcatgagcaaaactaagacaaccaaaggtgtgaattgccgcatatgaaggaggggtgccaaataggatttcaaatggtgttttattgtgtaacaaaggagagggagtgcggtttattaagtgagcagcggcaagaacactttcgccccaaaaataaataggcaaatttgcttgaaagcgtaatgccctccccacatttaaaatatgcttgtgttttctctcaaccctcccattttgttgcggagttcccacacaagaagtttggaataaaataccagttgcagaaaaatagtcaagtaggcatttaaattccgtaccattatcactttgaacaactttcactgtttgagaaaattgtcgatctaccattgcaataaaagacataaacatccgaaaaacttctgttttgtcgaccaacaaataaatccacacagctcttgagaaatcatcaacaatagttaaaaaataacgagctccacaagaagagacatgtttataagagccccacaaatcacaatgtattttctcaaaaattctagttgccttattgtcacttaaaggaaatttgtctctaggatgcttagcacgaaaacatatttcacaagctttgtttaaactacccttaagattgctaactggaggaagtaacttcactactttctctgaaggatgtcccatccttttgtgccacaactccaaagtggatgctgcgttgtggacaaaaacatgttgtaccgaatcaccttcagctccaccgaagtagtaaagtccatctcgcctaactcccgttccaatcagctccctggtgtggtcctgtatagcacacatataagagttaaattggacaatacaatgtaagtcatcagtcaattgtgaaaccgaaagtaaattgcaattgagtttcggcacataaagaacgttttgaagagtgatgttattcgacaaacgaacggaaccagattgggtcgcaacaacagattcaccattaggaaggccaaccggacactcaaacaacgctatagtatcaaataaccaagataaatcactggtcacgtgatgagttgccccggtgtcaatgatccatgacttcgtgtcaaacttaccattcaacctgtcatccagaacttgagcattaccaattaagcccgcaagagctttccattgtttgggcaaaaaaggtgaattcatctcccttttaggtggcgacaatggtggttgttcatcgtcgccggccattgttttattgtgtgtgcatgtcagcgctctgataccatgtaaagtgtgattaaagggtcaaagcttaaccctaattgatattcatccacgtaaatatatagtacatcaagcaaacctaattaagggaaaaccgtgagtttaggaaacaatcctaaacaatagcaactactttcctagaatactttcctagaatatatcataatatctcaatcgtgagtttaggaaacaatcctaaacaatagcaactactttcctaatatactttcctagaatatatcataatatctcaacagataccatcttttgtaaacaaattttagaagtcattttatatcccatatgggatagcttttatttttcagttttaactaaggagtaaaagttgaaatcaaagtcattagtttaaatgataatattgatattgtaaaaattttattgaatataattttcgtttttatttttttgtataagccaaaacaaaacttctttgagaaacaatattcttaacttcatattaaagttttttttttagttatgggttttttgaataaaattagctaataggacagaaattttaaacttaaaaaaaagaagaaaagatactatatatatatatatagagagagagagagagattaatatggaagttaagaaaatagttataaaaaataatttttgaaaaccgttatgttttatataacaaaaatggaagttaagaaaatagttataaaacataatttttgaaaaccgttctccaatgtgctcttaatttactttctattttttaaaatgtattttaaaaatgacttttatatataatactttatttttaatcattttttatatttatataattatttttttaaaatagtcatcaaaaaggtaaaaaaataaaataaaaggtatcacatcaaaatactatgttctttttatgaacaaaaatttgttttctaattttttattgtcaaatgtgtgtaagttatgtttcttataaaagctttatgatttgtataagaagttcattcatgtttaataaaacttctatggtacgaatatgatcctttgaaaattgtaatttaggttttggtttcaatgtgttgtcaaaataaaaaatagaaagttatcctaaacgagtataagttaattaataagaattttagtaattttaatcttaatataaagttatttgtttgcatgacactacatatatactatttagaacatactaattataataattgaaaatacttttctaatatagtcaatcaatttgataattctttttgagaaacaatattcttaactttcatattaaagtattttttagttatgggttttttgaataaaattagctaataggacaaagaaattttaaacttcaaaaaaaaaaaaaagctatatatatatatatatatataaagagagagagagattaatatagaagttaagaccattctttaatgttttgtataacaaaaatatgttgaaacttcaaatgttcttaatttactttctattttttaaaatgtattttaaaaatgacttttatatataatactttatttttaatcattttttatatttatataattatttttttaaaatagtcatcaaaaaggtcaaaaaataaaataaaagatatcacatcaaaatactatgttctttttatgaacaaaaatttgttttctaattttttattgtcaaatgtgtgtaagttatgtttcttataaaagctttatgatttgtataagaagttcattcatgtttaataaaacttctatagcacgaacatgatcatttgaaaattgtaatttaggttttggtttcaatgtcctgtcaaaataaaaaatagaaagttatcctaaacgagtataagttaattaataagaattttagtaattttaatcttaatacaaagttatttgtttgcatgacactacatatatactatttaaaacatactaattataataattgaaaataattttctaatatagtcaatcaatttgataattctttttgagaaacaatattcttaactttcatattaaagtattttttagttatgggttttttgaataaaattagctaataggacaaagaaattttaaacttcaaaaaaagaaaaaagctatatatatatatatatatatatatatatatatatatatataaagagagagagagagattaatatagaagttaagaccattctttaatgttttgtataacaaaaatatgttgaaacttcaaatgttcttaatttactttctattttttaaaatgtattttaaaaatgacttttatatataatactttatttttaatcattttttatatttatataattatttttttaaaatagtcatcaaaaaggtaaaaaaataaaataaaagatatcacatcaaaatactatgttctttttatgaacaaaaatttgttttctaatttttattgttaaatgtgtataaattatgtttcttgtaaaagctctatgatttgtataagaagttcattcatgtttaataaaactttaatagtacgaatatgaccctttgaaaattgtaatttaggttttggtttcaatgtcatgtcaaaataaaaaatagaaagttatcctaaacgagtataagttaattaataagaattttagtaattttaatcttaatacaaagttatttgttttcatgacactacatatataatatttaaaacatactaattataataattgaaaataattttttaatatagttaatcaatttgataattcttttaacaaattttagtatattttataaatataatatgttgtcaagtattcaacttcaattaaataacttttttttatcaatatttagtatttagtttcaaagttaaattattagggtggattatattattgacaaatattcttttgtattcaaaagtggtacaaaattatttaaatataattaataatttacaaaatttataatttatatatatatatatatatatatatatatcaatatttccattgatatcattatttaataagcatccatatgcttgagcttgatgatttttacagaaattgttgatagtagccccagtcacctgggctgctgcatggggagttgggcttctgaagccacctcccgcccactgcatgaagcttccatgtatgagaggcatgagcaatggatggctcgttacagtcgcaattacaaggatgatgcggaggaggagaggcgttttaatgttcaaggacaatgtggactttattcaaactttcgacactgcagggaatatgcctaacaagctaggtgtcaatgcacttgctgacatgacccatgaagaattcagagcctctggtaatacattcaaaattccc

SEQ ID NO: 13247 - DNA, 10735 bp, Vitis vinifera
  Intron number 1 from transcript GSVIVT01003089001 (locus G SVIVG01003089001) derived from phytozome v7.0 (chr-ID chr1 2; pos 8580262 to 8590996 reverse strand)
tttctgaagacgacttattgctcgtaacattttgtcatatagcatttttttaatttacaagagaacaaatattttgctcgcaaattgagaactttgcttttgcacaaataattaatgcattagttttttacaatgcatatgttttgggatcatgattgtttttgtagttgtatcaatattttatagtaaatttattaatttatagcataaactttgtcatttccatattcaagtttctataatcaaagtaacaaagccaagtaaaactatgtttggaccatcgatcaatggagttaaagtaacattaaaaagtttaatatatattataatatttgtctccacaattaatataaaaatcaattagcacaatgcacttactaaatattcatacttttacgaatatgtcaaaaatttaatcgtgagtaccaaggttcttcaattccacttacttcttcattatgcatttttttaagaaaggatatcttttgtcaatgtttttgttttgatcatggaacatcatattttttgccaatatagatgctaatttatggtccatttggatctcaattggtttttcttatagcatgttaagttttttcttattaaaattttgtcaaattacctaacaaacacattgattgatgtcaaatattgttgggacagtaaagtagaaatcaaattttgtgtgatatttgcatcaattgtattgtccaatcagtcaaatttgtgctaccttgcatatgctctaactttcttacattttcttctctattttttaatgtcttgcaactattttgagtgaataagtgcatgtaaaggagcttagtcaaagtattgaaatggagtgagaagagtacaaggacatgaaataggaaggggaaggaaggagggaggagagaggggggaaggggaaaggaaggagggaggggggaaggggaaagggaggaggagagaatgcacaatgccattttccattttgggatgatgacccatggttcccaaatttgcaacctcccctttgcttattgccactttgggtgcaatgctttcctacaggtggcaccatctctattaaaataattgtttatgcttggacacatttttttttttttggaatttttctcctatcctttagatctttgggattaaaattcctcaacatgtctccacgttaaggcaaccttggaatggtataaatatcccattttgcaattggagtggggtttgtcttaaggcctctttgatatatttttaggatttagatttctttatgttttagtttagattagtgtagatcccttttgatgtaatctttatttggatgttttcctctatctcgcacttccgtgcttggataatttttggtaaaaatcaagtatttcatatttttattttctttgtgtaaagcacatggtcacaggatatttagtaagaatactatattgaaaatatctatcaaaatactattccatgatcttgacccgttactactttaagttatacaaagcttttttacaattcaaaactttatttttgtttccttttactttataacccatgatttgttttgtatataatttttctttatgatattcatttaaaaattgattttgatcacacttttagtaaaatttccatgtattttaagctatgaaagaaattatgatcttatggtttctatagattgtaactaaagaaaattatgacatcatgatcaaggattaaaatattagaaattatgaaaatatcaatagttaagttttatagaaatattaggaaatataaacaaattgaacaaaaatttggaaaaaaatctttttaagaaaaaaaattatgaaaattacataaatatgaaaaaaattgtaaaatagataataataatacacattgaagtgggtttaatacatacatacatcatatatatatatatatatgtgtgtgtgtgtgtgtgtgtgtgtgtttctcttgattttaatttagaatttcacatggtatcaaagctttctctggtttctttgtatgcttaatgaaaactttgagtgctacctatccttatttgaagtttttttgtggtgttttgatttcttgagtttcattgttgatttatttattattcgttttgtctccattcatcactaatattatgtttgaaatattgaaccatactcctgctaccagagttctattaaggcgacattcaaagcgttgctaagcgaaaccacaagggaattgtagaacttccaagctacttagcaccttattgagaagaattatcttcaatattcttagttagtgtgaacctccctaaagggtaaaagaaaattaaaccatttaattggcataggactaaaacctggaaatctaaaattttagagttgggatgaaaaggattctatgatcatgtcttggttatggaattcaatgtctcctaaaattagtggaacatgtatgtttttgacaacaactagggaggtttacaaagccattcgacaaacctattcaaagatatgagattctactcaaattttcaaatcaaggtaaagatttcaactataaaataaggaactagatttgtaattaaacttgccaatattatgaagaatttgtgataggaaattgactactaccataacattcaaattaaatgccgtgaagatgcaatagtgccaaaaaaaattatagaaaaagaatgaatttttgaatttcttgctaggcccaatttatagtttaaccaagtatgggtctaagttctaggaaaagaggagcctctagccatgaatgaaatcagctccatcatttgtgctaaagaaaatcagagaggtgtgatgcttgaatcgtattttattcatggtttttccatggttgctataatgccaaacaaattcaacttaaatcttgttagagaaacttggcatcttgataagttgaaaattctcaatcgtgaaggactttagtgtacttactactagaagccctaaaacaccaaagagaagtgtaggaaacttaatggaaaaccttaaaatttggattaaaatagggaaaataaagcatggaaagaacacaatcaagaaattatggcaaattttgaaggaggccctcaagaaaaacatagtttcaatagtgaagaattgggagaactaaacaaaaaagagatagaaaggctaagatattttttggtactctgaataaataattatgtgttctttggcacaaacaagtaagtattctatttctcatactttaaggcaatcttttatttttcatactttaagggcctcatatttatccttcattggctcttgggtcattgactcaggagacatagactacatgatctaatcttttcctaatgccataatgcttgaattaaaccagttaaaaaaaaaaaatgaattggatccttctactaacattagtctagaaactattgttataaaaccactgtaagtttactcaacaagaagaacaattaccattgaacccatgtatactcaagagtctgaactaaggctaggtaataactctatctctcttagtacttcaaatgttgacaatgatcttgatttaaccattaccattaagaacatctgttgtcattatttatgtcttttgataactccttccactcccacaaaaattctcactcatttgtacaccatcatcactccacaaaaccttttcgaggcactaaataatgagaattagagacaagacatgagggttaagatggagaccttagagaaaaatagaacatgggaaatagcagaggtgtctaagaggaagaaaccatttgggtgtaaatgggtatatagaataaagtataactagaaagatataagactaggttagtaataaaaggctaacacaaacctatgaggttgattactgagcaacctttgctctcatagctattataaatatcataaggatgttattatcattagtagctaattttggttggagcttacaacaatttgatgtaaaaaaaaaatgtatttttgcatgaggacttagaagaagacatctatatggaaatttctctaggaaccaatgcttgaaaattaaagaaagccttatatgacttagaacaatctctaagaacatggtttaggagattttctaaagtgatgtttgccatgaaatacaaacgaagtcaaggtgatcatactttgttcattaagcatttgactttaaagagagtgataactttgtcggtgtatatggatgatattattatgattggtaatgatccagagaaaatgaggctctttgatagtatgtaactagagaatttgagattaaagaacttgttagattaaagtatttcctaagagtcaatgtggctcattccaaggagggtatctttatttcacaaccaaaatatgttattgatcttcttaaagaaaccaagaaacttggatgcaagctagtggacaaccacaaaccataaattagtagaggccttggaggataggattgtagattgtgtcatgtattaatgacaagtgggcaaattaatttactcaacacatattagactagacattgcatatgttgtgagcattgttagtcaatttatgcacaatcccaaatacactcatctttaagctatttattgaatcatgtactaccttaaatgaatatttgataaaggttgttattcaaacaagttatgaagttgtgcctaaaagcctacatggattcagattatgttttattaattttaaatagaagatgaaccttaggggactatacttttcttaggggatatcttgatacttggcaaagtaaaaaacaactagaggtcacaagatctagtgttgaggtggagtttcaagtaatggctcatggaatttgtgaactattatggcttaagattattttagatgatcttaaaatcaagtagagacaccctatgagactttactgtgataacaagtctgcattcaacattactcataatctggtatagtatgatcaaataaagcatgtggaagtagattgacatttcataaagaataagcttgatagtggtcttatttgcattccaggtattgagacacctgactaacttgtatatgttgtaactaaagattggctaataccacattttaaggaattataggcaagttgggaataaagaatctccattcaccaacttgaggggaagttttgcaagtttgggtcttataatttaggatttttctctttttaggaccctttttatacaattgtaaattagttaggactttttctccttttaggacttctcttgtacaattataaattagttaggacttttctccttttaaaacacttcatgtataactataaattagttagtaggagatttgaaattgatttgaattactatgtatagaaggaattttcctagaatagagaaggataaatgtgtgtgtatatgtatatatatgagaataatatatggaacttgccaatatattttatactaaaatagtaaactatataaaacatgatggtataagtgtaataatgttttattaaaaaaaatgtttgtagttatatcataaatttatatttattttatagtgaattattttaaatatcatgtattttatatttttaataatggataatgagttcaatgaaatttgaaaattgtataggtataattatatacataattacaaaaaatgtaataagggtagtctatctttttagctagatgcttgccattcttgccctttgaattcttaccaaacatggcactaaggaattcatgccaaacatggagcacaaatggtgagaacacgacacacaatgaactaatttcatgtgcggtagtgagttatttgaagaatttccaaaatatcaagaaataggaaaaaaataaatcatgaaaaattatgaaacagtaaaaaaaaaaaaaaaaaaaagtccattggatgatatttctccactaatttgttaaagccgtctgatgcatgatttgtaattttttaatcaattatcatatgaatattttgtcattatttgtaacctttagctactaatattgctttgtaatggttttaactcccatatatcatttgttgatatcatctttccatctctttgtttttcattccttcttcaaaccttattgatcggttataataagaaaatagataaaaaaaataacaatagattttttatttatttctttttacctcaaaacatttttataggctcttgtaatattaagcacttttatttgtacttttcaataaagacgatggagatgagtcttcataagtagatggtggtgatagaagaggagtaatgatctcttacaactctttattcgcttgtcttcttcttaaaaaaaaggaagaaattcatggtcatcttctttgacatacgaatcccacatttcatcaaacttgcaatctctactagtcttgtaatatttagagtatgagtcataacaaataaaaataaagttcactcttgatatctaacttttactagtttctttcagcacatgggcacattcaatactttaaaaagaattctcaagcgagatacacaagattctttcactaagacaatcctatgttatgtagactacatgtaatcaacctctttggtttcaaattcattagatattttcttatattttatcatacttcaagtcatgtcaataatagatttattttttcttactctttatcatgcttcaactcatgtcaggaatagatctatctatttcattttattgtgaagaaatcatactcatactttaaaggttataaggttagtaaagataccaagtttaatgaaacataaaattaggctttcgaagaagatagctatgaattttttctattatttgaatgaaaagattagatgaataaagcattgcctactctatctctatcacgaccacaattttcttaggaagacctatgcttttagtagattttacaacaaggtttttacatgaataaatgaaaccaacttacttgttgaaactcttagtccttgaaccaaaaataaaaagaactaatagcttgtatagtagttagcttgtctccatagggacttctacttgagagtagcaaagataaagagcaagaggtatgaatgtagtttaggagctcaaatagaattgcttctcttgaagtcatgggataaaacatgaaatttaaaaacaaaaaactaatagaaaacagactttaagagtggagatccattgaaatcaccatttctatctataattctcctacaaggaactagattagtgtttgtgactctaagtctaagccaagggtttataccaagaagtacatacttaagaggaatgggaacaatcttaaaaaggcttaactcactctagttgctcttgtttaggtccttgcaactagatgcttttgttgggtttcatttcaacttagtaggtttgtgctctactcaaggaaatcaatactatgatcccttaggcattctcctaaggtttgttaacttgcaaccctcacaaccatgacaacatacacttgtttagcatggttactccttttggtcattataaccactacaaaaggctagctttactcgagtcttacacaaatcaaaccgctagagatttgaactgggatatggaaaaatcttggctttacttacccactgaagtgtaaaactagctaagtatgatgaaaattaaatgaaaagcaagaactgtataggcatcctttgctcttagttatactgagttccttaggttggattgtgggcaaacttcattcttttagatttaactcattgctttaatgttccaacatttttttcaacataaaggaatacaaacattctcatatccttgttacttagcctatgaatcccatactagtctgtctaaggaattgagtgataaagcacccctgaggacctacatctaagcttcaagtggtggaaatggatttctcaagttttttgcttcgctaaatcctcatacgggatgcaagtggcattagatctttttattaatcttcgtttcctttctgcaatatatcagtcttttcctcaatttgccacaacttctcttccttgggaactctagtattttaacactaacggatgtagtgcgtagtgtgtgagaatgatttaaggaaaaattctcaatgggaatacttttttttttttttttgtttctccaagtaccttgagattctttactatctatctaaatgcctccttttgtttctccaaggaccttgagattctttattgtctatctaaaggcatctaattagtcatttgagcaaataagtccataagtggaattaaagcaagaaggttaaagcttaacttgctttacttaatctaattatttcccataaaattaaactaaaagaaaataaaagatatgtaggtaaagaagttattcctactaaggacctttgaaaaactcaattgatttgacactccaagctccctaaggtatcttcctctactcatttcttcttttcattgttacacatttgaattcttcattgagtgagaatcatcaacaaaattcaatatctcccatttttagttttagattctcattatatgttaatattggaccatgatttatgcaataagagttggaaatgaggttaagatatatatatatatataataatgttgtaagtcttttctgcttagatgttcctctaattgaacactatgttgggttgttatgatattacgactagcatggtgactggttcaaccaccttggctttcatagattggcttggtcattcatctgcagctcgctttcttctctaccttgtgcttgacacttagttctcacccttttcaaagttgcatgctatgctcttgtgtattctttggggtgcatacaatggtagtaaaaattcttccaccatcttgtctagtgaatatccttgaagtgcgccatcattgttcttcaaggtgcgccaattggtgaagatgactagaagcatgcataggatgttggagaagatggtgtgcaaaggtggtagttggaggagttccaagtgtgaagaaggatgcaaggttggttttaatgaaggtgagctacttagttggaggaaagtggtgcataatttaagtgagttggggtgcataagttaagtgagttggaggtagtgcataatttaaatgagcttggagatgtgaaacttgagtcatctaagtgatgaacaatttacctaacatatttgagaggtgtgtggcctcagtttgatgcgcctcttaaatgcgtcaactgctttagatagctcttctccaattcttaagttttcttactctttaagcttcattcaagtcctcccaaaaaattctaacacactttaaaataccttgaagacctacataattctcacaaaaacatcaaatataaaagactatggtattaaaaacaaaagtaagtagtggatccattataagtccctcaaacatactaaaataagacttttagagccattagagtgttgagtttgagttctaatcacatatctctatcatttgctttgaaaatttcaaatgaaatgagacaatgctataaaacttacaagaacatttcgaggtaacaaaaaatccaaacaattaatctaattctttttatctattcttttattgttatcaacaaataggatttgaagaatccacaaaaataaagaaaaatagagaaatattatctattgtgacattaaatttaatatttttcataccttgccctctcatttcattttccattgctccatattctatccttctatagaattacaatatcgacttgtttcattgttgaatgaattgtaattatttgttccacattttcgatgtctaccatcaagattactttgacttatttcattactataaagtaagattgatttgaaggagttgctccaattttctttcttctttcattttaatattattcatggacttgtaaagatcccatgagttgatcaatggtcatgggatcatgattttgtaaagatgtctactctttgctatttcctatggtatttttactataaaatatatttgtgtgtcataggtacatactcttattttcatagcaatcatataagtacaaatagtttatcgagcgttattttgagcaaacacccataaaggtgaaacatatatttcaatgggtgaagacactttctcctactttttgctatctaccattgtgcttcaaaatatatctacatatcatacatgtgtactcctatttttatagtagtcacattagtataaatagttgattgggcatcattttcagttgacttatgagggtttaaacttgctccacctcgtttaattaaataagtttagatattacaaattatgtatatgggagagagattgtgatctatatcatattagttaagtaaaaaatgtatagttcacattttctttattagctacatggtagcattttcttttattggtaaaattttttttttttcctttgtctattttttcctcgtgggactccaacctataatcatttggctttgctaagtgagcaactctcctaaaacatccataagatttaatttcttctaagacaatcttaaatttaggagaattaattaattaatgaataattcattatttaaattaatgcttgaagtggataagactttttaacttattaatttatacttcttatgatgatatcttaccaggaaggtgacaaagatctttgtgggagattttggaa

SEQ ID NO: 13248 - DNA, 2381 bp, Vitis vinifera
  Intron number 7 from transcript GSVIVT01022217001 (locus G SVIVG01022217001) derived from phytozome v7.0 (chr-ID chr7 ; pos 17585332 to 17587712)
cggcaatactcatcaagcaaggacttgcttcattcgtatgactccagtcttaagcatttcttcttcttcttctttccacattggtttgacaagattgccaggtctaacgtatggatgtatttggtattagtttctaaggaatctgtggctagatgatttccttttggaatatatgctaacattcattgtgctttaatttaattgctgaaacaaaaagctattctaatgttacttgttaattgttgtctccaaatactcctgcacaaatttgaacagaaaaggttttcatcataactatgcaaattttgttttaaaaattgagcagctaggtcattttcatggtactttacctaaaaaagaatgaaactctgttgggggtgattacaatatgatgctagctaagcctccactaatctgccttatgttgttctgttcttttttctcttttttgttttagaaaaagaactttcatggttcaagttgtccttttccaaatagttatcttaattatggtcttggaggatgtcttgctttctattattctttcttgatgttaagttttacatcattcttaaacagtggcggagacaggaaatggtatttacaatctagtggtaacaaaggaattcttcacctatttatgagaagggttcgattccctctatgtgattttattttttttaaaaaaatttcaggggggccatatgcccctcttgagcatgcattggctctgtccctgttcttaaatctgacaatggtattgatcttgaatcttcaatttagagttgaatcttgtatccttttggttatatatgggaagattaataaattttttatagatctttgagatgtttgtgataggtccttttttaatggtggtagtgggattgagactaattggatgtgtttgtgggtgaacattcatggtatgttcacctgaatagtcaactagcatgttctaccttgacatgatatgtctcttacccttccccattttgttgttttatcactattaaatgtactggaagatattgctaggagtatctgatgtgataatagaaattgcctttattccttccccttggatgctgatgtgtttcaacaattaatcactaggattttcttgtacgggggcagcctttcacatttgttcattatctatatttttgtggataatagtactgttgctggattctgggacaaaattcaaactttattgcctcttgggaagctgttactgaaatgttttatgttttgtttggtgtcatcataagcacaattctgctggattggagatagatttgttattcctatataggataaagcttattgggcctcaatggatcccctgcctatcaattgttgaagctccactttgatagtgctccttgggcatccgaggcaactgggtattgggggtttgctcagggaccttgtcagggttattagggcttcctctgagcctgctagcagtggcctgatattgaggcaaaaatttctagctttaaaggaaggcttggtggtggtgccttttctgggtgttaataatctctgtgtggaggggggacttggcaattgttctttcatgggtgttcagtgtaggagggggtcatgaagatttgatatctgaatcattgatttttttggaatcctgggttgcttcttttcttgggatctgaagtcagctaactatgaagataataagtttgcaaatattggggccaccttgacagagccggcccccccttctctctctctctctctccatttctccccccttttctctctccctctccctctccctgtacatgcaattcttcacattctatgagaataaggaatgttgctctctctttcccccctctctatgcaattcttcacattctatgagaataaggaatgttgctctctctttcccccctctctatgcaattcttcattttctatcagaatgagtatgatgtctatcatgctcttgacttccaggcagttgcctgaatcttccatatcagaaacagagccaatcagacccaatcttccattaaagtgggtgttctttaaaactctgatatgctgcgtggtttgttacatcaaactagtgtggcgcatcagaaaattgacatttattcctttttgtagtttttcaaacaactggttaatgtgtttacctcaaacaaatctaaattttgattgtgcttatgcttacactactgcttctgtgtgatccattattttgatgcagcaggttcattacatatgctttaatcgactattgcctttaccatgagaagtttgagtgtattcagttgatctggagttctaagtatgtttttctgttcttctcaggtaacttttgttgttacccacttcaacgacccaag

SEQ ID NO: 13249 - DNA, 1780 bp, Vitis vinifera
  Intron number 2 from transcript GSVIVT01033536001 (locus G SVIVG01033536001) derived from phytozome v7.0 (chr-ID chr8 ; pos 19881812 to 19883591 reverse strand)
gaccacatatagcttaagtttaaaggtccgtccatgttacattgttctttgttttcctatcattaggattatttatcattttagtttcttattttgtattttcctataaataaatatataagtgaatatatttttatttataaaagccaagaaaaagttttttttttaaaaagcaatttttttaaaaaaaattttgttgcaacatcatcttttataattaattaatctttctatatgcctttgaaaaacacttaggatgatattaaaataaattattgtgataaaatcaatctcgtcttttaaacgaaacttttaaaacttgtttgaaaactattttttagaatatttttatgttttctagaataaaaaacgtaaaaatcatgtttgataactaaaaattgttttttttttttttcctattttctattcttaagaataaaaaatataatattttctaaaaacattttttagttgttttcatttgttgtgctgttttaagaaataattatacaatcatgtagaataattaaaaataaaacattagatataaaatttattttaaaaaatattaaaaacaaattaaaaatattttaggttttcaaacagaattttattctacaaaaatcaaatatcaattttaaaaaattattctcaaattaaaacaattttttagagttgttttaaaaaaataattaccaaacattcacttaatgtttttacttgttttttatgatttcatttagttttgacttttgaaaatagtttttttaatgaaaatgaagcatcctattctttaagttttaaatatatttttaataagaattttctaaaaaaatagaaaaaaaaaactgttttcacatatatatatatatatcgctgcaagcctgcaaccaaacatggcataattaaactattgaacatgacattttgcaattgattcttgggtggatataatagaattttgaccaatggaaagtgtgacttgtgtcttatgatcataccaactgtttgggagacatgcgtcgtacctaatacctatgaggtaacatgcataactcttgacaaaagaagccacttctgtaatggaggttgctctgaatatcttgattgcttgttcttgaagctttaatttgcttcaaaatccaatgcttctgctcaggcatgggattccaggactcacaaatatcattctgatcacgagcagcatgggttaaatctggggattatgcggcggctgctgtttgggaattctacacacatgatacatgtcgattgcaatgagggttcctgcgtcggaattaagctgggtcctggaatgggaagctataaaaggagagaagggacgaaaagaaataggtaagaggagtggttcggcagctgggagggtgtattgtgggagaacagagaagcttttggcttctgaaggctcaaggggaaaactaaaagaagtcactgccgtggaaatgagaaattttggtacaacctgatcattccatcttttaattttctgctgcaactgcttctgtgtcttacttaccatttgtggcggactgctttatccgaaaagtttgacttttatttgaaatattcactttgccgggacccattgtatgtcgtatgcgctttgcttctattatttaacgtgggcagcatattttttagttagttaattggacattaaaattgtcgcaatcttcatttaaaactgtatcaatctttttagcagagactgatcattttcaaagcaggtgcccacgttggagtttgctacggattactg

SEQ ID NO: 13250 - DNA, 8599 bp, Vitis vinifera
  Intron number 6 from transcript GSVIVT01004849001 (locus G SVIVG01004849001) derived from phytozome v7.0 (chr-ID chr7 _random; pos 15058 to 23656 reverse strand)
gaaggtaagccatcttttccttgaaattttccacacagacatgggtagtactaatttttactcatggaaatgaacaaaatccttccttttgttggtttttaaatgcacaattgcattttcttatttttaataatactttagtccctataagaataatgtactggagctctttgttataacagaaatatgtaataagaactttggtgctatttttgttaggaaactttttcagtgaagtgataaacattttgatatgttattggaaattctattgatttgtaattttcaatctaaacctttaattggtttttaatagggaagtgaccttggtagcaatagatggagccttggtccttagttttttctaagaatgtattaggaaggtggtaataaagttatgactctaacctgttaggaatacgtaggaaaaagactcttaacctgtccgaaaggatgaaggtgtccgaaagcaggtgttggttcgtgatagaatcgaaatcctttgagattttgggcctatcttggggtggggaaaaggcccaacagcttggggttggcccaagtgtgaaggagaggtctttaggggcctttgtccaaaacaaggatttgggccaagttattgggatgggcctttttccagagtcaagacggaggaatgaaatggattgtttgactaaagcccaaggggccttagtgggctaagagggctcgtttaggaggttggaaggaccggcccacatccttctcttttttgaaaaggcctctgtgatctcgcagagagtggtttcgttatagggagatgaagacaaacctcgcgagtcccagctttctatggaagatgtcaagcttgctcttgagcagaaactccctttgtttttgatgccttgagtttagacgccacgaatgacacgttgatggaggaggccgctcgctttccaggtcagattccctctgtcctttctctcaggggggacgggttattctcttctactctttctccttcttctttgccctacaacgctaaaatcttgggacccttagtttgttgggaggactcgggtggcttttcgatggatggtgatgctttggagccagggcctttgcgtattgcccaactagatggctcggaggttcaatggccctctcaccttgtgtgttttgggggtactgaaagcaaggaaggtgcaattgaggacgccttcttcgacgtgacttttggaagattgccattgttcagtaggtttgtgggggttgccggtggatggcttcgaaaatgaaatcttgaccatgttttgaagtttaaagtggagaaaaaggggcaaagattttgtgcaagaaggaaaaaagaatcattttcttagatctagagtcgagagagagttacgaaagctagagtgctccactaagtatgggtccccctcaggttcaagaaaaagaagtgggaaatttgttggggagtgttcaaaaagtgttgatgttaattagaattctctcttggaatgtcaggggaataaatgataaggataaaagaaaggtagtgaaggcctttttaaggttgcaaagggtagacctagtttgtttgcaagagacaaaatgcaaactcatgttggatttggtagtgagaagtttgggttttggtagattcgtgaattggggaagtgtgcactccagaggacaggtagggggcatcttagttttctgggactgcagagtgttggagcttcttgagatggaaacagggtagtattccatatcgtgtcggttaaaaaattgcgatgacaattttgtttggattttttccagtgtttatgggccaatccattattctgagagagaattcctgtggtttgaacttatggatattaggggtttgtggagtgatccttggtgcgtcggtggtgatttcaatgtggttagattgcccagcgaaaggagaaattgcctgaatttgtcttcgacaatgaagcatttttcagaggtaattgatgagttgcagttgagggatctgcctctcactgggggctcttacacttggtgtggcggtttaaataacaaatcagcttatagactcgatcgttttttagtcttagaggattgggagagtcacttttctaacctttctcaaagcttgttgcctaaacccacttctgatcatgctcctattttgttggatggaggaagaattagaggcagaaaaaccccttttcgcttcgaaaatatgtggttgaaagtggaggggttcaaagacttggttaggaagtggtggacttgctacaattttagcggatcctatagtcacattcttgcttgtaagttaaaggctttgaagcaggatctgaaagtgtggaatatagaggtgtttggaaatgtctctttaaataaaaacatcgctcttagtcagattggtttctgggacgccaaggaaagagactgtggtctctctttagaggattgtgaggccagaagacgggcagtggaggagttcagcaagtgggcagtcttggaagagatctcttggaggtaaaagtcaagagaattgtgattgaaagaaggtgataaaaattcaaagttttttcacaagatgactaatgctcgaagaaggaagaattttctatcttctattacagtggatggtaggaagttgactaaggagactgagataaagaagggggtggttaatgcgttccagaatattttgttagaaaaaggggattggagaccaagtattttggggctgcctttttcttccttggatagtgttgaggcggggctccttgaggaggccttttctgtggaataggtccaaattgcagtctttggtttgaatggggataaagcccctggatcggatgggtttacattgactttttggcaattttgttgggacatagtcaaacacgaagtaatgggcttttttgctcaatttcacagttctggccgtttgagagaagcttaaattccacctttattgttctcattcctaagaaagggggtacgtataatttgaaggattttcgtcctataagcctagtagggagtttttacaagattctagttaaagttctggctaatagattgaagagagtggtgggaaatgtgatttcgaactcccaacatgcctttgtggaagacaggcaaattttggatgctgtccttatagcaaatgaggccttagattcaagactaaaaagtgcaaagggtggtattatttgcaagatggattttgaaaaagtgtatgatcatgtgaattgaggttttttattagcaatcttggataagatggggtttgggactaaatgggtgaattggatgaggtggtgtatttcttcaacctatttctcaatcttgtttaatggttctcctgtaggctttttccaaagttctagaggcctaagacagggagatcctctttctcctttccttttcattttagcaatggaggcgttgtcttctatattgaagagggctttacaaggaggctttcttgagggtttcatggttggtgggagagggggtgagggtgtggttgtttctcatcttttatttgctaatgacacactagttttttgtgatgcaagcaaggagcatgtggaggtcttaagttcggcttttatgtggtttgaagcgattttcgggctaaaaatcaatcttcacaaaagcgagctaattccagtgggggtggttcctaattttgaggacttggctagggtgttgggctgcaaagtgggttctcttccctttgttatttgggtctgcctttggaagttgctttcaaatcatcttgggtttgggatgtagtggaggagagatttcaaaaacggctcgctttgtggaagagacagtatttgtccaaaggaggaaggttgacttgggtaaagagcactctttctagcctcccaatttactttatgttgttatttatcattcctcacaaggtgagcctaagattggaaaagattcaaagagacttcctttggggggggaggagcttctcaaagtaagccgcatttggtgaattggtctattgtttgcatggagaaaaaggatgggggcttaggtatcagaaacctttctaggctgaatagggctcttcttggaaaatggtgttggagatttgcttcggagcaagattctttatagaaacaagtgattgtaaggaaatttggagaggaagaaggacgttggtgttctggcgcttcaagggagagtcatggagtggggctttggaaggcgatgaggaacgggtggatggagtttagcaaaagggtggcttttaaggtgggggatggtagaagagtgcggttttggaaggataggtgatgtggagaggattctttggaagaggcttttccaagtttgtactctcttgcctcctccagggatgcttgggtagctcagttatgggatcagtccaggaatttgggtcattggaaccctttattcacaagacttaacaatgatagggagatggaagaggtggaaacttcttttagtaggttacatgatcatgcgcttagaaagggtgatgagaatgtcatgttttggagggtttcaaagaaaggtttctttacagttaagtctttcttctcatccctagttccatgcatcggtagagagttcccttcaagcttagtttggaatccttgggttccaaagagagtcaacttttttgctttggaggctatttggggaagaattctaactatggatcaactaaaaaggaggggttgggtcttaccaagtaggtgctatttgtgtaaagcggatgaagaatcaacaaatcatgtgcttattcattgtcccaaggcagctatgatttgacaccttatttttgctctttttggtgttcattgggttttgcccaattctatcaaggaaaccattcttggttggaatgaaaccttcgtaggaaagaaaagaaaaaaggcatggaatgcagcccctttatgtttattctagactttatggaaggaaagaaatagaagaatatttgaagagactgaattagcggatcaagctattttacggtcttttttgtacatgttttcggattgggttagggtgcatgtagattgtacttcatggtccattttcgatttcattgattggttgggttgtaagtaagggattttttgtttttttcttctccctttggccttgttgccttgtatacttcgtgtatactttcaggtgtacttcaggctttcttaatacaattgcttttacttaaaaaaaaaaaaaaaaacgtattaggaaggaaaactctattaaagtagtttatttgtattcgtgttaatatttgttttttccactttttgttgtgaagctactcatgtagaaaggaggtaaaaagggttagatgatttaatcacaagtaatgaccgtgattaaaaaggaaaatgaagcctactgttgttagctcgtgattacattattctatcgatttcatatcgattacattaaactaaagaacttctggtattttttagaacttccttctataaatggatatgcctttcatagtgctagtgaattgacagtccagatttttattatccattgtaagagaagtcacagagcaaataattaaaacaggttgcagaatttgcaggatagtttagccttcttgttccagaaataaagattaaattggtgctaaataaaattagaactgcatcctgtatttctgtgctaattaagagaaaaccatccacaaacaacatcataccttgtggattcctgttgccagctcttttaaaatagcataagttgaggccgaaggataaaggtagcccaagacattctgtagaaccctcgtatttctttgaagtgcaaagcaaccttgatggatcaatgggaaaggatggagacttctttgggatttactatttatttggaactgtgaatcaagtgggagaaacaaaatactatggtagagtactatgagagagttttttatggattgaaaccaggaatcagtcatccaaataggagcctcaggatggttcttcatggtcttaaggggaaaacttgtgttccctgaaagatctggagcatcaggaagccaacaatagtttgaaaagcttgattttgctgaaataaactgtttttattgagaaatcaatgtgtagccgatgtcttaacaaactaggtcatggtagagaaggtggtggttggatatagcggttggagaagactaaagagaaccgacaaaaaagccttaatcccaagtatgtgggatttgctaagtttgcctaaggttttctttttgtttaagggtaagaaaaaaagcctgatagctgtaaacaatgaaaactactccttttcttatgcaatacaacttatcagttagaaattttgagaacaacacagaaaatagataaactaggcaggaaatttgggttttattgatcacaatggtgacttccaagatgacttctccatcatgacattagtttgttcaattagttcaccttgctcctcatgactaactttgcttggcctgtagaatctgctacaattttcaccttcatctccaaatgcaaaaggtttccttctttattcatcttgctaaaactgtctgatacacaaaatgagatattgttgaagaaagcaaagacttgaaatctatgaagggatgggaagcatcactcgtatgtaatatatctgattgaatctctgtcccttacactagcaaactgttagaagtttttatccacttaagtttctactacacccatgaatttacatcttagtttctctcatcccttcaaatgggacacctttgggctatagatctgtatcctattctatgtctgaatcttggtattgaggccagccaagttggatggttggctagaatgatgaatatctataatctattgtacctgaacctggatttttaggcagtacctatgccttaaaaaggaccatcttttaatcctggcactcactctaaactgggttgatttgtacaaagtggcaaacacagaagcgagcatggttttaacattcaataacaaatcatcatattatcttgtaatttgggtcagataggttggcaacaaaacatatctgtgtggatccttcacaagatgtgtgaaatcatcatgagtgcaagactaaacctgaaaaacaaggcaaatttgaaagagaaaggagaaacatcataaagtcagaatctctaatattaagagagatgccaatatctaactgaaaatatctgttttgtgagagtaccagggagtcctggttggatgaattcagtgactcttgagaagggagtatttataggttcaattgtaattgctaacatctattgcatggtaaagagaaatttaaagttacatcgcaaaactaaaagatgggaaggactaaaagtgaaagatagtggatatgtcatggcctcttgggtatgaaaaataaaaaatccactctatgggatgaaaggaagtaaagaaaagtaataatcctagaatgaaagataatatagggccttgaggtcggttatgggagggagactaagttttggcacaatgtgtgctgtggggatgttttttgagaaatcattatcctgaacttcatgttttagctttgcacaaagatgcttgggttgtagattaatggatggaaggagaagggaaccttggtcattggttgcctggtttagaaggcgctttcagtattcagattgtcatctgtggaatcctttctgctgcttatcattgtactactaggaagaattatgaggataagttggtgaagaggacagccaagaagggtattttccttatgaagtcctttatctgttgctatgctcaggcactccatttctttcccctctaaagaagttttgagtttcagttgctccttctgaagcatgcttctttgtgcatgaggcttagcaggaaaagattcttactattgacccccttatgactaagggttggtctctattgaacagatgtcgtatgttaaaaaggtggaaacaaccattcacatcctcgttcattgtgagtgtgggagttgactggcctgtattttctttcattttaatctgaggtggctttttcctaaagctgtcgatgagctattgcccaggtggcaaggtagatttgtgggaaggagatgcaaataaatgtgggaactggctccttcatgattattttggtgtttttggaaaaagaggaatagaaagacctttgaaagtgtagagcagtcagaattggcattcaatgacagcttcctcagaagtttccttctggtgaagggagatgtgaaggagtggtctcactcttttcttttgggtataggataggctgcattatgacctttttttccccctttctgtgctacctgtggtgcactttgtatatcaactctgtgcgtgcccccttttttgttagttgttcttctataacattctatttgcctatacaaaatgaaataaaataaaaatgaactaatggtgtttgtatactgtgtcattatatctaataatatgtaaaagcttgtaaagaatgtaaatgaacaactacttcaacagtaaaccaaaaaaggcatttcgataatttttcttgcttgtatttatatccaggtc

SEQ ID NO: 13251 - DNA, 1392 bp, Vitis vinifera
  Intron number 6 from transcript GSVIVT01029452001 (locus G SVIVG01029452001) derived from phytozome v7.0 (chr-ID chr9 ; pos 22708619 to 22710010)
aaagcatccgtatgtaatcttaactctttcataaattattcttgacaatatagaaagtttatattgtcctggataaacttttgatgaaaattatagttagattcgagcctatataatatctccaaaaacgagaaagtgaagttcagcatgctattgcaattattggttgttattattattattattattatggtttgtttctgtttttcttatttatcactgttaccatcttcttgtgcttataatcatttacttcgtattccttttctagttctctaattaactcaacccaataaagccttaatatgacttcgttggattgacatatctaacgatcctcattttttttgagttcttattgttaagagcatgatatgtatattgaacccaaatcatataaacttaagcttttaggaaaattggtagttcaacatgttattagagcctgatttggcaagaggtcttgtgttggagtcacctctttgcaatttgcatatttatttccacattttcatgtttgtaaatccaaaaagggctatttgcatttgtttctctctctctctctctctctctctctctcccctgtctctctatgtctctccatgtgtgggtatggggtcgcacgtgagggagggtgttaagagcatgatatgcacatagaacccaaatcctacaagcttatgcttttaggaagattggtagttcaatacttatgatttgcaagataattttgccttttcccttcatgtagctgttatgcattttaagatgatctcatagccttagctctaccaaacatttggatatcaacccaaaaaaaattctgtgcttttataactaatttactcaaaaggtttatacatacaaagattgaattattgcatagttgaaaattttttggagcaagaaatcaaaccagattctcaaagttgaactagttttcttttggcggatactaaggttatgtatcaatccccacttctaagaatttttttttttaattaaaaataggttttggggtttccagaaaaaagacaagactgatcatttaattcttttgctacttctattttgtagttggaatcttttaatatttgttcttccatcctagttctatctttatataaatgggagaatgggcgaaacagacatcaatgttgcttatcagccattcatcgtgcatatgcttttattttgcttgttgtatagacttagtatatgtgaaacttcggatgtgtagctaaatgttctatgttgtagtacagagcatgttgcttggataatgatggatagcaccatctttttttgaagttataaactatgtgccacagtgaatttaattgctcttacactgcagaaatcatcatcattgaggtgtttaaagcattccat

SEQ ID NO: 13252 - DNA, 12810 bp, Vitis vinifera
  Intron number 2 from transcript GSVIVT01030877001 (locus G SVIVG01030877001) derived from phytozome v7.0 (chr-ID chr1 4; pos 18215694 to 18228503)
ggccctcattttgtatattacagttcatcgaacaggtgagtttatattttactttcatatttattcaactgtttcttgacttgtttgttggtaggtatttcttttcatattaatatttctcttttctttctgtctatcaatatgttcttatattacttgttgagaatgattagcaggttgatcaatttttatcttttcttatgcgtctatcttctccaaaactagaatcctcaacagtgctccttccagcacacacctatacatgctttttcacatttttttgacatgtttagttgggagttgactttaagcaaacatacatgttcttgtttcttaactttttgtatgagacaaattcttgcttctaaattttcaattcaaatttagttatgcttttgtgttcatttgtgctaagctgttctagtatcttggtatgcattgtttttcctagagacaccatggagatttcaccaataagttgatggttttgtgctatatgatcttgcaatattctttaataaatcttgttctaacagcaatagtaaagaactttatgcttggagtcaatggcaaagtggaggacactcttatgtgtattaattccaaggttcaaaagctcggtggagatcaatatgtctcggctgattcgcatccgcctcgtccaagaccaatatgataccaataagcgagttctatattttgttaaatcaccaagtggatcagccaactggaagatgaatctatagtttcgggatgattcatgacctcggaatgttgcagaggctagtgcttaagtgagtgatggtaatgatgcctgtgaaccctctctttgcctttagggatttatgctaagaatgagagaaaagaaatggagtggagaagaaagggtaagaatatggagaagattggaaagacagagaggagtagcatgccttcgggatcttctctgctactgcaacttcatccatggcaactcatgatatgggaaatgggtattcatggggtaatgggtaattgcaatttgaagggttggctgagcttaaatgagcaaatcggtagtttatgggaaccatgggaattttggtcattgggaattagggttaaattggcagtgggtatgggtatttgatagaaattttggtatctggtggaaatttgtgttttcatgaagatttgggtttttttgaaataaataaaccatggatattgatataaggaaaatataaaatcagttataggttaaaaaattggatattgaaataatataagaatttatcaattagttaatactaatgttaattaattttaaaaattataattaactaaatttagtatagagtgattaaataaaaaaataattttagataatattatgaactaatccaaatgtctatttttatacttaaataatattacattagtaaatgttattttattattttttgatgtatgtaagtttatttatttttctgataatcttcataattattttaaaattttttgatttttaaattatgatatttttcgtattgcttgatattgatccgagacaccaagactgatacacctcaagacctcccgattcaatgattgataccacaactttgaaccatgattgatactcatttgcttgtagtcatgtgttgtaatggtttggtggattgtcatttttaacttgttagaccaaagtttgaggaatctctttatccgatcactattagagtggtctcaacagtttttggagttagacagtccctctttactgaattttttggatgctcttcattgtggatagccttctctctctctaggtcttttttttttctttttctttcttttctacagcctagttgggctcttgttgtatactgcttgtatacgtatggtgtttttggcgtttcttatttcaatttgcctttgtctatcaaaaaaaaaaaaaaactgcaatgagaataatgtcaactaaaaaatgttttagtgcttgcatattagacaataaagtatgaacaacatccaataagtgacaatgctttcacttagcaacaccattgtattgggaggtgtgaggacaactaatttggtgaatgatactatcatccaatgcatataaaattgaaattttttaatacattaacaaaattgaacaagagcttcattgtagaatttaggaatgataaaagtagtttatatatgatccatagttttaaaaggtgagctttaaggcctaaggcacaaccactcccttgttgtagcaccttgcttgtcaattcatgcgctttgttgaagaggcacaccttgtctattttacttttcctttttaaacacttttattcttgaaatttctagttgtatattagaatttatataatttcattacttttttgttgaatacttctttcaaatgtttgaattctttaatgttttattggttgaattagattttgaatcatactttataagatgaatatgaatcttaggttatgttttacttcattcaggcgcacactttgagttgcgtcttgggcctaagctgtaggaaacttttgagccttagttgcaccttgcaccctttaagactatgatatgatcatcaacaaatagaacaatataaagaaatccattcaaacttgtaatttgagaaggatcccaaatatcaatttgggttacattaaaggactgaaattgatgactatgactgtgacttggaaaggagcttcattgattcatgcctaattgacaattttcacattcaaaacaggatatacactcaacataggtttaattaaatgcaactttgccaaagatagatgacctaaatggaaatcccactaaagagatgagactggcacttgataaaagaaggtttaccaaagttcatctttctcttgccctgaaccaatcattctctgtactgaggtcttgaacaatttatgaagtgggagtcaaagttacggaacaatttaagacttcagtaagtttacttacagaaagcaaattgaataaaaagttttgaacatagagactagaaggtaataacaacttagtgcagtgtaggacacctggttcaagaatagacctacaagagtcatcaactaaaacaatacaatgtttcataggttttagataagaaaggataaaataatttatcaaatatgttggaattagctctagagtcaatgcctagcatggagaggataggctacaatgtaggaatacttgaattggctaaaataatagtctaagatgatggaaaagcaacttgtaatgtctagatgagcttgttaagttgagtggtgcatctatcaggagaattgaagtcaagaattgcatatccaggtgcatttgaaggttgtggtgcttgtgtagtgccatcagtgatttgatgcatgcaatctgatgtactatattttacctaacagtaaggatccctatgattggtgctaatagtctgataacacttcctatcaacatgtccaccggtacaaccaaccccacgagaactatcatggaagcccacaaccaccatgaccatcaaggaccattatgacctttagtgttggagatcaaggcaaaagattttagaggagccacagcagagccttctgctaatgagggcctcaataattgtgaatatgcaaaaatggtatggttttgctgacaagagaatgatctttaaaaccataaagatttgagtgtaagccagataactatgaagcagtcataaactcctcccaatgatacttccattgtgctaggtcagcaatgaaagacagacattgcaatacttgatcacacaagtttttaagaatgctatagtatttggagaatggttttcccaactgcttaatggagaagattttcttaggcaactaattattctttgaaacagtattctgttgcaaaaacaactcaacaagtgaatccaaatcttcttatgccttagccattccatgacaatggagttgttatgcaatcttcagtccctatcctttatatttgaaggaggattttttgtctaagtatttcaagttcttgtgcctatgtagaaagttctggaagcatggccatatgcaaggtaattaacccatttaaaaattttcgatacagttttttgacaatcggtatctcattgtccttgaggcttgtaatttatcatacaccttgagaaatctggaaactgcatttgcaagaaaagaataagcttgaatcttgagaaccaatggctccaaagcttcaacacttgaatcacccttgaaaattttcaaaaatcaaataaatgatcttcaaaacatcaaaatcaacctgtctgaatttcacataacacaaaaaatcatagcatgccttcttgtaaatagaaaaatgaatctgtccaaactttcagtaacaaatgtacctccaaaaacaagctgtcaaatccatccaaagccataaaaacactttcagattcaacaaattagcaaatcagacaatacttaaatcatttcctagcttgggtgcaccatatagtgacaatctaagctaacaagaaccacaaaacagccccaaattccagagagaaaccatgaggactgaaattcttaagatcatagaaaagatagaaaatttcaatcaaatggccacaagtaaattggaaagtaacaccataattattagaaaaatcaatttgtgcaaccatagaaattacctaattctgggatttttttttaaaaaaaaaaatttattttacttttattttggggtgatctatctaatgttcaataaactctaggattgatcaatattttaatgtaaagttaaaagtaaacttgtgagattagggttaaggtttggaaaaagaagaagaaaagggaaaaagaaagtgtagaaaggtttgggtttgtctaagttgactttcttttgccttgtaacatatttatattattaaataacaatgttttttaaaggctaaaggccttcttgaggtgttttgcccaaatgaggcgaggtgtaagccttgaggcaaaaagaggcataagcctcaacttaaacaaataaataacaaaatattatcaaaaggtcataaaaatactcataaagtcataagaaaattgaataataaataaggcataaactttggagtgataaaatcaattatttgttatcgttaatagattctaattactttttttttctttgttttaaaattttgctctctgtcatgattttatcaaataattttcaacattactatcactgtaactagtaggatcctccaaggaatataataatatccaatgtctacattatcctcccaattagtgttaatatccaccaattcttcttcttgattcatcaattccagtggtactttttcttatctatcaataataagataatgattacatataaaatcagccaataagaagacaaacgattccctaatcctaccttttcaatcactttttcccctttcattaaagattaattagaagaaaactatgctctcatttcctaaaaggttcaactaagttgggacccaatacataactcatgaaatttatatcaaaagcccacaaaagcatagattctaataaaatccaagatataccaaatgcttataaaggtcgaagaccctttatcaccataactggtaggatcttcaggggaatataataatatctaatgtctacattatcccccctattagtgttaatatccaccaattcttcttcttgatccatcaattccagtggtactttttcttatctatcaatgataagataatgattacatatgaaatcaaccactaagacaactaacaattcccctatccttccttttcaatcactttttccccttccattaaagattaaatagaagtcaactatgccctgatttcctaaaaggttcaactaagtcgggacccaatacataactcatgaaatttatatcaaaagcccacaaaatcatagattttaataaaatccaatatataccaaatgctcataaaggtcgaagaccctttggatatttgagacttaggcctcaatagccttgaagctataacctcaaagctataagccttgatagggtgagacgtaagcctcaattaccctaactgaggctataacctcaaggcataagcctcaatagccttttaaaacattgttaaataagattagaaaaaaaaaaaaacctaagtaaccaatacataaaaactaatgtataaatctaaacattagtatagcgttagccctaacatatgtaagttgtgtatggaacaaggagaatcagcagatcatctcttccttcattgctcagttacgttggggttgtggcacagactttttcagctagccaagatggattgggttcctccgaaaagcatttcagacatgatgttcatcaattacaaaggttttggcaagtccaagagaggggtaattctatggcaaaacgcaagtatagcgttaatctgggttgtgtggcgtgaaagaaacgctaggatatttgaggataaggctaggaatgcagggaatctttgggattccatccatttccttgcgtctctttgggcgttttgttcagcgggttttaagggcaccccccttaacgtactacaacttgattggttatcagtgtgtagttcaaatagttctattgggacggtctagtgctttgttattttttcttgttgtctagtttccatttggagggaggatttctcatcctccttttgtacttcttttctatcaatatattctagtgtggtttcctatcaaaaaaaaaaaatgtataaatctaaacaaaacataacaaattatagtagactcttgacaacattttcactacttaatgagattggaaggccatgtctctaaatgaaaatttgggttgtaacaatcaaatgctttgattggtaaactttatgatgtgcaaagctttatgatatttgaaatgtgcactttctttttcttaaattttttaagacatttatcccaattattgacaaagcaatcccgattgatacccattatcctacaacacttaaatactaatgagggttgaacttgagatccgttgagctataccttagggggcttgattaatgggcacgcttatttgcttttcccgattattgaattactaaaacattatcacaatttggattcttcatttcttgttggtttgcaacattttaatgattttttttttttttttttacacctttcatggtaagaaaaaaaaatttcaaattcaaagatccacatggatttgaacctaaacccactataaggaaacaaattaagtggataaacattcggggagtcatgaaactatttcattaactcttctctttgttatttcctttatggatggttattttcttcttatcatcaatattagactctataaatctatgtgttttaaaaggctattgaggcttaccttatgatgaggctatgcaaattctgttttgttattccgttatatatataatcttcttgttgcttattaaaaaataaataaataaaataaaaatggtgaggctatgcaaattagctttgaggatatagcctcatccaattgaggtttaaggctcaagtattcaaagggttttaatacatatagggatttttatacatattttataagatgtttaagccttaatattcaatggttttaaggaattgtgcttttgtgaggtttggtatagatttttaagttttgtcttgagttcaaggctagggttagagtgtgtatatatgatcatttgatgaccatgataggattttgtacttgccttctagtgcgtattctatacattgtgtgtgcctttttcttaagtgttgttaatataaatatatatatatatatatatatatatatatatatatatgtatgtatgtatgtatagggttaaaccttttataaagtgaggacttggttagctaccaattaatcctttaaatggagagggaatgaagagattgggatgatgaaataagggagttgttttttatttatttatttatcagaaacgaagaaatacgtaataatagtagtaaatatacaaaagaagcctctatagtagtaagaaaaggatgagaggtccttccttcaaaacacagaatctgatcaaagaagaatgcacccttctacagaaaacaatatacaaagaaatcctcaactatctcaaacttttgaatcacaaactacagtccaattgagttgtaaaacactaagaggaactcctctaaaagctgcagtgcaagaggcctaaagagaggaatagaatagaagtaaatcccataacattccttccgatcttcctttatcctaaaaaatcttagcatttttctcttgccacacaatccgcaacaaagtaaggcaagtggttcgccaaagtgtcttgcctctaagtgaattccccaaacatctaaatgcaataatcatcatgtcctcaatactccttggtggaacccaatccaaccctactagattgaagagtttgtgccaaggcctaatagttaaagggcaatgaagaaaaaggcggtcaatcaattccccatttcctttgcatagaatgcaccattgagaacaaagggatttgtaaggtcttctcaactgcagcttgtcattggtgtttagcttcccatgtactactaaccaagcaagggccttaacctttgaaggggcttttgatttccatagaaacttggctagaaagagcaagacaggatttcagaaatttaactaggccaaaaaaaaaaaagatttaacagtaaacaagcctaatgacgacaaagaccaaactcttgaatttgccatagaaggagaaaaatgcactgaactaagggaggacatgagtttctgaaggtgttcaatttctgtatcagtgagattacaacgaaaattaaaattccaagaaagtggataggaattaccaaggacaattgagacggtgaggtttttcataaaaataactctataaagaacatggagttgaaaacataaaggttgagtaccccaccatagatcttctcaaaaagggattctctccccattcctcaccactagacagataaatggggagaaatcttggaaaacttgagcaatggccttttaaggacatctgtgtgaccatctaaccaccatgttggcatcccatccattatgatgtgtcccataaatacttgcaataaccttatgccaaggaccacttatttccctagggaaccttcaaagccatttccctaagagagcaacatttctcaaggaagtcttcccaaaacctaaacctcccaactcatttagcttacaaacaacatcccacctgataagatgatcttttttcctttcccccaccctagactaaaggaaatccctttgcagcttctctatttttgaggctattgatattgggattttgaaaagagagaggaagtagcttgggatgtgagacagacttgattgaattaaagtaatcctcccccctaaagacaaaaaagcctttttccacccatccaaccttcttgatattttctcaaccactggatcctaaaagcctattgactttgggttccttcctaatggaagacctagataagacaaatgccactttgacactctgcaatcaaggatcaaagccaaactagacaaccactcttggcttgtattaatacctgatagggtgctttttttttttaaattgattttcaattctgatacttgcttgaaaaccaaaaggattagcttgaggttttgaaggtgttccggagaggctttagagaaaaaaatggtgtcatcttcaaactgtagtaaagacactttagttccatccctacccacagtgaaaccctaaattaacctagtttcctttgctctaatcatcatcctacttagaacatttgctactaaggtaaaaagaaagggaagaaaggaggtctccttgtctcaaagccttaacccaaccctttgcatttccattaactaggattgcaaaacttgttgaagacaaacatcctctcatccaaaatctccattttgggttaaaccccttcctttctagcacatggtccaaaaagccccaatccacatgatcataggccttctcaaaatcaattttgaagaccaccccttcctctcctgaactctttttctcatccaccacttcattggctatcaacacaacatccaaaatttgtctcccttcaacaaaggtttctttgagagctaaagattgtttcatggaggactcggcgtaaacgccatgataagaccttagcaattatcttatataagcttgtaatctggctaataggtctaaaatctgatattttaaaggtttgacttttcttgggcaccagagcaatgaaagtagcatttgtactttgatttattatcccattagtgtggaactctagaaacaccctcataaggtcctctttgattacatcctaacactcttgatacactgcaatagtaaacccatcgggaccaggggcctttttcttattcagttggaaaactgcaaagcgtacctcctcctcaaaaaagggtttgtctagccaagatgcactctctctagaaatagggacccaatctaaaccttcaaccctccaagaagcacctgcggatttggactagagcttcctaaagaaatttacaatctcccttgaaataatttcaatgttgcttagagtcactccctccttagaaaccaaagacttaatgaacttcttgtttcgccttccattggccactctatgaaagaacttagagttgcaatccccttcttttatccacttgatcctagatttttgcctccagtaaacctcttcctttaacaacaattcctctagctcctttctttttaaagtcctttctaataacaaatcatgattcaagttcccttcttgttcaaaaagatcaattctacctaagtctgaaagaatggaatttttcctctctcttgaatctccaaaggccactttattccaatcttttaactttgatttaacaaactttactttcctcatgaacttatgaccttcccaaccttcaactgaacactcttgctaccaagcactaaaattttccttaaaactcaagatggagcaactgcatattctcaaacctgaaaggagttgggccccactttaaaggattagttccaaacaaattgggttgtgatctgaggtccatctaagaagcgcctcttgaagactttgagagaaaaaaatggtcccattcagatgagaacaagaatctatccagcctcttgcaaataggaacatcttgcatgtttgactaagtaaaagccgcgttcctaagagggggatcaaacaaaccactctcccttataaaatcgtcaaaacacccatgttcaatgttaacctagaagcacccaatttttcaaagatcctccctcctacacaccatattgggaaggttagaccatataggtcttgtagttccatccagaaatccctcctccacaaaggcttatttggaccatacactgaagttaaccaaaaggaactttcttcaccagaattcaacttcacagttacagagaaagaccctaacaccatctctgtacacttgaacttatttgaatcctgcaggatcacaataccccccaaagccccacaagcaagaagaaaaacccactctttgcttcttcctttccaaacactacccacaagcctcctatcctaaatttctctctttgtttcctaaaacatcacaatatctggattttgagaacttaaaaactttctgacaatcctcattttctttttggagcccaaccctcttgtattccaactaatgatcttcatgtaaatagaaaagggcctagcaaaaaccacaacagacctaagcctcccccttggattccacaaacagtctttctcttccttttgaaatagaccttttctgtagaaagagtactcttactctccaccaccacaccttaactttctttgacaattctaatcctcaaactctccaacaccgattgaacctttaccatcttcctgggcgtgagaccctcaatttgaaagccttccaatgggatagtgggaggttctggagctggggagttgttggccattgtaatggttgaacttatatctaattaattttacaacattgaaaaataaaggaagaaagaccactattatttttattatgtttatcatgtttatgttgattattattattattattattattattgttattatgtttatgcttaattttattgtgtttattattattgtttttgttgttattattattattatgtttatatttatatttgttatgttcagcagaaataggcccaaaaggaaggaaagaaatatgaatctaccagtttagagggttcagaaagaatctttcaaagaacaaaacatttattagcttcaaactgaaatatttgaagtgaagaaagaaaccaaagaattaaaaagtgtgatggtgtcgttgaaagaaaaggttatataaccttgagataggagagccaaaagaaccctatgtaaaaaaagatacataaatccccatattagcatctccaataaaatgttttatgatggaataaatcagaatatttattgtaccttcctcaatttgaggattttgctctatttgaccattcatatctgccataagggaaccaaataaacatatgaatatttggggaggtgtggaagtatttcagtaattcttcgctttgttgtttccttaaatgggtgttattctttttcttcttcttatcaccagtaatagactctgtaaattatttctttttcacacacagag

SEQ ID NO: 13253 - DNA, 5875 bp, Vitis vinifera
  Intron number 1 from transcript GSVIVT01037394001 (locus G SVIVG01037394001) derived from phytozome v7.0 (chr-ID chr6 ; pos 14423743 to 14429617 reverse strand)
aggaagaagctcgacacacgattccctgccgtaagtctccttttgttttttgtttttttaatttatttatttatttaatgtcttcaaaatttcaattttggcgtgatagtttgactgcatgttgttgatggtggtgactgtaatttttttctttttattttttctttttgttatgagaattttgtcaattagttcattgtttttgtgtttatctgcttaggtttctggatgggagtgtattttttttcctatgtagtgtctttttccttttccatgtcatgtttgtggttagggttttaggtttatcctagtgtggttctgatggttgtgttgagcttatgtctatttttgaagttgtagtggattcctttggtatatttgagttgttttgtatggacaacaataatagggtgtgatagttttctatttttattgaattggagtttctttgagttatagagtagcaacttagggtgtgcttggtaggtgggaataggaaggaaatcacaatacaatgcagaagagaggaatcaaaatcctaatgagagtaggatttagtttccataacgatgaattagttattcttattcccattctcaaacacaatccaaacacattgatgaataggagatggaattcatttctccattcccattctctattccagcattccaaacatggccttagtgcgtgattgtttggtttcatcctgtgagcttttaagattattggtcgggcatagggaggttccaggtttgattccttctaaaaccagacattaactttgaagaaaccgtgtatgtatatatatatatatatatatacatatattgagtttgaacttcttgaggatttgattttgaatttggtaagttgttcatgtaaagtaattggctatggattttaatcaggtggtattgaaaatagatgctgatggatacactttgcaattgcaatttctggatagactgctaaaatgtatctcaggattgcaagttctggtcaacattttccttgaataaatattcaaatttttataatgttaattcccattcaaataattctgcacattgaccttatactttagtgattctttaactagaatcggcaaaggaacttatacactagaatcagaataggtgaggctagggaccctaaatgagaaggttaacaccttggagttggtaatatcactgtttatatatcctgtccatgaaattaatctgacttttgaaatatcctttatgcagtttacccgttcccaattgaaatagaagcaatgattatatagcattgctatgattttcacatttccaatttacactccttacagaaaaaataaaaggcatagaaaggggtttgacaagctttctttgtcttgtcaagtggaatttatttaaaaatgatgtctcatgcagcatatgtgttgaatctgttttctctgcttttgctcaaagctaataagcctaaagaaacaagaaacaacgactaagagggtctcttcttgattggaagcaacatggaaagcacccgaagaaaacttatgaaagaacaaggaaaatatctgataaaaataattttagtacttttagtatttcatacttttaatgctagtttttttttccttaaaaaaaaaaatagaaatggttttagtagtttatcttttagtcaaatttatttattttttggtttcaaatttgattggaaaatgagtgatattacttctaggaaaatagagccttaagtggtgttggtttttgtcttaaatctaaatagacattacttttactgaagtctaaatagcacttaatagttttaagtattaacttgcttgcttttcttgttttctttaagtctttaagaaacttgctctaagacttaagtcatttttaaaattatttattttttaatttgtcactttttctaagacaatttcttataatgaaaaaagtaatttatttaattttacttttatcttaaagcaacttgctttaagacttacatttaaaaaacaaactccttagtcttattaggaaaaggaggttgatgcagctataaaaatctatgtggttttctattttattgaatagaaatgattgaaaattgagtagttatctagcttcttggggcatgattgtcttccctaagtgagattgttagaaaacttttgtgtgattgccaatgatctatcttcttcttcttctttttgtcttttttcttctctgatttctcatcttattattcaataaaggaaaatcttctgtagtactagaattttgaaggtcctacatcatttgattttttagatgacagttgtaagtggaatatggaacaacaatccatgctttcgcattagtatactaatatgcaatattaagtagggtaggatttgatctattggaataaacacaacctaagttgaggagcaaacattgaacacaattctcccttgtcacccattggcattaatgttctgtgcactttcaaggagttcttgatgttaaccacccttacatgtttaaaaatggttgcaatcaaggtggagttcatatcaaactggtcttttgcaaggaaagttttttcattactattacaaatttgttaaggatgttatgtttgtcctttaatgtctcttttagagagggatcaataatattctttgcattggtcgcaaagatgtgcttgagactttggtgtgcttcttttggtgcttttataaatttcatttcattttcctattaaaaaaagagaaaaaaagtgcttgagacttgagaagattcaaagagattttctttggggaggaggagtctgtgagaaaaatcctcatttggttaaataatcgattgcatgtatgaacaacaagtaaggtgttacgggcattagagatttagctattctaaacaaggtgttgcttgggcatagttttaaaatgcacaacacttcagagagggagctcctatggcaccaggtcattatgggaagtatggggaagcaaaggggggtttgctcttgtgaggtaagggatggatacaatgttaggggtatggaaggaaataaggagaggatgggaggattttaaaagaagaacttgttttgaggtgggatatagaaggagtgtagttttggaagaacatttggtgcaaagatacaaaattgagcatgtctttccttgcattgttcattgtagccactcataggatgtatggattgtggatatgtgggaggagataggggaaggggggcaatggagtttatttttctcaagctagtttaatgattgggagctagaaagtgttagaggcctttctagcaaagatgcaaaagtattcaataaagaggggcatggaagatagattgttatagaaggaatcaaagggtggattgctctcgctcaaagtcttctactcttggttggagtcaaaaagagagaaattttctagtaaaagtattgtggaacctatgggtgccaacaaaagtaggattctttacttggtaagctacttgggagagaattttgattctaaattagctaaaaaagaagggatggactttagcaaatagatgtaacctttgtaacattgatgaggaattaacctatcatgtcctttagtttgctaaagtgagaatattatggcatttatttttctaattgtttaaagttgggtgggtattgccttctatggttgaagaaatgttatcaagttggcaagggacctttgggggaagaagtccacgaaggtgtggagggccgcccttttgtgcttattttggatcatttggaaggattggaatcatagagcttttctccataaagaacattcagatcaagctctcaaaaactatttcctatgctctctctagcttgggactagaaagtctttagatggagctcctacttataattttttattttgttgattggttgggctccttttgaggtgaaagaggtgtttttcattaatctccctactttgttgcctttttggcactggtgtataccccttgagtactttgttgaattctatttcaattagaggactgtctataatattcttacttgcctattaaaatatatattttttgcaatggtccttgatcctcattcacatcaggggtagaatgagatgaacaacctgcaccattgtaactcatgtcttggtttaatggtttttttgtagatgtatgtcaattattttcccattgaatattcttatttacattttatgctggtcagcatgctttaggcgtgagattcaccctcatatgtacttgtttgcactttgataaataatcttatatttattcttcaccttctaactagatggtgtttgatttccttttccatcttagaaatgcacttaaatttggatgtagtatcatctatagaagtttcatctttcttgattgagtaattgatgttcattaaatacctcctttaattacatttatcaataatctcctaagacacaagtttctctaaatctaattatattataaagtgttgcttacacctttttaatcaattcaatgtaatggacaacatatttagagaataatacttgttatgtgtttagtttctcaagtattaaatacttcttacatacacattcgtacatgtcctgaattctgccacacacacacacacatttgtacatgtcctgaattctgcattgtatatatagatacagatacacacacacacacatacatataaacaggcatacatagataaattactattttccttcagtatcacttggttttgaaaagagttttaattgaaattgaagattgcagtagagatctattatcatctgattttaaatagaaatatgaaatttatttggtttgaatttctttgaaatcagagatttgttctcatttgattttaaatggaattctgtaatgcgttttgtttggatttctccttatttactctctatgtctctcatatcccttttgattctttgtcttaattcaatattgcatagaatttggcagacaaaagaatttttgcacttaaattgtgttacttggaatttactattgcatattgacatgggttaagtgcggtggttccaaaataaatgcagatttccctaggttttagactctttccacagaaactaagtaagatcataggaatgtcaattaatgttaagtgattaatgaaataaaaacttagcatttaattggagggacggagggagggagagagggtggaattatttctgcagagaaattgaacccctttatcttggcaagggaattgagagatggatgacccaagttttaatcatgtagactttataggtgagacctaccactttctgggtgacgatatctgctttaattgatcatcgtgtacagcacacaaagacataagatgataagtgaaagcacacactgattttttcacattcagtttgcagcatatgacaagggcattgaaccctttaaccacatttttatgttctttgtggttgcacatgggtaatgcactagatatttgctttggcagaagaagaacgaattccatgaaccatgcatcttgggatgcaggttatgaaaaagaattttgggggtggaggcccctgtggcctgccttgggtggtaaaggtgttgggttgaggcagaacaagcccttttaataacagatttgttgtgttcctgttcaatggcataaaagtgcgagtaaactagttcaaagtcaggattctacaaatatgattctgcttatttaaaaaatgtgcgagctattcatctttccatggtcatacttctgttttgaaatgttatgagcgtcttttcagtgtaaatattccatgtttactgattcaaaatgtatgtttggcagtcccgtattaagaagata

SEQ ID NO: 13254 - DNA, 1568 bp, Vitis vinifera
  Intron number 1 from transcript GSVIVT01011971001 (locus G SVIVG01011971001) derived from phytozome v7.0 (chr-ID chr1 ; pos 2508414 to 2509981)
caacaccgaggagtccagcatcggattgcgaaacggtattttcgttatttcttgcggggtttcgtaactttcgttttattttctttgatttcggtgttttttcgctgcgttttctctcaacttttcccaattggtgaattaggtgggggaaaacaaagggttttgtaattattgttgcgcttgtcttggttttaagggtttagttgtccttgaagtctcttacagatttgagtattcttgtgttgttaggtattggggttttaggggaatttatatcataagttgacattgagttgtattgatgcgtctattgcatgatagaggactcacaggaatagctttaacgtttgcatttgggttgcccaaaactgccactgactcatcggcatttagtttttgctgaatagccggagatgtgcaaccagggaaagttttggggggtggggtgtaggggaacatatcttgctgatatgcaccgtattttcaaggagtgacagaattatcttcgagattctgaaattcgaaatttagtgataagagatgttgtcattaagtctctgtgcttgtgaatccctctctaatatttcactatggtcgatttcatcgttttcaaatcctatggcttttgcttgtctgcaattctcattagttaataattatctattattatattttcactctcttattaaaatttcactatggaaccagactgctagtgactcatgttgaatgatgggcttgtggatccctctttactattgcaatatggtcaatttcatcgttgttaaatcctatggcttttgcttgtctgcaattctcattatttaataattatctattattatattttcactttcttattaaaatttcactatggaaccagactgctagtgactcatgttgaatgatgggctttctctaagaaaggtgaaattggaggatgaggtggtcgggtgattttgatgtgtgtgggttgagctttatctttttctcaagtaataatcatgtggggaatagtttgatatggttgataaccattttgtttaaaactataatttctatgtacattgtatgctgttggaaagccaatacattatgtattatgagaagaaaagtttgggatttatggttctggttttttaaacatcatatgaaagtttttttagggattttttgaaatgtgcccaaatgtaattgtgaaattgctcttagtagaagtgaaatgcaaattggggtgtatgattgtgcctgtgctagggcgtgggtgaaaaattgtgaaagaacattcacagagaagtggttgcatatgtttaactcagtgattctttgaagcttattatgcacagtcatcaattataatatttttttttgtttcatttacctatcaaaaaaaaaaaaatcatttttctgtttaaggtttctttaatctcatgtattatttcatgtttatacttactgttttgtcaagtaattgtcaacctagtgtaaaaaaaatggttccttttttctaatctatctcctgtcacatggcagtaaggtcattcggtacagaaggacgaaagaaggat

SEQ ID NO: 13255 - DNA, 8524 bp, Vitis vinifera
  Intron number 2 from transcript GSVIVT01018266001 (locus G SVIVG01018266001) derived from phytozome v7.0 (chr-ID chr1 5; pos 12267867 to 12276390)
tgggtcgttcggatcaaaaagatcgagaaacggtatgttcattttcatggtttcaatttctggcagtatgatgactttttttttttttttttttaaataatttttttattattatttagtattgttgatacgataagggggagtttggttgctgggaaaaatgagggacatgaaaagagaatgaacattttgggtcctgtgttctctctctttgttggcttgtttgttctttttttttgcgtttttgctggaatatgtggctcagctaagccaaattgttgtattggggttgattgagtaggtgtctctgatttctctgatttaaaataacgaatactttaagtttcaaaatttgatttctattcttttcacgctttttcttagcaactgatgccttcaacttaatgtcatcctccctagccttttaaccgtgatagaatttcgtagacgtttcttagtttctagtcccagggttccttttggatcttggtaagtttgaggaaagtaccaggacaagaaaagagaggggagaaatggaaggaaaataaaagataggttggaactcaattaatttttcttacatgtttctcctaatttatttctctcttttcctcttttataaaaaggatgaagaatttcaaaatatataaaattttaaataattttcattatatttaatttcctttgtactttccacgataaactaaataagagaatttggattccttcctgctattttttcctttccttactacacatgatccaaactaatgaaaatattaataggcattacttcatattttatctttcatattagttaacagtcacactagacatccatactttgctgattgaacttgttggcttgacatatttatactagatgaattgcatatcatttgttaatggatatattcttcaattggataaatggaactctttgaacattgcatttcacattgttcttactatcgcttttaccttatgataacataattcttgaaaataattaaacaaatattaccttacaaaaatggaatgggttttatccacacaaatttctatctcttgcatggaattctatcatactaacattggagtgcaatttttagagtttctgaagtagaatttgctactaatttagatgttcatgttccaaggtgaaaggacctaggaacaaagtgaaccaaggaacaaagtggagagcctatactaacattggagtgcaatttttagagtttctgaagtggaatttgctactaatttagatgttcatgttccaaggtgaaaggacctaggaacaaagtggaccaaggaacaaagagcatgctttaaaagagcaccaaagagtggggggtgccctctgtatacaggcagtgtgcacaaaatattacaggctttacaacataaaagccaaaagacatacaagaatagcctacaaaaagccaagctatccatgaggaagagcatctaagaaatccattattggaaggctctccattgccaatgaagcatgagaccactccaattgtgatttaatgaagaacttcttcaacctttaatatgagaactcttcttcattgaaattccttatgttacgctctttccacatacataaaaacaaaggggtgccatatgccaaacaattcttcccttattatccaaccttgtaaactttcacttgaggaggagatttctcattgaagttggaaacagtcattttagtccaaagactgcaaagagaaatgtccatagcacttttgtctcgtcacaatgaatcaagatatgattaattgattcttcattgtctttacaaaggctacatttgttgactattgtccacccattcttcattaaaatatccacagttaagatcttcctccaaacaactttttgtgcaaaaaaaaaaaaaaaaaaaaaaaaaaaaaaaaaagcatgtttttaagagagctcgtgattcccaaatctttttgggtgggaatactatattactctcagaacatgaggagttgcaatacaacttgtcactaaaattgccctcgtctctctaaagtaaactgctctctcctttttgcactttcataaggtaaataagatctaacaattggatcacctcctccaactccccatcttggaagggctttctaaattgaactaaccaatggcctccacctcctatcccctcccataaatctgcgactatagcattcttggaagaagctattctaatagggagaacatcttttagccaaatctcccctatccatttgtcccaccaaagctttttgggtccaccttttttatttggatagctaagctaagactgaaatcttctcatcctttttaaatgtctttccataagttcataccaaaggactccctcaccccttgggtaatctacccccctcgaattccctgaatttttcatggataatcttacttcacaaactctttgactcaaaagcaaacctctacaaccatttgcctagtaaggcttgatttaggacctccaacttcgtatttcttatgcttgcacgcattggactaactcacttggtgaatctttcttctttgaattttatctaatctgatcctcagttttctaggaatcgtaaagagggacataaaatagatagtggggcttgatacaatattctttataaggactagttttgcttctttaggtagatactgtttttcccaagatgccaatttccttttgaatctcttttcaattgcattccatacaacacaagatttatgagacgccctaaaaagtaaaccaagataagaagtagggaactttcctaccttgcagctaaaaatagaagccactctatccacttcctccacctccactgcaataatttcactttttttgcatgtttatttttcagacctgacacaatctcaaagcaagttacaatcattttcagtatctcaattgatctgaattaacatcacataagagaagtgttcgcaaacaataagtgcaagactacgaacaatgcaatccttcaaataaaatttctcgaatagatgcatcacttcccctcttattataggccaaaaaaactttaagaaaccatccggccttagtgctttatctccccccaactctgaaagtgctaatagcacatcctccttcgaaaaagggccctctaaactttctccatcctttctctattccatgtttctatgcatttgaaaagcttcactactataaagtaagagaaaatgacatccttgagctcctccttgtttccaactggataccattgattttaagactattgatgaagttgctattccactttgcattagccacgagatgaaaaaatctttcctttagctaaagagcccttgatttttgcctctaagaggcttcttttaagatgggtaagtgactaatacacatctttggctaacttttggtttcttctgtcctcgtttgagagaggtcttactctttttgtcctattcccaatagcttatcatcttcaaagcaaccttcttaactaaaacattaccgaacacctccttattccacctttaaccatatatttttgagtgtaaatgggactttgcccttcctctctcctccacattctagaaaaagtagaagagtggttagacactgaccttggcaatagatgcaatacaatgcttgagaaatgcacctctcagtctctaaaaaaaagaaagtagcttgatcgtgctttgagggagcctccttactctccacaccaagtgaaattgccaccacctagaggtaggtttgctaattgaaactcttcaataaaactagagaactccctcatagttgttgacatttgcctgcaattccttttttcaattgggaaatgtaccacattaaaatccccacatagacaccaagcctcatccaaaagccctttgattggggctagctcctcccacatctcccttctctcctttccctttactaggccataaatcttagtgaacaaccaaaggaatccatcttcacagtttctaaaacgacaagaaatagaatagaaccccgcttccatattcagacaatctagggctcttgtatcccatgataacaaaaccccttctattgttcccttaacatccatagaaacgcaacctaaattctttcccacactcaaacttctcacaatctcaataaacatctccttgatttttgtttcctgaaaatcaaccaaatctaagttcttttttctgaccaaggacttgaccaccttccttttgtttgggtcatgcacttcttacattctaggaaaaaatccttagcttcatttgaagactaatgttaagggccaacctttccctccattatcttcttctttgctcacattgccctcataattaatagagctaaataatttcttcagatttttatcttttttgaagctggactcccacccacttgcttgccttaagtggactagaggaacacttcctattctcaatatatataagaattcttatgtcttctttagaccctttcaccaatgcccccatatacttacaaaactagatgtgttctttattcatccacaaggaatgctttataactaactctcttgcatcactaaccaataccaacgaccttgcatctctcgcctctccaacttgagaggctaacaatggagggttgcttgagctttgctcccttgggagcattttattaagccttcctttcaaaggggggatttaatgtgttctagaaatacaatggactatccatccttgaaatcatgagtaaagggtccctctctccttcatgcaccataggattttcattctcgatctccctcttcttactagcaaatcccttagcctcctttatccaagaatcggaaatggagtcccccaacccaaaataagacagagaagaagccctagaacaacttgcttcagccccctcctatgaacaggagaattagagaatgagtttgtacttgttttaccccactttgatacccttttaggcttctccatagccgaaggagcatacctttccaacatttcctcatggggctcctccaaaccactcctttcacagtcaaatcacttcgggaaaaagccctagcaaataaggattgcaactttttcttgcttttcccttcacaaaagcaagagggattagatcatgcaaatgagcttccttaatttgctttaattgattgatcttgggccttttgggcttaagacttttctaggcccacaacccacttttctttgaaatatggagacaactctctcttctttaaaaccagcccaatatgatttaggcctctcattagagctagtctatctaaatttagaatattcccttctaactcatccttgaccttgttttcatctgtcacaaatgattcattgtctactaccccaaatctacccttagattccccaaaatttggcctaatagatattcacagcttgaaaattttcctttgatagccccccatgaagcctattagcagccctaacaaagttaggggtgcaacttgggcatgttatttggacccaatttgacctttggatgtgacaatcatttttaatatttaggttgggtttaagttaagttttttaatccaaactcaatttggggtgggtttgaaccaaagttcaaatcactcgagcctaacttgaactcaatttaatatttttatatttatattatcctttataatgatatttattttatttattttctttttacattttttaaggaaaaatatcaaattataattatttttttcatttttctagaaagatatataaatttatttttacttttttatttttatcttgaaattttgtcccatttacataataacttttagaaaattttgtagaaaaaaggtttttaaaaaacattgtagatagattttgaatcatacaaaccatctaatttgattaactcaagcctaatccgatcaacctgatcttgatctaagtttagaaaaataaggttgaattgattgtttcttaatttggattagattgcggtaagccatcaacctaacccaacctaccgaagttgcagccctaaaccaagcccttagaagatgagatgaggctgcctttttgcttattttttgcaccatttcttcatggaagcatgatgggtccaatcactcagcacagtcttgtgcgactgtcaacaccacgcatccaaatccccccttcctctatcaccctcatctatgcattccaaggcacgtgaatttgccatcatttcttcttcttgcatggggcttcctttgttttcctacaagtcttctactggggttctaactacagcagcaacttcttgagccaaatagtataccgaattttccctctataccagcatgacatgttcactaagaagtaatggcaacaggggatctctttctaaacatgtccactaagttcatgtctaaagtaagggcttgatggaaacccttggtttaagcttattatggttggaagttcacttgtttgtttttttatctttcctatactaactagttaaacccaaaacctgatgttttcttgatcctgcgagcatatccaattattcccatttttctttctaaaatctactactctctctctgataaatgatagccttctctcatgcctcttcttgtgctgtaaatactgtaaatgctgtgtaatttttttattactctgtaaaccttcccaccaattgcttaattatgaaaaatagcttccatggtggatcctgccatgaaaacatagttttgttacccttgttcatgtcttagtatttgctcaagtactcttttagaaagtttatcggtatgattcttaggtttgactccacaacagtttgtgtagctctatatatcaccacctttatttggtttaggtgtccaaaagctttccctcgattttactttataattttacttgttcattaggtctaagaaagctaggaacatggccctattagttcttgtgagcatatcccttggtgaatttagattcaactggaactatgtctcagagaaatttataatatttggttgccaactgaagcaacatttgttgatttttatggagtgttctgacggatatcaacttgtaggatgtggatatttgatgtcctttgttgagtttatggtctgcttcttattcatggatcttattatatcatttgttattaaattatacatgcctttctttgcttataaaataaataaataaaataaaatagaactatattatctgtgttgctttgcttggaaattactttagtaacggtatcatatttggggaaaagatgtttgaccatccaagtcatatattttgttggtggaaaccttaattaagtttattttatttctttgttgataacatacatttgataagtgatataatgcgactggcatttgacataaattgtgaatggagatacactattctatggttttttcccttctaggtttttttgctaggttttttccctcctttgttgccttgggtttggctttctttgtatactgcctgtgtacatagggagcgccccctgttttggcatgttttaatttatttattttttctctttgtctatcaaaaaaaaaaaaaattaaattgtgaatggagatacactaatctatggtaaagtgttctgatttatttgtttatttttattttttgtatttaagaattacattagtttcaaaaaggaaaggaaaatttagtgaggactaacacgcataatagtgaataaaaaaattacagaaaaatagaatgacaaaagcaaactggtgtgattcaatattttcggcagttgcagcattttggaaatggtgcatgaagtgttgatttggcttaattgtctaaaactgtgggtgggtttttgaaaataatattcacttgattcttctcatctatttgactctggtgggttacctagcatactatttttgtgctcagtttataggatggctcttatacttgcatgaagtgttaatttggctcaattatctaaaattatggacgggtttttgagaacaatcttcatgtgattcttctcatctgtttggctctggtggatactagcagaacatttttgtgctcactttatagcttagttgttacacttgccattttatgcttaatggacattgcatacctgatatgtcagaatcaaattgctgcttgttcctgggcctaaccatgatattttttggttgtggccgcgaattcagttgtgataatttccttttatatcatttttttttcctagtggtttatctattgtgaaatggttttatcctcttttggccgttttgacggcaggtgcataggtattgtataccttgagccacttctttggtgtctttttaatagatctttaactttacctatcaaaaaaaaaaaaaaaaaaaaacaaaaaatctattgtaaaatggttttcttctgttcatgcactgtagtctgcattttttttttttttttttgaggagatttttattcatgccagcttcacgga

SEQ ID NO: 13256 - DNA, 1465 bp, Vitis vinifera
  Intron number 8 from transcript GSVIVT01024104001 (locus G SVIVG01024104001) derived from phytozome v7.0 (chr-ID chr3 ; pos 1032386 to 1033850)
tccctttatacaacttgtattctcaaccttgaaaggtaaattctgtcacttttcatctgatcttttatattacaatgacctgcctgttcataaaatgccctgccctccttcaaatggagattgttgcatctaaaattactagaaataaatgaaccagtgagaagtgttctctctctctctctctctctctctctctctctctctctatatatatatatatatatatatatatatatatatacacatgtattatacttttttgaatttgttgaaaaaatattcttaaaatgagaaaaaataaagaaaatcttaaaaagttgcaatttagtatgatatgtgcaatttaattgttctcccattaagtacttgacttttctaaattagtatgtggatcttctgacgatcttactggaccctactatggagggatttgagatattcacttttagaaatacctgtgtttttgaagcatcagttttcgtttacgatctttcctgcactttgttaccttagcaatgtcttacttgccttttggcaatccaaaatggatcattggtgtgcataagctaggatcaaccaagttgggaatcgctgtattagttaaataaggactatgcctcaaatccaattagatgagggagtgttaaccataatgagctaaaaggattttccatgagatgggaaatgaaaacttttggccctacatgaggcttggaaataagtatttttttggtaatgagcaaaattctatactgcagaaatgtctgacaccaccagcgaggagtgttgttactggcaacagtatggaaagtatgaagggatcagtggaaaactcttgtagaaattggagaaaaaataaaagaaatcttgaaagatgacaaaataatgaaagatgtggtttaagtagtggaaatttccttaaaaatcatggacaaggctcggatcattatactgatgaccaagatcttgttatgacataatatatagctagccaaccacatgcatgatatgaactctctctctctctctctctctcttcccctcttgttggagccttgtgaaagcgaataatgtgaatttttatattatagtggtttgtttttcttttggttctgaaggattctgatggagtgtacacttgctcttaaactttataacaggacgttttcattaatgatgcatggaattgtaaggaaatgaactaaaagggggagtaaattgtcagagagaagaggttaaaatagaggaaaatctgtgagatgataaaaaaagtaaagaaggttaaaatatattaatttttcttgtgaaggaataagatggaattgtttaagatattttactccttgagaaaggtgtagaacatgaattggtggcatcctgtactaatagtatggatgacttttttttttttttcttcctttgtgtttcaggtttgtggtttgcaggttaataaagtgtcattgtg

SEQ ID NO: 13257 - DNA, 1811 bp, Vitis vinifera
  Intron number 1 from transcript GSVIVT01030121001 (locus G SVIVG01030121001) derived from phytozome v7.0 (chr-ID chr1 2; pos 10034852 to 10036662)
cagggtattctttctttttccttctctttcattcgcctctcttttcccccttttagttttgatctttgatttccctttttcgtcctgcgatctgtgctttttctatgccctttcccctctatttggctgctgagaaattttaggcaatgatggtgaaaatccatgggatgtgatttgatttgcgatttttgtgtcagaaaaatcatgggtttgtgggaattgagctgggtttattattggctgttatgggttttcactgttgatgcagtttttccttctttttttttttttttttctacgaggttaagtttgtttctccaacgaagcttggatattttctcaatttggatttctttattacttttaaaatggttttcagggcatttatggtgatctttacaagatcaggactcagctctgaaacctcaaatttgtcgaggccgttgtctcagatggacatggcttctcttgtatcatatcctttttattttgtttcatttaaatttaagacatttttcgtcttgttttaaaatgtaatagcgttgaaccacagtagacgaccaacccaccggtcaaaaaatggatatacattgttgttatgctggctgatactttttgatccatctaattaaatttgtagagcaatctatccaaagtaattgctagttttttgttatctctctcctggttctcatcaacaaatcctatgcaagatttgtgcatttgacttggactttcctataaacttttgaactacaacaatgtaacttgattatgtttgcatccgaattttgttcttcaaaattttggcggtctgtggttgtcaaactatatactttcttttaccacggttacacaaatttgatgtgttcaatgctgaatctgataaatatatagggaaacaagtgcatgtcacccacttgcaaaattttaggataaaatgagaactgttgtttgtttccaaagcataatattttttttttacaggtaaatataaaagtgaattacgagaagaaggtatacacggtgtatacaaagagacccaactaccaaaaaaagcacaaagacacaattgtttccaaagcataaaatactaaaatgatgacgaattgggagtttctgaaaactgtcgtcaactgaaaacaacctaaaagggttgtgttttgaaacatgtttgtcattttcatatttaaaatgagaatggtttcagaaaacttttcattttcactaccaaatgggaccctgatattgtgactacatttgggtaaggctgtagcgtgttcattcagagaaagtgctgcttcagtggttactttaaatgctcctttgtaaacttgttagtgttaagtatgatttttcttgctttacatgtaatgacagctttgtcgatggtttaaatgattgatgcacaacttgttatgggagcttcaaagcttaatcactgttgtaggatgctaaaaggcacgttctttgcaatgtatacttttaaaatgcactatgatttagtgggttaagcatttttcttgtgtttcattcttctagccattgtttctgtttgaagcaaatagctatgtaatggtcaatctgctgctttattgagaactttttagctccagtagttattctatgtatttatttctttctctctctctctctctctctctctctatatatatatatatatatatatatatatatactcccattctctctatctctctatatatctatctatctatttgtccatccatccatccatctatttagttgaatgacaagcaagttatgctatggttttacagatcccttcc

SEQ ID NO: 13258 - DNA, 4564 bp, Vitis vinifera
  Intron number 4 from transcript GSVIVT01020870001 (locus G SVIVG01020870001) derived from phytozome v7.0 (chr-ID chr1 2; pos 761329 to 765892 reverse strand)
ataggtacattcaccctaaaatatataaatataacaaatatgtatttggattcatccatgtaaatagttagtttgtatgtattgttattttgtgattttgggatttgagttccatttttaaattggcaaatagagaattcgattaaaacttaaaagagtcccaactaagcataacaatagacaaccctatggtaagtacctatcatcaattaaaagatggaatatggtttcacctttttaggctttatagaaagaatgggggtagcaaaggaagtaaatgaagaagagtagggtggtagggcttatggtagaagtaaagagtaaatcaataaaaaaaacaaggagataaaccttagagtcttaccttaggggctccattcagagtagaggcaatgtgggatagcatggaaggaagaataggcaagagacttttgttgtggaaaagataatatattttgaaaggggaagactgaccctaattcgaagtactttatccagtttgcctatctatttcatgtgtctgtttggcatgcctagaaaggttagattgaggttggtgaagatttagagagatttcctttgggagaaggaactttcaagaaaaagatgcatttagtgaaatgttcgattgtttgcatggaggaaaagaggggtgatttggaatcaaaagcctttcttcactaaatagggtgcttatagggaattagtgttagagatacgcttttgaaggaaaaactttttgaagaaacaatggggtatggggtaggagtctggaagaacatcaagaaacgatgggagctggttggacttggttggttgcagaggatgggaggagggtgatgttttaaaaggagagatggtgtagggatgaactcttgtgtatgttcccctctttgtatgtcttatctttgtcaaaggatgcatgggtggtagatgtttgggatgatttgagtaagggggccattggaatccttgttttggtaaacatttgaatgattgggagcttaatgatgtagagactttttcctcaaggcttcaagggaagttaatgaaaagggaagcgaaggatagagtggtatggatgaataccaaggatggggccttttctattgagtctttatacttcattattaagtctacacatgcaattcctttcccaaatgctatcatttggaattattaggtcccatcaaaagtgagttttttggaacgagagagggaccttttggaatcaagtgattagagggaagtatggggaggaacgaggaggccggtgttcttgggaagtaagggatgagtatggtgtagggttgtggaaaacaattaagaatgagtgacacttggttagcaatagacttttctttgcggtgggtggtgggcgaagggtgaaattttggaaggataagaggtgtgggcctatatctttgtgtgattcatttcccactttatatgctcttgtcgtatctaagggcacttgggtgaaggatgtttggagtttctccaatggacgggaatttagagccctctcttctctagaccattcaatggttgggaggtggatgaggtgaagagtttcttgttgtgtatgaatgggaagagagtgcagagggatggggaggataggatgctttggacggagacaaagagtggcaagttctcagttaagtctctctacaaatccttagtctttagattctttcctaatgaaaatcatttggaagtctcgagtgtagtcgaaagtgagcttctttactaggaaagcaacgtcgggaaaaactcttaaccttagaccaaattcaaaaaagaggatgcccttagcgaataaatgctatctttgccaaatgcatgaataatctatagatcacatccttctccattgtgttaagataagggctttatgggagatgttctttactatttttggggtgtctggggtgctttcttcttcaattaggtcaacacacttgggttggtatgggtcatttgtgggcaaaagagaaaagaagtttgaagagcataccctttatgcattttttggatgatttggaaggcaaggagtagaattgtttttgaaaatgatgtgctttccatccaaagactaagaagttcttttgtttgttttatttggtcggagactaagttgtttataaaggatgatccttcgacactaattgatctcattgattggttgggctctcgatgagggtggggatgtttttgtacctccattttggtagtttttttttttgtttcagctgtgtgggggtgggtgtatttatcttgtataccttgagtcgctatcttgatgcctctttttaatatatttactcctctcaacttatccaaaaaaaatcaaaagggagttttttttttctttttaggaagcttgttggggtaaagtgttgatcagggattagtttcaaaagagagggtggtggtaggtgtacaaatgcatcctttgcaaaggtgaaggggaatcaatagatcacatcctccttcattgcaccgaagtaagggttctttggcatattctatttgtttgacattgtttggctcctttcttctatagtcaaggaaactcttttaagttggcatgactcctctgtggggagaaaatataagaaggtttggagagctactcccatatttctagacaatttgcaagggaaggaaccaaagggttttcgaaaggaaggtgctggcagctcaagagctaaattgcactttccttggtaatcttgtatcttgggtttgtacattggggaagccttaatgcatttaatttatttcgaagattggatgggctctagatgagagtgggagctgtgatcttcggtattctccccttgttttgtttttgccctgtggtacccatttcataggttctgtgtactgtggtgtatagcttctatcccttttgttaacgatattttctcactcacttataagagaaaaagaccttataagatactcacatggaagataaaattataaaatctcactattaaaggttgcaaagttagaaaaattattattattcattctatttccatcttgcagtattaggtttgtttttaagctttagaacaacttaaaaactcaatagaaccctaaaaatctataaagtagcctattagaacacaatcttttgttctctcatagaactcttaaacctttcatcactagaaaaagtacaggaacttctaatcgaattaaactgtaaattaaaggaaactagaaagtttagaagtataagaacttcttatactgagatattgttagcaaggaaaaacttcctgaattttatataagacttaaataacctctaacattagctttcattttaaatgatttgcaaaattatcacaatactcttgattgcttcaacttggaatttcttgttccattttcttctttctggtgaacagaccttgaggggttcatgcccgtcttggcagtgtgttgccttgcagttagaatccttcaacccttttcggggattttatgtctaccttgggttgtagcccttagtgccttcttttgtcatttcttttttctgacacgtgtatttcttttgttagattctgtattttccttgaaggacggctcattcttcctgtacataaaaattcattttatgaattgtttgtttctgatcccttggggaacccacaaagaaaagttttttaaaaaatatatatgtacaaaaaagtaaatacatcaaaattacaagttatgttttaattctctaggatagaaaggttgagctcagctaacaaaaagaaataagattaaaaaaaaattagaaagtttgcttgattcaagtttgttttatagtgaaaacaaaaactttggagaagaagaatgatctcctggtctttctagctgtagagacagcatatgatgcagctcctcaagaaatattgtggtaagaaaaaggaaagagcacaaaaatatgccagatgaagacatggtggacttgaatgcatgttgctgcatgtgaacaattgaaggagagaaacgagtacagctcaaatgagcataaggaagatagaatgtttagataagtttgttgcaaaacaggataatattgaactagacatgaacagatttgttagaagtagatgaagcttcaacattgttcaggtggagaggatgtggcacatgtttgatcatgtgtaatagaaactggtgttcatatgccaataaagaaagatatggttttaattggaggtgcaatattcatgaagactttacggaaggcaaggctaaaaggatctggaatgaaatattgagaaaagatgtgatggcctatatcagaactgcagtctctaggtaaaatgtaattatgaaataggacacataaaccctgagagttagaataatttggaacaatagggtaaacctaatgcgagttgtactccctgaatggcttgtggtgctttaatgatatttatcctcatttgtgtcttgtctttcactagaagttgtagtctggttcaatatgctgtttcttaaattaattctgtgtttgttctcctttgaacagcttgcgcacaacctt

SEQ ID NO: 13259 - DNA, 6678 bp, Vitis vinifera
  Intron number 1 from transcript GSVIVT01018015001 (locus G SVIVG01018015001) derived from phytozome v7.0 (chr-ID chr5 ; pos 5493672 to 5500349 reverse strand)
cccccacctcttcaagagtcttgcctctctcctctgttacaaatccctcagctatccatagccgaatcagtcttcttcgcttaactggattattctcaggaaaaatactcatgtataagaagcaatacttgagatggtaaggtaaatccttgtaacttgcagaaaacactctcataatatctgaaagggcaccaccgcttctcaattcagactcaaggctatcacgtaattttttccactcgtatttagtttgacgaggcttactccgcaagccctactgatttcaataatcccaagtggtaatccatcacatttctggagaaacttcgccatctgctgatttattgctacaatatggaaagtgcaccttttgatattgttcaggggttcaaggcaccaaaggggattgaagaacctacaaaagctatcatttgtaaaggcgagtgggcaacacagaatgagtcggaagcacagaatgatacaagggctcgacaatcttacgcagttgaggaagttgggcattgtagaactagcagaagaacatgggacgagcttgtgcctctcaattgaaaagatgccaaatctcccctccttgaatgtaacctcccttaataaggaggagcctctggagcttgatacaatgaccaatccattgccccttcttcaacgcttgtacctcagagggcctttggaaaggtttccacggtgggtatcttctctacatgacctggagagaaaacgcctgaaatggtctttcaaaactcaaaattttccatcttttttcgcattcaggctcatcgacaactccatatatgtataaaggtaataatctccttctcaatgcgctccattacttgtcgcttaatcgtttctgcaccacaactgggtcacccaccacggccgagtcacccgagcttccggactgggtcaaattctctcagaataacagccctgctggctcagattctgatgatgatttcgtgattcctaaacttgcttattgggcggagaatcaaaagcatgatcatcgcagtaaagttgatgcgtacgtgctaaaggagactattgacagtgatatcgataaaattagtgaacttctcaagtttaggcactcctcggctgatgctattgtccaagctctaggtgggtgtggcgtgagtgtatctgaaagcttggttgagcaagttttgaagagattcagcaatgattggatcccggcttttgggtttttcaagtgggcaaaagctcaaacgggttataggcattctgtgaattcctacaactcaatggttgacatcttagggaagttgaagaagtttgatcttatgtgggagttggtggaggagatggatcgattggggggatatgtttccttggccacaatgactaaggtcatgagaaggcttgcaagggcgagtcggtggaaggatgccatagaggcatttcgaggaatggagaggtttggcgtgaaggacacgttggcgatgaatacgcttatggatgccctgttaaggagaatagcgttgagcatgctaatgatgtgtttgtagagttcatgtaaaaataaagggaaaagaatattttcctttttattgaataatactattgaataaggagacgtagcttaatacaaaagatttcctataatcatgctaatcatgctaatctattcttggtagtctaagtataaaagacaactaatcaaatatacaactaatacaacatggttgaatatttttatcaatggaaagccagatgtcattgaccttctcaacactctccctcaaattggagagtgaatgtcaagaactcccaacttgcccatcatagttgagaaaacttcatttcccaatggcttggtgaatacatttgcaagttgattctttgaagcaacatgtttggttacaattgaaccatcttgtattttgtcacgaataaaatggcaatccatctctatatgtgtggttctttcatggaaaacaggattgactgttatatgtaatgcgactgtgttatcacaatacaacaatgttggcttcagatgcaatattctcaaatctgtcaataacgagcgcaaccaagataattcacagcatgcacctgtcatggctctatattcggtttctgctgaggagagagatacgtttttctgtctctttgtccgccaagaaataagagaagatcctagaaaaacacaataacatgtagtggatctacgagatattggacaactagctcaatcccaataagaaaaagctcgtaaagataaatcattatgagaaggggaaaatagaccttatcttggactacttttcaaataacgcagcacatgtgaggcaacttccatgtgtggtttgtgtggtgtatgcatgaatctacttaacatatggaccgaataagtgatatctagtcgggtaatagtcaaataaattaggcgtccaacaagttgtctatactgagatggatctttaagcaattcacctaaatatgagaactttatgttttgttccatgggaaagctcactggtttagcacccaaaaaatcactatcttttaaaatttccaaagcatattttcgttgtgggatggaaatacctttctttgaccgagaaatttcgatgcccagaaaatacttcaaatcacccaaatctttaattcgaaaatgactatgaagaaagtgcttgagtgctaatatgtctttgacattattacccgtaataagaatgtcatcaacatatattaacaaagttgtaaaagatttacctttctgacatgtaaataacgagtaatcagctttggattgagtaaatccaacagcttggataactgtagagaacttggcaaaccattttcgggaagtctgctttaaaccatacaacgacttgtgaaggagacacacttgattctccccctgtcgctgaagaccaggaggtggagtcatataaatttcttcatggagatcaccatgaagaaatgcattgttgacatcaagttggtgaagagaccaattttgggcaactgctaaagccaataaacaacgaacaataatcattttagcagtgggagaaaaagtgtcatgataatttaaaccttccaattgtgtgtaaacttttgcaaccaaacgagctttgaaacgctcaacagtgccatctaagtgccgtttgattttataaacccaacgacaaccaattggctttttatcaggaggaagagaagtgagggaccaagtgtgattggcatctaaagtggccaattcagattacattgtttcttgccaatggggatgagaggctgcttctgtataagaggtaggctcaatatcttgactgacagtaggaataaaggagcgatgttgtggtgagtaacgatgataagagacaaaatggcaaagggggtatcgcatacctttttctagacttgatgacaaaggtggcaaatggtgggagacgtcacttagttgcaaacataatcacgtaaagtcatgggagggtgatgaggtcgttgagaacgacataaaatgggttcgcgaggaggactagtaggtgattgcggaggcaaaattgaattcagtggtatgggttgttggacagtagaaactggttctgatggtgaggaatcgaatacagaaagaggaaccacaaggcctgaatttgaggaaatggaagaaatggactcatagggaaaaatagtttcatgaaaaacaacatcacgactagtgaacattttataggtgtcaaggtcatagagcttgtaagctttctgactagctggatagcaaaaaaaaatacaacgtttggctcgaggagcgaatttatagggaacgtgcacatcagtagcatatgctagacacccaaaaactctaaggtgggaataagaaggaatttttccatagagtcgctcaagaggagtttgacgagaaaggagtggtgtgggcaaacgattaatgatatgaacagcagtagaaacacattctgcccaaaaatgtaaagaaagatgggcttgaaaacgaaaagctcgagttgtctcaagaatatgttgatgcttgtgctctacaaccccattttgttgaggggtatagacacaagaatgttgataagtggtccctttttgtttaaaaaattcctgcatagagaagaattctccaccattatcaacccgaatgttggctatagaaacatggaattgtgtttggacaaatgaaaaaaagttgacaagtaaatgttgtgtttcacttttgtgatgcataaaaaaatacccatgtgaatatagaataatcatccacaatagtcaaaaaatattttgcaccaaaaagagaggcaattttatgggggccccaaatgtcacaatgaattaattcaaaaggtctaacagacgaaattgaactaacagaaaatggaagtcgactttgttttgcaagggcacaaacatcacaagcattattagactggaaagggaaacttaacaaatgttttgccataaaatgtaatctagaggaagaaaaatgccccaatcgacgatgccacaaagtggtggagaaggtgacctgaggaccgggtgaacaacaagaagtagttgttgtggatgaagtttgaggttttggcttctctgatgccaatgcaactaagtaataaagtccgtctcgttgttcacccaaaccaatcgttgtcctcgtcatcaagtcctacaaaatacaccaatgaggaaagaaggttattgaacaaatgagatctctggtgacacaactcacagacattaaatccaccttgaaagatggcacaacaagcacattttttaaagtaatattggaattcaaaggtaaatttccaatggatgtaatcagagcctgttctccacttgacatagcaactggtggcaaacgggtgttcttactactgttgacaagcaaggttggagatgaggtaatgtggtctgttgcaccactgtcgataattaattgatggaggcgcaacaatgtttgtaacaaacctgaagaagtaccaacaacatcagctttagaattggcagattgtgttgttcctttaccctgcatgatggatgagatttgctgaatttgcaaatcagagagcccatttgtcaccaatggcacttcctacatcattggaccctctttgacattgttcaaagagggctgatggcttttgttgcgcttaaaatgagtgcttctttgattggacttgtttgatgcatgtttagggtgtcctggtgggtacccattcagcttccaacatgtttctcgcacatgatggtcacggtcacaataagagcaatgcaaaggttttctattggacaagttggaacaagaagaagaaccttgtccatgtctaacagccagaaccaccagttcaatcctttgaacaaccatggctgagttctccgtcatctcacgtgcagcccctaggcttcgctacttctcttcttgtacaatggaagagtaagccttggcaacatcaggtaatggattcatcaatagaatctgtcctcggattgcattgtaggactcattaagtcccatgagaaattgcatcaatttgcgtctcttatgatccaccccacaagagcaaatggtgtcattataggatcctagttcatcccataatttttttagccttgtgtaataagccgcaacagtcatttgatcttgagcaagacaagcaatgtctctctcaatctgaaaaatacgaggggcattactttgagaaaaacgatcccgaaggtcttcccatacctcctgggcggtggttgaaaaaatgacactgcctacaagatcctgtgtgagtgaattaagaatccaagagaggaccatatcattgcattttttccatgaagcatagtcatctggtttggttgtggcagacggcattgtggtggtcctgtctatgaaacctaacttggatttggcattcaaagaaatcatcatggctctacaccatgtcaaataattatccccattgagaggcttggaaacaagcatcatccctggatgatcagaatggtgaaggaaatatggattgatagcatcaagcttgcctccatctgaatattgctcatttgccatgatgataagaaacaacgataaaaaaaaaggcaaaaagaaaaacagagagctagggtatcagtccctgctctgataccatgtaaaataaagggaaaagaatattttcctttttattgaataatactattgaatcaggaaacgtagctttatacaagagatttcctacaatcatgttaatcatgctaatctattcttggtagtctaagtataaatggcaactaatcaaatatacaactaatacaatatggctggatatttttgtcaatggaaagccagatgtcgttgaccttctcaacagttcaaggattcaattcctttgaactctcatactttcaatgtattgattcatggttggtgcaaagctaggaagatgaatgatgccatgaagtctatggtagagattaaggaacatgggttctgcccagatgtgatttcttatacgtccattgtggaagcttactgtcatgagaaatattttcgcaaagtcgattctgtactaaatgagatggaggaaaaggggtgtcccccaaatgtagtgacatacaccattgttatgcatgctttgggcaagggaaaggaaatatctaaagctttggaggtgt

SEQ ID NO: 13260 - DNA, 7475 bp, Vitis vinifera
  Intron number 1 from transcript GSVIVT01034555001 (locus G SVIVG01034555001) derived from phytozome v7.0 (chr-ID chr1 8; pos 19531144 to 19538618 reverse strand)
tgttgtcttctataatttaaattaaacacaacttctcttaatatgaataattagataaaattttatccaattaaatagcatataatttaatataattatataatgtagttgtaaattagtttttatttaaaaaataaataatttagaattttcattttgaagccaatacattaagaaacttattttaataaaacgttaaataaaaattatgaaaaatgaataaaaaataaattaaggtaatcctaatattaaataagaggaaaaagaacgaaaataaaattaaaaatttacaaatattaaataaattctcacaatattctattttttttatttgaaatcctaatatatagttaacattaaagataagtatcattaatcttgtcaataacatttgattataaatattcttagcttttgaaaaatcaatttttttagtgagggtagacttccatttttttttctttttttttttcaatatatatgtatatatttaaggagccctttgttttattggaaattttaggccaagaagggggctcccctaacccttccttagctcccttattgatcatgtcttccctttttaggggacactaaaaaatatagtgtaatagtcgaataggatcgacactctagagaaggtttgagtggaaggtggagcacgtcaagtatatacatgtgatatggttcaaactaagtaatggtgacaccaaaattagctcaaatctctcccgtctaagcatctaatactgccattcttctattcatctcctgtaagcaattgttatgttgaaagttaaaagtctttcctcctattgcctaaggactcaatggacatggataaaatttgtaattatttatgaatgtcattgttagatggagcaaattcgtaagtgtaatgcgaggtgaaatctctttaaacgtagcattgggctttaggtaggggaagtaatactcgaagctttgtagtttagtctattagaacaaagttctctttcttaccaacgatctctcaatacatcttctcaattgtaataaacaattggtcttttttttttccccaactttctttcgttttcctttcgaaacatatgatccactatgtagttccttaaatgcctacaaataaaaatctattggttgtaggcatcataaatgacaagttgttcaactgacgacattgaaaaaactacttatatagtctttagaatcttggtgatgaatgtctcatatgacaatacaaagcttttgttcttatattaaactgtcatatgctgctaaaataatataacttatactcatggaccctcccacaataatactatttatcaaaaatgcctcttgaaatgaaacatcattgtggtgcacatcataccccatcatgtgatgcaaccgtttagctttgaagagtgagttaattggacaaggacttaaactagtactatttgaaaggcaaattgtacatcctcttcaatacctcattaatggaggacaatcttttaatttttcattaattttttgtttcatatatatacataccctttcatttaggacttcgaaaatctcattcaaattttccatagataattttatgttcactttttttaccatagtctgtatgggacaccatattcatactgtacattcaaattaaaacatcaaaccaattgcaattatattgtttcaagtaaaccaactaatgacaatcattcaccgtctttgtaaataatttgacaaagttaaaatattaaactttatgaaattggtattcttacccaaaataataggcctatgagagaagatttaggagagcctatcttgttgttctaaggaggtgaaagagaaatgggtcaaactaagccttagtcctaacctctagagaagtcttctcaacaacttttttttcccttccctttgtctccaatgatatttgtaagtgtctttttgcatatttgaggagtagaatgggttttaggtggtttttaattcaataaggaagtgtggaaagagtagaagaatggggatttgcgaaggttttagaggattagaggatttgaagattagatcaggtttaacctaagtaatttggagggaatagggaaatgtcagaaagtgaataatttgagaaattaagtgtccaaggcttttaaaattttcatacctaacagtatcacttggttgtttagcttaacatcaatcaacctttaagcgaatgactacttagttaaccaactcccctctttttattgattttactcatatattgccttcttattgatactttaagaacttgaaggatatctatttaggtttgtacgacttttttgcaactaaaatattatgaatgtgcaatatgataagaaaattatgcataaaatccatcaaattcaatcaaatagtacacaaacaaactttgactaggcaagaagcatttgaaatacaaatatcaaaatggtgcaaagcatgcaatagttttaaatttttatatgtcttagatgacgtttgtttttttggcttaattctaaatagaacttatttttaacttaatattaaataatgattaatagtattaagtattgagttgtttgtttttttaatattttatttctattaagtattaaactgtttgtttttttatatactaaaaaccaatatcttaatattttaatgtattaaaaaaaatataatttaatgtatttctgttcaaaataataaaattattataataaataatttatcattatcattcttacaaaaaataattaatatatttattttttatataattaaaataaaatatttaaacttaataatatgaactggctttttctatttggggaggtttcaaaaactgagttatttctggggctttgtaaactcgtagatgtactaaattctcaaagttgacatattgagttaatgggcttttggacaactaactcaacccagcccaactcaaacttcgcctcaagaatgcacttttggttttattaggatttaaatcaaacaggttgtagacatgtgattagttcaccatctcttttagacattagaatcatttcatcaaacaggttgtagacatttccttaattcaacatatatcctacgattaatcaaacaaacaaccagagaggatgacaaacaaaactatagaaagaaaatttgaaaacgtacatgttggatccgtaggatagaaaccaacactactcagttgcaggttagggtgttagaggaggaacagctgcatcggatgcgtcagcatcagatgaaacgacagtccactcgggaggcaaaggaggcagcggagcatacactgtggggcgacacttaatatcccatggctgggttttacgcgggcaagttttcatgtggtgagacgttgccttcttttgtgaccgcgacgaacactctatcaccgtcgcaccgccacccaatctcagggctgccttcctcacaccaaacgacgttgccgtagaacaacggtcgggttgaaaatcgtatttggggaggtttcaaaaaatcaaaaaacacaaacgccaccttagtttccttctaatttcaacaaatcaatcttcatttaagggttttgtaaaaatatttattaattgatagttaatgcttacaaattcaagtgaatatgaccttttatacatggtctataagaaaatgatattttatcttaggtggtgtttgtttttttacttaattctaaataaaaccttaatgcttaatagtgttaaatattaggttgtttgtttttgtagtattttatttctattaagtattaaaaagtattaaaaagtaaaaaaaaccaatatgttattttttctatttaaaaaaagctacatattttggttttttctatttagtaaaaagtttatgataagtcataaaaaagtaaaaaaacaaacaacctaaattctaaaactaaattactttcagcaaaaagccaaaaaaacaaacgccaccttaatatgcttattcttagaacgttgaaccaggtttttaaatatgcttatgatagtaatgttatcacatttaattggtgcatgattataagttaattcaaagtcatgcaaggtttgtttcattcataagatttgagtataacacaaatagacaataatatatttgacttgtgtcattgataatgtaatgaaaattttgctttttattatgccaatacattaatgaatgacatagaagtgataagtgtcactagtttttgttattgattttacaactaagaaaatctatatcaaaataaccaagtagaacaaaattagtgcacttaggataccaaaaacctagatcaattattctttttaaatatctaagtattttttaaaagacaaaaagtcatttttccttaggacatttttcatcattatagatgcttccaatgtacgatattaggcttcaatatattagattttgggtgagaatgatatttttttttaatattgaggttgtgtaaatagaaagttgattttggataggtagttagttaaatgcttagtttgaattactataatttttatttttttttatggattatcattcatagataggtatatatatacatactgtttttttcttatttattctcttatttctatgggttttttattgttgctttcttcctactttgtcgttttatttttgtaacaaaaaggagtagtaatgtaatttatttactttttttgtcacatattattttttacaagtgtgttatttaagtgtgcatattacaagtctattgataagagtgttgtagtggggtgtctgatggttaagatatgctttagattaggatccatgagattatttgagaaatcaagggtttcattataatatttatcacaatttaccaaataaggagattgttgatgtaaaatattaggttgacaattttatttcattattgcattgagtctaatgtaccatacttccaatggccttatcggttagaatcaagtttgaactactttagagcaagattcatattttagacatatatacattatatgtattaagatatgagaaatgactattacatatgtactaggtgaaatgttagagagaatattgaaaaatgaagttaaacatacaaatcaaagtatggtcattcgaaaatcacacaagaaacattcaaacgttgtattgatggacatcttccaagggaacattcaaacatatgtttgcattcaaatgtttccatagggcattcaaatgttgatcctttcattttgtttttcaaacccatctttcaaatttttgaggacttcttgataaatctcatttttgataacctattctaaatatcctcctaggattttgctataaaaacctaaaattttaagactagaaaattgtgcacatgaataaccactacttcttcctaaaccttcaactcccaaatctttcaagaactttcttgtaggtcttttcgttggaaagacaagatgcattgatctactagcttatgcatggagttgaggtgatctacaaaggagtacgatgtgttgtgttgtggatgtggaaaaagagtataggagtcgattactataagaccctaagagtaggtgcatttcaataaggtaaaactatgcattttcttgttatatttaaagtgtgtttgacagtgattttaagaattgttattagtatttataacatttgaaattttttatctttcaattattaaaaatgttagaaacatttcttaaaatcactatcaaacgcactgttaatgaatttatttgtggtcgtgtgattgttagttttatacacgaacaaagtttctagatgactatataaatgatttttctatgtatatatggtgtctttatgtgtggttgttttttttaatcctccttaatgattaacattattgaccttgagaatttcacatgtgaaattgaaaattagtaaaaatttatttgactacatattcactcccttctccaggtagtttcataatataaaaaaacacgaacttatattagctcgcatcgacacttggttttatgtctatgaagcaataccttgagaggatgtggtcaaccacccctaactttatttcgaatatgagttttgcattttaaagtcttgggaatatgtgataagataatgacattcttagattagggtacacatgtttttcaaattgaggagacatatttgtataatgaaaaccctagcttgtcggactcaatcaaaaatatttttaaacaaaataaaatgagaattatccaaaaatagcctcgacacttgaattcacacttagttgctagagcactcccatgaaaattccaatttctagcctcattttgatttgtttctacatcaaattggtttatggtttctttcatttccattaactttaccaatcactctcaaatcttacttatttgaaaatcatatatgcaacgcaaggaaaaaaaaaaaaaagacctacattaatgactactaattgtcattgtatacattatatgtcattatatttttttgatcttatatgtcatccatcatagtgtttaggtatgggcattagcaacctagacatatataaaatgtcaatgaaagtgccctcttactactatgcccctatcaatatagctaccttttatcactcataaatatgtaaaggttcgtattcaaataggtcatggctcctttaaacatatgctaatatatgtatcttcctccatggattctacattggaattagagacatatcaaagaagcctttgagaaatttaaaacatcatctcgagtctttcctgacttgatttcaaggttgcatcatcataagtcatgacacagtacaacaaatcttatatatgtcatcattgctttgaactaagttgtatatgtcataattatttatttaaatacttaatattgacatatattgctttaagttaaggtatatatatcaagacttgtttttttttccttaccatatatgttgaattgattaatatagtttagaggaaatatgtaaagtaaatctagtaagatttaaaaaaataaataaaattatagataaaaaaactaactaatttgactccccgacaaatgtattcgatgaggattattttagaaaataaaaaatcaacaataatttttttatatatatataaaatagatcttaattatattaaacctcaaaaaacatagtatgaaatttattgacctcatctagattggtagagtctcattgcaaaccttatggctgggccagatttttcatttgaagcccaaacccaatttgggctagaattactgtaccaggtcaggcccaaacattagctaagaactccaaaagctcgaatttgtaatttgaaaaaagagtattgggcagcattgtaaatttaaattagtatatactatataagagcgaaaaaacctagggttttgtcctcgcttcagtagccgcaagagcttctgcctctctctctcgaccgcgg

SEQ ID NO: 13261 - DNA, 2723 bp, Vitis vinifera
  Intron number 1 from transcript GSVIVT01031924001 (locus G SVIVG01031924001) derived from phytozome v7.0 (chr-ID chr3 ; pos 5438378 to 5441100)
tgggtagagtattttgttggagaacatatgggttacagaaattctacagagacacaggcactttaggtagtcttgtgcagttggagatgttagggaaggggactcctatattatcatcaaataggcttcaactaacagtgcaggacccaggaagttaatcatactatgaaaatggttgggagccttgcttaatgcatattatccttatgaggattctgcaatccaataatgaccgtccagaccttcatccaagaagggaactgtgatgcttgaagagtttagaaggcattctcacccttaggtattggtcctttttctagaaggatgttcccttgtgttttggcttttcctttttgtagttttctataataaagaacaatgttatcaaagacgatcgcctgggtcgcctaggccatcaggccagacagggtagataaaagtcgccttttgaagacctaggcaaggcaacttcaaagaggcaatcgccttgggataaggcacaaggcataaaggctctgcctttgaccatgaattaagattaaacatacttagattataatttcattcaatccagcagtggattaaacaaagtataagataaaatattatattatcaatcatagagataataagatggagggttatcaatctagccttgatggaagtaatggcaattttaatttcaataatgactataatgatgatgcctaaaggttctctagaatgttcaatctcttattttgttttttatttttctttttagatgtttgaaaaattagaatatacatttagataggatgaatatctttaaacaatatgattttttttataatatggggtataatatttaacactttcaataattattactattttgttaattttataagacatcgtgagtgatgaaaaattaatagtgttgattgttgaagacaacccttatatcagttgaatattgaataggtaaatatatgtgtgttttttattgtcttactatagttaggctatcgccttattttccacctttcgccttaggctaaaaggagtcttatcactttgatatcgccttttgcttttgacaacactaataaagaatatttttcttgcttctttcaataaagctttatgttatactgaatgaaaaaaaaggttgataatttggaaacctaaaaaaaggaaaaaaaatatattgaggaaaatgattttctaatatttgttttatcatgaaaaatccgaaagaaaatgaaatataattaaatttagttaaatgcttacatattttcaaattatttaatcttcatgtagaagaggaaaaataagtaaaatgaatttgaagaagaatataaaagtaatttattaagttcaaacctattttttttctcttctagtttttctctattttcttctccatgcattttttctcaaatcttccaagaaccaaacataggatagagttccattgggttactggtttgtccaagctatgcatgccaaatcatgtttgctgaattcactcaactctatatctctattatgtgtgattgggatttcatgatggttatactaatttagccatacatttcttttcaaggaattttctccaacaaggaagcggacctctgtccagatgattgaagctggtatatgctgaatttcattgttctgctttcattcattgaaatttcttagttatgacttctagaacttgcacaggagtaggtgtaaataacagtggtacagcccagaaggtatctcccaatgcatccaatgtcacacttccagaggcttcagcaactatggttagacctcaagaggtcaagcaagaaaactgtattcaggtatgaaaagagttgcagttatttctcagattgattagtaggttatttaatcttagtttcacttttatatttctttttggtttgaagtcacctgctggatttaggaatttctaccaaacaatgttgcttacaactgttagagcacgatgtggatagaccaatgcactaatcaatttccaagcgtgatttggctttgttatttatttttaaatttttcttctcaaacttgttcaaagttgttgttctggtcatgcatattctttcgcatgttaacctggaggtgcaattgttttataactgttctgttgcattcttttatcttggtatcaacgcatctttccttgtcttaccatgaaattttcatttttaagagtggtttcctttcataactaggactgacattatatatctgccaatagtttcaattctggagcttgaaaccttctacacctatttttaatgttatcagcttaacatgcccacaatttcacgaacctctgcaaactgattcttttactgattacctcatattcagttccaacactttgtcattaacacagttgttatttttggttattttcttgacttgcaacactcttttaacagcacgaggatgaattgagaaaggaaagaaagaagcaggctaatagggagtcagctaagaggtcaagattacgcaagcaggtatgttcatatttaagaagagtttttgcaggtgactttttagaatgattttaaaggagtattgataagtttggtgagaacacctccatgttttatgaggagaatcactactatttttgtgttcaaacttctgagtttatttgacttaattatatttttatataatattttggtgttggattttgtattctcccaggaaga

SEQ ID NO: 13262 - DNA, 7629 bp, Vitis vinifera
  Intron number 11 from transcript GSVIVT01000514001 (locus GSVIVG01000514001) derived from phytozome v7.0 (chr-ID chr 5; pos 13410205 to 13417833 reverse strand)
aagcttatccctatttagcacaggtatggatgttccattgctattagtgttatatttaatatattttggcgtccctttttaatatattttctttttatctatcaaaaaataaataaataaacaaatagtggtatatttagagcgacttttcatttttatgatttgggtacctaaatcatctttaggttagatgactcaacccattagtgttaagtgagagatcaattacacttttcaatttaaccagcaaataattgtcgttttactttgaaattattggcttctacttaatatatgttgaggttcaccaagtgaacataatcaaccacaaaaggagctatggaccaaaaacattgaaaatcattagtattaaggtatcatttaagatctcatttacctgagttcctgtaaccacaaaatcaaagtgacccttttaactgattttcaggagttgcttttgagaaggttttgaaaatcttgtttttaagacatataacaaggtggatattgtaggtgcctatgctataacttgaagctagagtagtcttagcaggcagtgagatgcattcaggaaatcatatgccatggaattctctctctctctctctctctctctctcacacacacacacacacacactcacaaacatgcatgtgcacacacacacacacatgaattttgagagattttataagaatttaaaaacaaatccatggattcaagaaatcatattccatttagctaatgcaacactagggctgaatcgtgaaagataattttgagaaggttgtgcagaaagtgattttcagatggactaagtatgaaaattttatattcgtttaatttttatgtttgtaagtgcatgaaatccactacaagtaccaaagaaaagaaagaggcatcaccttgtcatatgcggcatatacatggatcaccctaagaaaacaaacaagaagtccaatccatacaggtgttggccacctttatggttgctcatcaatgcatcccttgtatgaaacaaacaataactccttcagatatgcctcatcttagtcacacaatcccaactaacttcttgcaacaaggataatctatgagagctaaaatctcctttgatgatcaagttagatgagaagaaagtactatagactctagagtgcttgtgatcgtatcttaccttttcccataacaaatctctttatactggttatgtaagcataatggccatcattgagcgggagcccttgaggcttggttcaagtggtggatggttggggagagtttgtgagaggttccaggttcaagttctaatggagacaaaaaattacttgtaaaaaaaaatggtcataattgattggggagagtggcacatgatgagcgatgctaggaccacctagtaggcttccttagctagacccttgtgtggtctgacgccactctgtaaatgggcctacagtgaggtccagcctaagcaagtccataaggcagccttgcctccacacactaatctcctctaaatacttgaaaccaagcactctgtcatttgactagggtcttcacctatattttcattttaatagttttttttccttcaatccaccttaatttaatatcttggaatcaattttagcaatttctccaaagcccatttttcttgcattttttaagaaagcactgcaagttagcctaaagggcttacaaggatggtctatccctttccactatttcagtcaactagctattttttcatcaatcttaatttgaatttcttggaatcaacttgtaacattttgagaaagcacaataggttagtccaactagcttacagtgatgttaactcttagcttgatatatattgttggtccattatttaataactctttatcttttggatcaaagtagtagtttacatgatatgatagctcaagtttctagatgtctcaagtatgagtctttctgccaatatactgatttaaattggtggtttacaagtaactaacaattctaaaaaagtacaaatcttatggaatgaataataatcccttatgtggagaaaaattgtatttttcattcataaatcaaaagtatagaaccaatgaaatatatgtacaacaacgaaaaaaaaagaataagagagaatttctacaaaataagggattatatacaaaaatatacacacaacaatatatatatatatagttgtataaaaagttgtacaacttacacatctgtatattacaactatatatcttctatagttgcatattacaattgtaataatctttaacacttcctctcaatttggtgaatagatattatccattctcagcatgctaataatagattgaaatgcaataccactcaatactttagttaacacatctaccagttgaccctcgattgatacaaatggagtacaaattagtccgctatccaacttctcttttataaaatgtctatctacttctatatgcttggtgcggacatgttgtatagggttatgtgtaatatcaattgttgacttgttatcacaatattgcttaataggttcttcccatacaatctttagatcttccaaaattatttttaaccatagaagctcacaaactcctaatgccatagctttgaactcatcttttgcacttgaccttgcaattacatttgcttcttgcttctttatgttacaatgttacctccgaggaatgtacaatagcctaaagttgatcttttgtcatcaaccgatctagcataatttgcatccgtgtatgcttccaatgtcaattcattgcctcttttaaacgacacttcttttctcggagtaccttttaagtactgtaaaattcaatgtgttggttaaagatgtacttttgggttgtgcataaattgactcactgctcttacaacatagcctatgtttggcttgtatgaaaaagatagattagtttttcatctaatctttgataggattctctatctaccttcacattttgttaagcctcacaaagcttgtgatatgttcaatgggtgggtttacaccctactttccccattttagttaatagatctagcacatacttttgttgggatataaagatcccatgtcaagagtgcgctacttcaacgttaaggaagtattttaacctgtcaagttctttaatctcaaattcttgcaataaacaccttttcaatgcttacattccttgcaagtcatctcctgttactactatgtcatcaacataaactaatagagttgcaactccccttgaagtggaatgtttgacaaataatgtgtgatcatcctgactttggttgtaacctaaaacttttattactctagcaaaactgcaaaacgaagccttgggagacttttttaagccataaagtgtctttttcaacgtgcacactgtatttttctctaactcaacccagaggaacctccatatagatttcttcatcaaaatcacaatgtaaaaagacattctttacgtcaaactactgcaaactccatccatgattagttgctaaagataataagatactacacatttttgcaataggagcaaatatttcaagataatctatcccataggtttgagtataccccttagccctaatcttgccttataccattcaagtgatctacttgccttatatttcacaatgaagacccatttatatcccgttaacttctttctttgaggtagttccaccaagtcccatatccatctcaactttcatagcttctttccactctttaattcttgatgcttcaaaaatagtttttgggatagtaatagtgttgaggtggataagaaaacttttatgaccactagacaacttctcataggacacaaagtgagacaatggataggtaggccattcagtacacttcttaacaccctttctaattgtgataagaagatcataatcatcaacaacaggtatattactttcatagtgttatgaattaggagttacctcaatattcttaacaccaaatgttgattttgaattatgaacctacattggttgaacaaggggttcctttttccttgaatatatttgcaatggttgagtagcactctgaatctatttattctttgtcgtcggactaggagtacttggatttaactcatttggtaaaggaacaaaaatggatggcgatggagaagacggaggattttgtttttctgaggaagggaaggatgaaagattaagcaaaaacaaatctccatccttatcttccatgaatgatgtacccccttgaagataagggtttggaaagtaatttttagtttcaacgaaagttacatctatagagacaaagaactattttgttggaggatgataacacttataccttttttgtgtagaagaatatcctacaaaaacgcacttaagaccccttggatcaagtttcctatggttattcgaatgaatgtgaacaaaggattcacacccaaagaccctaggaaccaagtgatttgttgttttgaagtcatgaattttttttgaaaatagttgcatgggggttgttataaccaagaactcgagtaggtagtttattaattaaatgtgtagtggttatgacaacttctccccaataattttttggaaaagaaaagcttggttaatagctggaagatgactatttttccgttctgctgcaccattttgttgtggtatgttagtgcatgaagactcatgaatgacacctttttctttaaacttgattaaaataatcactagcattattagaccaaactctttatatcttaaccccaaattgatttttcactatttggaaaaaaatttgaaaggtaaaactaacatttgatttttgttttaggagaaaaacccatgacgctcgagtacaatcatcaataactaagatatatcaacgagccctggagatattatgaactgtagaaggtccccaaatatcactatgaataagagtaaaagaaattgaaaaccttgtattccttattggaaaaagaaacatgcatatgttttgcaagttcacaaacatcataatgaaactgacccaaatcaaatcctttaaacaaaccaggaaactttactttaagaatattgaaagaaggatgatcaagacagtgatagaaccatattctatttttatttgaaagggaagactcagaaagcagagacaacaggagaggacccttaatgttattttgcccaataggttcctcaagaaagtagagcccattcctctccctagcaagtccaatcaccatccctgtgctccaatcttgaaatttacacagtgcaaaagaaaaagtcaccatacaattcaaatcctttgtaagcttgtgaattgaaactagattggtagacaatttcgttacatgagaacattttttaaaacaaggttctgatttataactatgtcctcttgcccagcaactatagccaatgttccatcagtaatatcaattttcttattactaggacaaggactataagagacaaacccatgagaagattgggtcatatgatctgtagccccaaagtctactacccatgttccctttgagatcgacacattaagtgtatagagctaagaattacttgaaaaagccaagggacaagtacctacaccacctgtaggtttttctagtgtccccataaaatatatcagcttctcaatctcctctattgaactcaggtagctcttaagagaattctccttcgcctactgattgtgttgaggtcaaatgtgcctgtccttggcctcctccttgattacactttgctgtttaaaaagtattttgagtatttgagggcttaccatggagtttccagcccctctccttgttgtgatgtagcttcttacagtaagtacactatagagtctttattacttgctcttgatccttgctcttgatccttctgataacctattagttccttcaacaccattagaataggcatttgactgtagctggtttgattttacagttctgagatttgcatcttttgtaaccaagggtgaaccatttgttgattaaggccccatcacaacccctcttcgctcttcttcttcacgaattatggctattgtttcattgagtgaaagaatttcttcctttcctaacacttgtactcgaataggatcgaactcaatgttcaatttgataagaaaggtttttccataaaacgtttaagaaaggttgcatcatcgttgtacttcatctcaatacattgataatggtccaactcttaccatgagttttgtaaaatctgagcatattcagtgaccaagtgattaccttgtttggtaatgggatctttgtcttcatctcatagatttatgcagcatcttggactttggaacaggtttccttatacgacttccaaatttcctttgcttttgtcaaaaacatgtaagtatcattggcttttggcatcatcgaattccataatcaggacatcaccatagagtcttcatcctatacaacgaacttcgaatcatctggatttggtcccatcccaagaagatgacctagtttgcccttccctttcaagaagatttgaacaaactgagactgcttaaaataatttttgccattgagttgtaaacctggtttaatattctgcagctctcttgctgcagtgttgatgactttatttgttgctattggattggagacttgccgattagtaatcagacatgttttttggacagaagtggaagaaatcaaaataagaagttgaggaaggattgcagcaatgcaggccacgacaaaaaaaaatagaacagaagtggggaatgctttctgctctgttttcagattaaaaatagagtagaagttctgccaaaaaaccagttttctccaggtttttggaagaaagaaaaaaaaccagcaattaaggctagaaaatcagtgatgaaggctgaaaaagaaatagaaatgctaaaagagtctaatttggctttgataccatgtggagaaaaattgtatttctcattcatatattgagagtatacgaccaatgatatattcagcagcagaaaagaaagaataagaaccccccttatatatcagagattgtatacacaaatgtacacacagatgtatatatatatgtatatatatatatacacacacacagagttgtatacacagctgtacaacttacacaaccgtatattacaaccatatatcttctacagctacataaatcttcaacagctgtgataatcttcaacattttacaaagcactataagtatacttattgtggagtcataattcaaccaaaacttcaaacctaacagggatagtatgataggtattggaggctcttccaaaaacagaagaataaagtataggacaatagataaatcgaaagatgatgagttaagttgatttatagtcccacttggctggatgctcttgtatcctaataaatgctaaactaggatatcatcacaagtatatagtgggtattagctacatttttctgaaccagttgttggttacttttttacaggtattgtagttggctatttataattcggacatacttgttttcatcagctattctcagattgaagcaaaatttattttcttctttgttcaatgtcagaggctcctgactg

SEQ ID NO: 13263 - DNA, 3031 bp, Vitis vinifera
  Intron number 4 from transcript GSVIVT01009402001 (locus G SVIVG01009402001) derived from phytozome v7.0 (chr-ID chr1 8; pos 8015749 to 8018779 reverse strand)
acaaacaaccctaatcatcagttggtgttagcaaggtaaatatgctgcttttcaaatatgttgtgacgttaatgggatgggttaaactggatgtctactctacatattgtatagaccaaaatcaaccttatatggattaggggctgtgtctacttgatgttaaattcactagggtgggtggtaattgtttttgaaaaatttacgcaccatgtactggataatatactcacatgcaatgaatgtgagccacaatggtttcaacatcatgcaattccataaactaatccgcatctaacatctcactttttcactgtattatactcttctttttcctgttgttttaaagatgggtttatggtaaattatactatccccatggagaggtttttgacaattgcagtatcccccaagttttccaaaataactgtgacatgttctgttagaatttgtcctcttaacactgttaacagaaaatgcgaaaaggcagtattgcccttcagcttcatagcccaaaatcaatgctttaagccttcattttccataccaaaatcttcactgtagccatatcttcttctccaaacatggcacaaaaccttaattataatcctatcttcttctccaaaggtggctgaaaacccaaactgtaatgctatattctttcctaaacatcgcccaaaaccctaaccctaatttaattttgcttcccaaataactgttattgaccctttctaaaacaaaaattatattaataaataaattaattaccacgaaaggcaagtagagccatgaaagccatggttgtttctgaaaaaaataaaataaagtaaaagaaaagaaaaaacctagtacagctataatcaccatggatgtttctaatcttcctttttaccctttaaaaaaaataaaagaagaatagataagggaagaaggaaaaagaaaaagtcattgatttggggttaggatttgtttgagggctaaggaggaaaggaagtggatttagggttttgtattttgagtatttttaaaaattttgttggttatgtcatcattttccatccattgcttgatagctatgtaatgttatgaggggagcttcatgtgatcaaccctaaaccttaggggaggagagtgcgacctttgaaggtataaaggtaaaaattagctcagggtagtttggcttacccataaatttgaaaactaatgcatttcatgtctcaagtagcacgttgtaggttctttgcattaattacacataatgagtaacatagatgctttatatattaggctctcagattgcatcttcctgccctaatgcattatggtaattgtattgaatataggtttttcttgcatcaactatgcataatcagtgacatggatgctgtatatatcaggctctcagattgcatctttctgccctaatgtattatggtaatggtattgcatatccaatagttgtcacaaggaaaggtggtgccttacatgtttcttccaatgagatggtaatatagtgactagggcccaatccaaaccatacctgttgctgtgaggtatttattgttaaacttctaacatcttaataaaccactaagtgcatgctatcagtataaatccatattagttcattaaatagccttgcaggagatgagtaccaccatgctgttagaatcaagtttctacttgtgtcggttgtggagcttctggattgtgtcaagaatgctctatggggtggggaaattgtaaattataatatatgcatatgctaaacaatattaaatttcaaggaaataagaacttttgattgcacctaccttgtaggttggtcataaagttgtgaatttatataatttagaaaataagagaacataaacaaactactttataatccattctataaattatagaggcatgatatggatttttagaagggtcaaaaggtgctaaataacctctgaagtttatacagggagattgactgtgaaggaagctcccattttattgaagcctttactaggctttgaagttttaagttacaaacaagtcatcttcaactagttgttcaactagttgagattgtagaagcacttgtgtgcatgctgattgcattgattctgtaatgattttcagacgattcatatttactctttggattgatttgtgatccataggatatagtatctcaagatcctaccataaaagcatcatgaatatacttgccacttatttcaaagattaatgaacctgtgattcgaatcttctataaggtgggtttgcatcattcttgattatttcacattttttatcagaaatcttaagaattcttcatgcttcaaaaaatcagcttacacatgcactaatggagcttttgatggtagttgttttgtttccatttaggctgagaacttcattcctaaagaatctacacataaggtgtttaagctaccagatatctgcagtgagtaatggttttgccgccctaccacttagaaatttatagccccacaggtttttgacttattctgatgtagtgaggacttaaattggactttctggagtggaggtgtgatgactaatgcactggatcgatatttttctttaaaacacaaccttcagatgttgtgtttctacaatctgttggtaaattctttcaagggctcctgttgtttcagcggtgtggtacagttacttttattcaatctcttttccaatttacatgttggaaagtgggtgatggtatatattattattattataattactgttttgcagtttatctgtttctgtctttttatatttttgttttttatttaattcctttaactggcaagtacacaatctgattgctgcctcaaagagagtatcagactaagtcgggtgagagagcttagaagaaaaatctctgaactactatttggattgcaatccttgtgctttctgctcatgcttatgctgcttatatatttgctgtactccacaaacttttgtgattctgtttcttgattagtgcctcctttgattccacaataaagct

SEQ ID NO: 13264 - DNA, 3555 bp, Vitis vinifera
  Intron number 2 from transcript GSVIVT01028421001 (locus G SVIVG01028421001) derived from phytozome v7.0 (chr-ID chr7 ; pos 7404851 to 7408405)
agctgctgttgagccacagtttgaggaaggttctggtatgtcagtatctggcatgcttttcacatgtttatttcatacttgttgacctggtttcttttgtgtgattgttctccattaagtaaaacaagataatcttctacaccatgggagaaccacaaaacaaggttattaactatggaagagaacttgctatacttgagtttggtgaggtggttacaagtgaagtcttgaaatttttcatttaaaatatatgaatatctcattggtatataaacataacttgatgtggtcccccagttcatttttgatatcagagatgaagattataaaaattagaatttctgtgccagaactgatgtaaactgtgaaatgtctgcctctttctctatggtgcacttaatgtaattgtggtttgaacttcattgggaacttctgatcaggtcatactactatttatatttgtcaatcttgcacctagttggttcagtatctgctgttccacttcacattggcctctttctaatatttctgaggaaagaatgctttggaacatattaatgcatgatgcttaactaagttgaggctttagttaactaagtgtgaagccaagacaatacaatagcattcatttatcatacttagttgctacatggatatgacatctactgaggccagccatttaggtatcgacttaacacatctctcaaaacagaaaaatgttttagacatcatgaattcttcttttgtacttcatcttctcaaacatataccatcctatataagaggaattgctgtatttgaatgccaaaaaccagctataatgcggttgatcaggatggtggactgttttccccattcattttcatattgatttcagaattcaagtcacccaaatgtttccctaattagtctatttattttcatgtttggactttatggtatcacttgtttcaacctttttttcctgcttggattagaagcatttaggggtggcaatggatcatgttgggttcatgttgtgttgaggtaaaaatagtgcaaatttatgcaactcgaggtcaatctgcttaataatcgtgttagaataatttgatataaacaacacctgatgattacatgtctaatacaacacaacttgtttaaccagtttaatggatgtgttaagttgagttgtgtatgaattgatatgagtaactcgataatatgattctaacctattaaacctgttaacatgatttcaacctatcaaaaccctttaacatggttccaacccattaaatctgttgacatgattatagccaatttaatctatttcaaaatgctttataattgctttaacttaagtttaattttttttaattttaactatttaattttaattatactatgtttataatatattaacaaaatttaatttaaaatttaaaatttaagtgtgttttttattttatttaatgttttaattgtaagatatattaatctttataatgaaatatataaaattttacttccttatttaatttttttaaccatatgatatttgtaattaaaaaattattttaaattttcctaatttttaaaatgtaaagcaaataaatttatatgatttaaatgggttgtaaatgggtccatttgatatgatcaagtaaacaggttaaacaagtcataaatgggttgggtcattttgacacgattatgtaaatgggttaaactagttgaatcgtcaaacactattatgacccgtttatcaaatgggttatacaaattaacatgatcatgattacgctctacccaaatccataaaatttgtgtcatttttgagttgtattgttgcattgtatcgacattgccaccccaagtagcgtttttttgcgtgggaagctacttgggggagggtccttactattgataggcttcaaaagagaggatgacaaattcctaaccggtgttatctatgtggtagtgatgaggaaaatgtaaatcatcttcttatccattgtacagtggctagtgtgttgtgggggatggttcttagtctggttggagtccagtgggtctttccagaaactgtaaaggaggtgattatcagctggaagggttcttttatgggcaaaaagaggaagagaatctggagatccatactgttgtttattttttggacggtgtggaaggaaaggaatagattagcatttgggggggggggggggagttagctctacagaaaattaagtattcttttgtctgtaatatgtgggggtgggcaaaattgtataatggtgcagagtcccgttcccttataggtttcctggagtggatagcctccagttgagggttggtgggtttttgttgttttttgttcctttgttgtgaggccttgttgcctcgtatactccctgtatgctttgcggcgtttgcctgtgctattatatttgtgtttacttataaaaaaaaatgtatttgcttccatgggtacttttcatgtcttgtgatgcaattgtgcaattcttactatttactagtcaagttctttttgagttatatataagtgaggaaagcaatgtattatgagccctaaaaaggggcgcacaaagcacacaaggcgtatacaagggtgttacaaggcaaagaacacagaagagagaaaacgaaaagaactccctcctttacttgcagtctaaccaattgacaaagtctactataaacatagatgcatcctttaaacccctgttgacccattccaaaaaaatacacataaaaaggatttagctcttgaattaataactctacgttttcaaaagttctcatatttctctctttccaaatagtttaaaacaaacacagagttaaaatagtaaagagaggaacattgctttggtacctttttgttgcagttgtacaaatccttaatgttgagtcacttttctttgtattgtctcttgctgtaccatttcaaggtatattggggaaggtttctccatctctgttttgagcatctaccaaacagccttagatgccaccatagaaactgaaacttcttagcagaaaagaagccggcacccttgggatgaaaaggtgtagaatgatgtgatcaagaagctgttgttacttgcaaatcatccttccctgcttatcaaatcatcctttcctcactgctgtgacttggatgcagtgaagaaaactacctgttaatgaaacttctttggaagcgagaagatcaatgattgttagcacttggcattccaaatattattttttggagggacttccattctagaaaaaatatgaaagtaacacatgattcttttttagagtttataacttactcagatatactagtcacttctgtgtaccatttctaataaaatattgcttatgtgtacccttagataagatattgtacttatttatgattttacagcattttggtgaatttttgaaatttggttatatatgtgaataatattgtaatacagtttaccctttctcccagttttccaattgtttaatgctctgatttatgaaattttctttcctttgttacttttagtgccagca

SEQ ID NO: 13265 - DNA, 2600 bp, Vitis vinifera
  Intron number 1 from transcript GSVIVT01020851001 (locus G SVIVG01020851001) derived from phytozome v7.0 (chr-ID chr1 2; pos 1102498 to 1105097)
tgctctcggtcgatctctgagttcaagccttcaaggtaatcttacaatctctattcccagttagttaaatgggcctttagattatatatgatcgttttgggtgctgagaaaatagtgagaaagtgaaagaaaaagtttgaatcctaaaattttcagtctcagtgctttataagttgggaatgtattgctgtgagttttgaattccagggtttctctttgaacggccgtggaaccatttccatttccagtttggattacagctgacactgaaatttttgctagattaacggtctttgttggttgggaatgttgtataaaaacagatttagttatgatacggagaaaatatgaagaaagcaattgaaattttgaattgtaaaattttcacaaaagacgattcgggaatacagaaaaatgccactttaaaattgacacagctgaggggctttttcttttttactttttcggaagcaaaagatgagaaataacttaggaatggaaatgttggtttctttcatttctgtaattttttgaatccaggcccaggtttctcttgaaatgtttttaacctgtcaatgctattgttgtgaattctaggaattaattctggactacatggaaaatggaaaatgatcactggagtatcatttacctattgatgctaaaaccattttttagttatagggctgaattcttgtgacaataaccacagagaatttcttgcctagatgaggaaattttagaacaaattgactaattctggaaaggaatttgagaaagagaggagtttgcagaaggtgtcatttggaatgacaaatataattggttcaaccactgttttgaacatccgttatttgtgaagtggaatattttgcaaaggcaatccttcttcataatttcttatgcatttagcttataaaaaggggaaattcttgggcagttaaccttatatgagtgtatactatccttttatttgtttttttgataagtaaagataggtattgttatgtattaattaataataggaaaaagtacaaactgtacaatcggactacacatgacatatacaaggcgcacctaaacaaaggcgtcaaaagagcatacacaaagaaccaccttgacactcaacaagactacacccatatagacaactaggcctaatgaacctttatcactttaaaagctgtttacatagttagaaggaggttactacatatatagtaccatagactttttcccctatttgattccctatgcacccatatagacatgacattctcatcatgcttcacaagcttataggaccaaacatacaaacacctcttgctaggtgatcgacttgtaatgtctcacattggaagaggaaaaagttcttgatgttatatatgtatagattcctcttaatcatgtagagaccttttaaagtcgtagaacttttgtgacccaaaacggatacgagagggagcaattcattacaaatggtatcaaagctaacctttctatgagtctctagttgtttgcttggcaacttgtaatgtcccatattagacagggaaattttttttggcattatatatgtatgaacttcttttaatcatgtaaacacgttttaaagtcgtgagagcctattgaacccaaaacggacaatatctacacactttagcttctaaattctataagtccactagtggggttaattttggaatgtttggatttgaatctctagttagtgtgaactaaatcggtatctcaatctaatacttattcttacaatgttggtttttgatattttattgttttaaaactattgagaactccttattttccccccatttattgaatggccttattgggagcaagacatgcatttcttgcctgcctagttgtgatttgtaatacatgtatgaaaaatgcatatggtatatcatgcatcataaaaccttaagcttgtgtttggttcttggaaaatttaagggaaaataagaggtaaagaaaatagagaggaaaagtagaaagaaagaaaaagtgaaggaaaataaaaaatagatttaaggtaaataaattatttttatatgctatttcaaatttatttcacttattttaactcttctatataaaaattaaataattttaaaatgcataaatttttaactaattttatttatatttgatttttttttttttttcatattgttcttagtaaaaccaaacatgagaaaatcacattacttaacattttatttctttctttactactttcaaatatatatatatatattgtcttccagttggcatccccatccttattatgaaatttggccataaaccacatccaagtgggccatcgcagtttatgatgggattgtactattctctcctgtgaagattcgttttaggacacacttgggctgcgttaataacttcttccctttttgcattgcccatgtcataatgaggttcaatgaaagcatctctcttattattacaatatctggtttggtacatatgttcgtctccattattattatgttgttaaattgtttccccatatgtagattccaatgatgtttcttgaattgattttgctgcagtacctctcc

SEQ ID NO: 13266 - DNA, 2799 bp, Vitis vinifera
  Intron number 1 from transcript GSVIVT01002750001 (locus G SVIVG01002750001) derived from phytozome v7.0 (chr-ID chrU n; pos 36357776 to 36360574)
ttttttttcgtaagacatgtattaaatttaatttaatattacaactctttacaaagtcaaaatataagagttatattttaaaacaatagaatttttttttttttggaaactattttaaaaaagaacttcccaaacactcttatttaataataataataataataaggaatactaataagagcaatgttttttatcttgaatatattagaaatattgacaaacttgccttaagtaagttatacactttttattcttaaattatatttgattcttagaaagtaccaaagaaaaaaactgttaagaaaaattatttttttatatttgatgtattataaaaaatataaaaaaaaaattaaatataattaaaattaattagaaatttataaaattttaaattatttatcttttatattgtgttaaaataatttaaatgagtttgaaattacatataaaaatgatttaaatgaaaaagcacgttgttatttgtgaataaaatttgctatcaagtagaatcggagtgttgagttaaaattttaaaaaaagaaaaagaaaaaaggaagaaaccaaatcgcccaatgctatggaggtccaactccagtatctgccttgggtgcctctactccatattttccatctttcctattgaaaataacaaaaatttaaagttcattcgttctagtctttctctcttttctatttatggcttttaaaacatgctatcattttggaaccaatctttcttgattcttgagtttaatttttacacttgaacgaagtacttagtgtttttaatttaaaaaatatttttgaaaaaaaaatgtttggtaaaatttataaaatatgaaaaattacttataacgttagaaaatcatttataatattttttttttaaaaaaaacttaatagatgattcttccaaaaatccttgaagagagaacattttcatttaaaacattttgaaaaaaaaaatactatcaaatattaccacatcatgggttttgtagctcccaatcttcaaattcaatagtcgaggaaaatcttcatctcaaaaatttttagagaaattactaataaatttcttaattatcatgaaccaattattgataatttaaatttttttttgcttacacatttgaattgttaggtaatagctcacattgatccattaggaaaaatagattttaaatcatatgtatatttatttttatatttttttaattattaagatgttgtactttaaatatgtgaaataacatttaggttattttttgttcttgaaaaatataagaaaaaagatgttctagaaaatgattttcttggttgtattataaaaaatataaaagataattaaatataattaaaattagttaaaattttacatattttaaatttatttaatctttatgtcaaataattaaaataagtaaaatgtccttattttccttctcttgcattttccctcaaattttttgagaatcaaacataattttaagatttcttaaatataattcaattttagaatttctatataatttttttatttttaattttataagaaaaaaagatttcattatcttattattgttagttctaactccttatttttcttaaataatctctaattgtatgcatactaatttaagaagcctataatttcacccttgctaattagtctagaaattaaggatagatagtgagaatcatggataagaagttatttgattgcttattggtaggccatgagcatttattttgcttgacatatgtatgtgtcattttaaaagtggattgatggagcattcattttttgtctcccttcaaagacaaatagttgtttgtcaatagtcgaatcaatgactaagtcatggtcaaacaaataatgtcataaatatataatttatatagccttaaaactaaaaataattataataagtgaaaatatgtataaataattaaaatcttaaaaatattttatcattttatttttaatgttactatattaatcacgataaggataacatgcaaacgtatgaaatttttttatttcattaaatagaataattataatatttaattattgaaaaaatatcataaataaaaagtcaaataaactttttaaattattaattttatatttattaaattttattattctgtagtggtgtatatattcgttataaataattcatatatttattaagtttacccttgctaattagtctcatgtagctgagtggttggccatgaacgttttaaaaatgctcatgtagctgagtgggtccaaagcatggattaagactagtcaccaaccacatcttcgtgtgcttatggtcatcctcaaatggtattaaagggactttgcagtgattgtggaagcacccctaccaaatccctcacttctaaagccttctgctctgctctccctctccaaagacggctttcatggcggataccaaacgaaaggatcgcattgcagaactgtaccaagctttgaagaaaaaaaacaagtatctggcccaaatctgcggtgatcaacctcttgaagacccattgcaggcaattagtaatatttacgacaacacattccttcatctggccattcgcttcaaacaaaaggatatggtagaagagttactgacaatgttgcctgaagaaggaaaccctccactttggaatataaaaaacaaggaaggcaacactatactccacgaactagcctgcagcgattctatgatgaatctggcaggcaaggtgttggggagatatgagccttatgaggacaaacgtaaggagttggag

SEQ ID NO: 13267 - DNA, 3241 bp, Vitis vinifera
  Intron number 1 from transcript GSVIVT01012390001 (locus G SVIVG01012390001) derived from phytozome v7.0 (chr-ID chr1 3_random; pos 355599 to 358839 reverse strand)
attgattggtagagaaatcgtgaaaaagtgtggaggttttgttgatcttagattaaacacttatgcagaatatatatttttgggctgctggaacacaaattttattgatgaagggtgttgaatttatacatgatcttgtaactgaaatgacattagaatagcagaaaatcaagctattagatgatgaacaactacttcctataaaatagaaaccaaatcttgaccaaataaaaacaagaaaatatttggatgttgcagattttgtgcaaactccagttgtaatatttaacttcaaaattcaaattccagcagatactaaggcaaaattcaaaatttaacactcctccttgacttagtagatgcaaactccaagtcttccacgtagaaactcaaaccttgctttaggaagaggtttagtgaatatatcagcattttaactctccatgttgcaatagactagttgtgcatctccttccttttgcgcctctctcaaaaagcatagtttaatcttgaagtgctttgttttgccatgaaaaactgggtcattggcaatagatatagcagcttggttgttaacaaacacttgaggactcatttcttgtttcatgtccagatctgtcagcaacttcctaagccataaaacttgatttacagcaatagtagcagcaacatactccgccttaattgtggattgagccacaacttcttgtttctttgaacttcaagaaaatataccataaacaaaactaaaacagtagcctgaaatacttcgcatatcatcaacacatccaacccaatcactatcggaatatccatgaagaatgaaatttttaacttgactgaacttaataccataatcaattgtatctttaacatatctcagcatatgttttgctgcctgaaaatgaatttcacttgcacaatgcatgtacctcgaaagcagacttacaacatacattatatccagtcgttttgtagtcaagtacattaggcatctgatcatgcttctaaaaattccttcatcatcctttttagtaccatattccttaaaaaacttctctttttggttcataggagttgatgtaggcttgcattcttccattttgaatttcttcaatatttcttttgcatattttttttatagatgaaaatatcatgttgctgctgatgtacttctattcccaagaaataagtcatctctttaaggtctatcatttccaagacttgcttcattcagccttgaacttattgactagccccacattgtttctccctttcaagaatggcgtcttttgaggtccaccaacatcagtatgcaccaattgtactttttgggttgctctccaggatgttttctttggaaaaggaagtttagtttgcttcccatattgacaagtagcacatataggaagatctttttctaagtcaggaagtccttcaactatttgatttttcttcatgtagagcacaacatcatgatgaaagtgcctaagccttctgtgccaaagcattattgtactatcttgttgtaaaacaacaacatgctcatcttctagtaaattcaaggcaaaacttttgcccttcatttttatgttaaacacctctttgccttaagcatccttgataatgcaattcctatcatcaaaataaactttaaatcttttctcaacaagctgtccaacaccgagtaagttttggtcaatgtcaggcacaaacaaaacatcataaatgaatttcaaacttgtttggctttcgatagcaaccattcctttgcccttcattggaatatactcaccatttccaattctgacttaggaaatagttgttctaccaagttctttaaaaagatcttgattatttttcatgtggtttgtacaaccactatccacaagccagctatcagaggtgcttttattagcaaaacacgttgctgcaaacaattgctcctcctggcattggtcaactgctgcactagtttcttcctgctattgattttttcaaatcctctccacatgtccttgtttaccatacttgttacatttcacatctagtcaccaccaacatttttatggagaatgatttgtcttcttgcaatgaggatgaagtggaaaaactccattttttctggttgttgctgcttggcttgttgttcttcttctttccatttttatggcttgtatttttttgcattcttgcttgaaatgctccttttacagtatctccttgtctcatgagtcttctttgttccacagcctccaagaaatgtaataattctgtcaagttaatagttgacagatcctttgaattctccaaagaggaaattgtagcttcatatttctcaggaagtgtaaccaatatcttttgaacaatcttctcattggaaaattcttttccaagcagcctaactttgtctgctattgaaaaaagttgtgcagcgtagtctttaacaacatcaaactccctcattttcttcatttcaaattcttgaatcaagttcatcacttggatgttctttattctttcatctcctttgtattcctccttgagatactcacaaatttctgcaactgaatcaatttttgtaacttcatttgagccatagttggattggctcataggggaagaacttaataattttcctccactgcttcccaaacatcaagtgtgtgtaaatgaactgtcattctaacaacccaagtttcataattgtctccatcaagaattgatggtgcagctgtgagacttgactcctccattcctagatgattttagaaggtgtttgggttcactcgtggtgttttgggttcactcacctcacggatctttaggtgtttaggcactctcaaggtatttaggctcactcaactcattagcccctcaagataacttctgtctgataccacaatgttgatcttagattaaatacttatgcagaatatatatttttgggctgctggaacacaaattttattgatgaagagtgttgaatttatatgagcttgtaactgaaatgacattggaatagcagaaaatcaagctactagatgatgaacaactacttcctataaaatagaaaccaaatcttgaccaaataaaaataagaaattatttggatgttgcaaattttgtgcaagactccaactgcaatatttaacttcgaaattcaaattctagcagttactaaggcaaaattcaaaattcaacaggtttgcctttagcggcaaaagcacttggtggtctg

SEQ ID NO: 13268 - DNA, 17504 bp, Vitis vinifera
  Intron number 1 from transcript GSVIVT01034822001 (locus G SVIVG01034822001) derived from phytozome v7.0 (chr-ID chr1 8; pos 22106925 to 22124428 reverse strand)
ttgggttgcaatcagattcgaggcatccaaccctggtatgttccaagcactcatgtcctctattaaagaaaaaaacccttgaaactgccaacctccataccaatgaaatattttttcttaatattacaataaagttaggtgtaatgttggtatattttctctgttgcaggagtgtggttcatgcactgccatgtagaacgccatctgacttggggcatggaaactgcgttcatagtgaaaaatggtaaacacccggaagctcaaatgttgtctcctccgtcggacatgccaccatgttgaagctgcaaagaaataacacgccaaagatttcattgaatatttgtattattcatctttcatgatttaatttctgtttgatttaagttagtattcctcttcaattttttgtgtaaagttgataaaaagaataatgtaaagttgcggaatattgtgtttgggattattaatggaatttgagatatgctatggtggaattttccatagcagtctttgattataaaaagagaatttgatgttgtgttcttatttcaactcattaaatagaccaatacaatgttaagaagcctctgaatgccatgtccacaatagataaatctttgatttgacaatttttggtcattcccatttcattcaacatgataaaatatcatgctgtattagaaaagtttgaaatgggatagttgacattttttaattatccatattttattccaattctgtcaaaggttacgtatcatattaataatcaaaaaaattataaatgataatttttataaagtcttatacaattgagataaaatcaattcctttttatttaagtattttaagttaaaataattggcatacttttcaactcttattttaaaccctttcctgcttccttaagtaaaaacaaatcacttgtttttataaattaaaacgtaggaatttatggtttagagaaaaaacacttacaattaaccaagctgctttaattgaccgaactctccaagtccatgtcaatatgttaagttggcaggaaatcactgacagttatgagtggtgtgctaaaaaagattaaatgattgaactttcattttattccagctgacactccaatgctattaaattaagaaataaattaatatattatccattgacgaagcactgcatgacaatgtcagaagtgaagaaaggtggagacaggccaaaatttcacgctacttatatctaatggatagagttaaaggaataaatttgggcataacctaattatactttataaacactcaaaaataattgtaaagaattaaatcccaaaaaataaataacaataaatgaaatttcatgaattaaaatgttttttatttctagtgtttttatccataaaaaaatattttgacattataaatgatttttaaaagaatcacttagtatttgaatgtaaattaaaaaaaaaaaaagttcagaaattatttttaagtgattttttggatttttaaaaatgattttcaaatatatttaaattttatttggattgacttttaaccgttaaaaaaaaattaagttgaataaaagtttctatacctatttaattatttataaaaaaacttataacttttaaaaaaggtttcatatagaattcataaaattgttatttcttataagaattctatagttctatttttgtttacacaataagttctttcatgtttaataaaacttttacaacatcttaaaaattattactttaattttgattttaagtttcaattaaagcaaaaaatatgaagctatcccgaatttgaccttaccatccacctaattaatttttataagagtgttttttttaatattgggaagggcttttatttatttatttttaaatcattcccaaatgaaaattataagaaagaaggaaaaagtttgctcccatattagaaagaaatacaatttttaaatgtggattggagtgattatagaactttgttacatatttaaaattaggatctcctaatttcttacaactccaatcttcattattcgttctttatctaaaatataacataaggtatggttgtcgacttataatagagaacatgaaatataattttgttttaggtaacatcaaattcaatgcattaatatcaacaacatagataggattaaaaagaagaaaaaaaactaatatatatatataaactcctctagcaaacccaatgatttaacctgaataacattatttttaatatttggttttaattttacctttttactttattttattattaattccctatttttaggtttaatatgttttttaaaaatatttttctcttaatttttatttatatcaaatgttggaagatgtctttctatataattggatatcgatttttctttttctttttttctttttttctttttttgcataattaccatatattccccatcctatgattgccctatagttgacacgtcatctaataagagagcttaacacgttctagccattttcatgctaaagagaggtcgacacgttgctaccaattgtccaaccttgccccaaggttcattcatctttcttatcttatgaattagtgtgaagataactctatataaagagaggaatgctgattgaagaagggagtaaaaatatgatgtaaaatagagtagtggatgtagaaatgcaggaagaaaaaggaagaatataccgtcttactgtaattcttaattttttatttataaaggttgtgtttagttttcagaaaatgcaagggaaagggaaaaaaaatattatggaaagttattttcctcagtttgggtgacatgaaaaatatgatggaaaaaaaatataaaggaaaatactaaagaaaatattgtaatattttccctactactttccttaaaaattagcgggaaaaataagagagaaaaggaaaagttggaggaaattttatcaagttcgcattatcttcttcactgagtctccaattcacctaacttcctcttcaccagtagctatggcttcccaccaccatcgactctttcaatagtcaccaccattactctaaccatctcctattctcttttgtagtagctctttagactattctctttagaagtcttcttacttgagtaattctattttggtatttggcttatggaaaattcaacctagatcacttaccaaaagtggactggcaaagaaacccaagtagtagaggagtgggacaaatataattgcttggattttggagtgttgtggagaatcttgggactttatgagtcgaaccatgctcatccaaagccaacttagttgggctacaattcggtgttagtggcttggagcctaactcgtatggctttattacaaattaaaagttgcttatggcataagcatgatctaaaatttaaaatcattgtactttgggacttaataatgatgataatataatttcaagtcacaagtgcccaatatgtcaataatacaactcattgacttactcccaacaagcaaataacccataggttgctcccacacatatttaaaaaaattttaattgtattacttgtaaaatatatatatatctaaaacaatttgatcattttggttgtatggtcgaagtgaaaaaaaacatacaaactcaataattttgtctaaattgagttaactaaactgaatcgaattgatattaagttggattagtatgagtaaataaataaatttgttgtactttagttaaaaccaatgaactcctatttgattcttggattggttaaaaaccaacctagctaaatgtatctatctctaacttggtgttcttatcttataacaataaatcctttaggttgccccatatatactgtggacccacatttttcacgtgcgttcccactcaatcagtgagactcgcttttattggtgaaaaattagttttggaaaagctggagtcgccccttattttattttactttaaagggaaaataaaacaagaaagaaaaccctaaataagtgactccacaattttggaaaagcatgtctcgaaaacccaagtcttggttcaagaatcaagttaccattgggaaggtacttttaagaggtaacactcctctaagccctaaaaagatctctactggctaagttgagggaaatgtgacaattaattggttgatcatggatacctaagtaagctaggtgatttcaaaaatagcatgccaaataagaaaaacaaatcataattataaagaagatttaaggtgtgtacctaaactgcttcttagcgccctcacaagacatcaaagttagttcaaataatatatcatccagcatgcgctttataaaaaataatcgaacaatgaaacaaatatcaaaacacccaagcactatcaaacataagtgcagttcacagtgaccggtatattcacaaaatttagaaggtgggtgatagaggacgtacttggatagcatagataacttgtaacgtgctttcacaagacatgaggggttagataataaataataaaataaagaaatcctaacgtgcttgttatataattagcctagcaaaaatgatcaaagtatacgaaatcatcaattatcacataaatcttgtatataattcctaaaaaataaatagacatgatttcatgaaatagcaaaggtggcaaaaaatatgagttttgaagaattttcttatgtaggggtttcaccaattccccaattgatatacaaaaatctagcccagaattatcccatttgtttgggaccacaagtttagattcatattctatttaaaaccagaatttttattgaaaactgagaaaaatgcaaaccaatcaagacatggttgcatattattaaaaaatgagattctgattctaaagactctaaatgaattatttttaaaatagaattttcaaatggatcttttgagaaaaatattttattttaaaataaaataaaataatttgaaaacaatcaaaacataagaaacaagcaaaataaaagtaaacaaaatcacaaagtaaaatttttgacaaccaaacaaactaaagtggtgagaatggaggtcaatcttcactattttccgatggcatctgaaaagtaaatttgacaagagactaccgaaataataaattattaaaacttagattaaataaactaatgagatatccaccaagaattaatgactaagattcaagaaaacgcctaaattgagaataacaaatcaagagctagcataaggtcaattaaacacacaaacacatttaaactaaaaaataaattaaaattaaactaaattagaattaaaaacatcaactttatctaataagatcgattaaattgtcgaattaaaattacaaacacatctaaactaaaataaataaataaataagtaaattaaaactaaactaaatcggaattaaaaacaagatctttacctaagaggtttaattaaacaattgaattaaaatcgcaaacaaactcaaattatagaataaattaaaactaaactaaattgaaattagactttatctaataagattaattaaactaataaattataatcaacaacaaatctaaactaaagaataaattaagacgaagctaattagaattaaaaacacgaactttatctgacatgattatttaaactactgaattaaaattactaacacacttaaactaaaagaaagattaaaactaaactaatttgggataatctatatatatatatatatgaactttatctaataagattaattaaactattgaattaaaaccacaaacacacttaaattaaaagaaaaatcaacactaaactaaatcggaatgaaaaataagaactttataatgtagaattaattaaactaattatgaagaaaaaacatctaaactaactaaataaattaaaattaaactaaaataaaattttaaaaagggacttaccttcaagaatgtatgttgttgtgtcttgttggagaatggtgcggcctatgtgtttctcttgcttgtcgggtgaatgtttgatggctctcctgctttctgataaatttccaatgcccagacaacatcatgcttttgcatctcaaaatacttatcaaccaaattgagaatttcattagtaattgcaccatacagctcaacacattcacatgcaggaaaaggtggtcatgcattttcaatcacttctgcatatattttgcatgtagtgacaaattcaaggctcatatatattctgcatatattttgcatgtagtgacacatgcaggaatctgcttcattagcccgtgtgtgggctgtacaaaggagtttctggagatacatagaaaaaatgcggaagtggttgctaccttctcccacatggcagcgtcatggctgcctcatgcgtgcatggcagccttattgtgtcgcccacttaaggtggccttgtgggctactatcaatggaggaaagaaggtaactatgagacgtcaaccctcctcatgcagtccatgcggctgccacttaacaacagaaaaaaccgcctagagaactccttcaccaaaatctgttgaatctgcttccgaaaatccccggaaagcctcaccaaaatctgaacctgtgtggacctccgttctccaaaaaagtggtgtctccctctctatcttctattccccccaaaagaccaccaacctgtgtctccctttccaagtacatttcatagactcatcacaattaccataacatacttttgagaacttgtcagagcttctaaatttagtcaatgtatggacatgataacctctatgattttttgtactaataagggaaaaaagtttcgcattcatttcatccctaaatttgagaaaagatttccgagtgaaaacaatgtctgtatatttctcaatttcatggagtttggagtttagaagaagtaaaagagtgtgcatctcaaactttgcctttgcctcattatgatgaatacatgagagtgctcaatcaaaatgcttcaaaaactcaaacaactttaaatgagttttaaggaaactattcaagtatgcattcatcctttcacacctttgtgcgctttcaaacttgcaaagaaatgcacctttaaataagcctttgcccatctaggacacttagcatatatgtctatcacccaattatgttcgtggagattacacatttccaccatgccactccatgcacattcaaattaacggtgccttccatgaacatgtacctagaaaaatgataagtaaagtctttgacatagacattaatgaatgtcttgcattgaatataataagcacataaccaatgataaaactatagaaatattctcttaatggcttgacaccttgctttgtcctcatctataataacagaaaaaaataaaaaacttctttttattcattacatccaaaaatgtctccaaaacctatgtataagtgtaaagactctcatctaccaataatgaacatctaaacactacaatttgattgtgatggttaatgtcaactaagatgaccaatagttttctataagcattagtctcataagttctattaaatgctaacacatttctgaaataagtgtaatccaatattcttgtagaatttggccaaaacaagtttgttaagcgattgtctttatcaacattgtacttgtaataaaatgatgtatccatttaagcctttccacacaagtaagaaagtgtaccctttgtatcaccatttcttatctgaactttacaatcaacattaacatggttatatagatctttttttctttgtgaagcccacattaatatatccatttgattgttgcaccatgtaatccataatttgtctagttctcaggcaaacactacgcattgcactcaattaagccttatatgcattcctcatgaccctttgggattgaaagaattgggtatttttggttccaccaaaggatgattatgatcacccataaactccatcataatacacttatttatttgtttgttaaactcgatacgaagtgatgtctcacaaccaactctagttattgtcttatgttctcgttttcgattttcattctccaaacatattgtttgtctttatccttctttgagcaaacccacatatgagatgctatattttcattcttatctcatttaacatcatcctttctaacattgaatttgttaactttacgtataaattgtaaaattcttctatctcatctattgagttgaactccatttcccatacatcttcaagtcttaaaccatacaaaatattctcttaaactagcatgggctttttgtcaaacccggttttcacattgcaatcatattattaatcaaagttttcattattcaaatcaatgatgaatttctttcgtttgcctttgtccattatatccatgaagaaactaaaataaaataataaaaaaatagtagttagagaactacattatttagccatacatgttatcaatttggttttttaaaaattcaatatttttataattttttataatttttttgtatttaataaaacaatatctattttatgcgagatcatgtacaaagaatgtgagaatatgtacaaaagtacatgagcgagggtataaataatgtgagaaaggatatgaagagtactatttctcacattcttcatagcttatctcacattgttcgtaccatttctacattattcgtactatatctcatatttttcgtatattttctcacattatttatataatatctcatattctttataccctccatatttttcatataatttctcatattgttcgtattctttctcactttgttttgtacactatcttacattattcatgcattatctcacattattcatacattgtctcacagtgttcatacactttctcatattgttcgtacgctttctcacattcttcttaccttgcctcacattctttgtaccattcatcacattctttgtatcattcctcacattcttcatgtattgtctcacattgtttgtaccctccttcacattgttcataccctccctcacattcttcatatcttgtctcacattgttcatactctttctaacattgtttttactctttcttatattatttgtactctctcttacattgttcgtaccatgtctcacattattcaagttatgataaaatctttaaaagcatgacatgacatgacatgacattcactataccttgtaagcatttaggtttgattaaatgcgacttaagtgcattaggagttgcatagaagatccaagtcatgggtttattacaaatagatgacttgttcatagctagttcatgaacctaggtaacccattagaagttgtagtgcactaccttctaataggaggaatgattggtcttggccattgggatggggttcccatggtgagtgcactagtgtgtaagtttgcacaatattgaacagaacctatggtgagtcacgacataagactatcatgtagtcatgacttcaccaagctattaaattgtattgtctctcaaccttaagagaatactaagcttatataagttaaagttagtagaggctttgacctactgtgagatcgtaagttgatcatatatttcctatggattaagtcactattgatggaagccgataaaaattggtattctcattagagacaccacgatatctcatggactttaagagagtgtgttccattgggtgatcctaaggacgtgtgatcatgaaatctgtggacacacagtaattcctttagtaatttgacgtatgctcttagtgaggtagggcatgtcatttgatcatatgcacataggatattgtggtgaaattagtggataataggtcacgatctagagaacttggtgtttcattgtattgtacataggatattgtggtgcaattaattttttgtagtggaatgttgagttaacttcaaaactggattatgaatgtgtcagtattatcctatggttcctagtggggtccccactcgagttcatataccttggtggaatggttcataagggttagattaactcttaattaacttttgtgcataatagtgttttggtaattatgtaaggttacacaaaggtaagtgaataaaacctctagattaggttaattgattaattacatggccctattaggttaattgattggccatattaggttaattaatcaattaacctaatagtgtcatgtaattaattgattaagacatattttgagctaaattaagtgacctaagtccacggtaagcttaagtcacttaagcctaattaaggaaccctataaataccttctcaaaggttagggtttttaagatagttgtgttctatcatccaatttgtagatagcaatagccaacccacctttggggttcaaatatcgagtttgagtcattgagacctctgaatacttcaaccttcaacttcactacatggatttgatttgagaatatccaaatcaatgtatagtttttctcttttgatttttaaatcttgctaaagtttttaaatgtttgtttttattatgcataggatttagaaaagcctaggaaagtttttgcatgcatctaacctaattctaagatatggaatagagtgatctgggtttccttacaatttataccctatctcacattctttgtattctttctcacattgttcgtaccctttctcagatttttcatactatgtctcacattcttcatatccttcctcctattctttgtattctttctcatattggttgtaacattccttacattgttcgtatcatatttcaaatttttcataccatctctctcacattatttgtaccatatgtcttgtattgttttgtataatttctcacattgttcgcacttttttttccacatttttcgtacaatttctcacattcttcatacccatgctcacattcttcacattcttcatacattatatcacattatttgtaccctatctcacattattcataccatgtcttacattttttgtaccattttataacattgtgcataccattttctcacattattcgtacatttttttcacatttttttgtaccttatctcacattatttataccctttctcacatagtgcatagagttcgtcttcgagaagggtggatctatttcaaggacagtgtttgtcatgcctcagccgataagtttttttttattattcattatgttctttgtttgtgtctttttgggctagtctttgtttccatacccttaaaatccaacaatcttgaaataaattcaaatgaaagcttccctaattcacacccatcctgacacctctaaaattaatccatttaatgggacattctttaagagatgacaggaaagggttttctctacaattgatgtggtgaacttaggacatattttgactgatccaaaacaataagatggttctcataggttaccaacctgggaaactagaaataaacaagttagctatgctattctgagtacactttctaatgaactttttgatatttattgtcaatttaaagttgcaaaataaatttgggatgcaatgaataaaaaatatattttgcaagatgcgggaactcataaatatgccatagggaattttagaaatttccaaatgagtgaggatagagttgtatcatctcaaatccatgactaccacttgttgattaatgacttagctattgaagacattaaattacccgaaccttttgtggctagttatttagtagaggctcttccggagtcttggaaagactataaaaacaacatgaaacataaaaggaaacaaatgtccttagaggatgtcataatccatattaggattgaggaacaaaaccgaaatagggacaatattgagaaagctaaggaattgtcttctaaagctaatgtagtagaagaaaaatctaaacccaaaaataataggttcaggaaacaaaactttaggaccaagcctaatgcattaaacaaggtccaaaactcaattattaaaaaatggggtaattgctttgtctgtggcaagtctagacaccatgcagctcaatgtcgccataggaagagaattgagaagactagttcaaaggcaaatctggcagagacagaggtgatcacaacagtaatctcctttgaggtgagcatggtcaccaatatgaaggaatgggtggtagactttggggttaataggcacatctgtgggaatagaaatgcatttacttcctataccactataaagaaaggagaggaacaagtgttcatgggtgattctagatctactccagtgattggcaaagggaaagttctcctcaagctaacatctggaaaagtgcttgccctacatgatgttcttcatgtgccagatatctgttggaacttggtgtcggtatctctacttggaaaagcaggagtgaggatcttgtttgactctgataaaatagttttaaccaagaatgatgcatttgtgggaaagagctattgtaatcagggtttatttatgttgaatgtttatgatattatcaataataatacatcttcttcttttgcttacatagttgattcttgtgatatttggcatggtagactaggacatgtgaacttttcatatacgaagaaaatggttgaattgagtttaatccctaatctgtccttagaaaaccatgggaaatgtgaatcttgtgtagaatctaaagccacaaagaaatcttgcaaatcagttgaaagagaatcaggtctactaagtttaatacatagtgacttaggagacctaaaaaatacaatgactagaggtggtgatcaattctacataactttcatagatgactactcaaggtatacaagggtatatcttttgagaaacaaagatgaagcaagagatgctttcatcaagtacaaaaatgaaatggaaaatcaactaagtaagaaaattaaaaggcttagaactgaaagaggaggagagtatgagtccaacccctttaattctttttgtgaagatcatgggatcattcatgaaactactcctccttattcctccttattcccctgagtctaatggaatagcataaaggaaaaataagaccttaaaagaaattatgaatccaatgttagtaagttcaggagcacccttgaacttgtggggggaagctatcctatccgcatgccatattcaaaatagaataccttacaagaaaactagtaaaactccttatgagttgtgcaaaggttgtgcacctaatatagcatacctgaaagtgtgggggtgtttagctaaagttcttctccccgaacctaaaaaacgaaaactaggtcctaaaacctttgatgcaacgttcattggctatgctgagaatagtgtggcatataggtttcttgttactaagtcagaaaataatctggtagatgtcaatactataatagaaacaaagaatgcagatttctttgaaaacatctttcctatgaaactaaatatgaagatccctaagaaagttaaatctaagaatagtgtggcaactgcatctttctttggtttaagatccctaagaaagttaaatctaagtgattgccacatattggaaggagcaattcccaatgactttagctctctgtgctcattggaatatttagatctgagcagaaacaattttgttactctacctgcacgcctcaatcaactttcacagctcaaaggccttaggttgggttgttgcaagaggcttcaatcattaccagagcttccatcaagtatagaagaaatagatgcccatgatggcacagttatggaaaacattttgtgtccatcaagtgtctacagatccaaggaatgtgggggcctccgattcacattttctaattgcttcagactgtctgagaatgaaagcagcaactttgtggcagctacattaagggaaatgcaaagtctggcaaataaattaccaagatttcaattcccaattcaggtttctctcctctctctcttgatcatattgtaaaagtaaatcaattaaatcctatggaataattcttatactcctttgagcactactcctacattatttccatataacttgacattgattttcatgacccagatggtgccatatactccacatattgaatccagtactttcgttcctggaagttgaattcctgagtggttcagccaacagcgtataggctccacagtaatatggtacatctgcctccaaattggtgtaatactaggttgatgggattggctgtgtgcgctatttttgtagttaagggtggtgtccatgattgccctggtaatatattttgtcatttgaatttgactcaaggtaaaactggtcacctttttgctcccatcaatccagaacaccagaattcttcggatgaagggcagagattcattcattaaatcagatcacatgtggcttgggtatcaacaattcctcgccgcgtatcaatataagcgaagtaatgtgaatgtgtattggttttgaatgttcttccaggaccacttcaaagagcaggttgtgtatgatatttgattacctactaaaatttaaataaaccaaatgcctgaagaatgctaacaattgtgaaaatttctcaaagctcagcttcaatcaggttgtgtatcgtagaagacgagtttcttagaatctcttgaattttctaattcaaaatacaagtttgactttgagaatcgaccaagaaattaatcaaacacattattttagaataaatttaaaatatatgtagaatacttttaaaactttgacctcccatatatagataaaataaacctttatcaagtcagcgctgctttgagaaggaatataggattccattataggaaagaaacaatccatacgtttaggtttccaaatttgtatgttaaaaggttagaaacaggatctattcttatagagtaactgtatcaggtttattttaatcatatcttcatttcctttttaaatttctttaagtacaaacctatacccatgctttcatctccattcaaatattaggttggcttagtccacttggaattaggtcaatccaaacatttaaagtcaactccaataaaataaagaaataataatttatggaattagatgaatccaaacattcaaatctaaaataaacaaatatctctgttcaattttaaaatctcattttgaaaatatataaatcttttcataatttatttatttaatcaatatatacataccatttgaacaaataaattatagattcatttcttttgaaaaatatattttaaaatctataattattttttattattagtattaaattgctttttgttgagaaaaaaaaaaatactataaggggttgttagtatcctattttcagctttttacaaaatatatttttgtatttgttatggaaaattctgaaataccaaataacttctcatcttgtcttttataatctcaattctcaagtttaaaaaaaattggaaacaactttgtcccattcaaacgaaatcaacgatcatgacaaattgtattaacaatacgaaaacaactttgccgccaaccacccaataattgttaaaagtagttgtcaatgaaaaacagttttcatacgggaggtcaaagttttaaaaatatcctacatatatttaattaattaacatttgttgaaataatcaataaaagacttgtgaaaggatattttaaatttattctaaaataacgtgtaggtaacgtgtaagaaatatcataattaattattttgaagtggtcctgctcattgaagtcgtcctgaaagaacattgaaaaccaatacacattcaaatcacttcctcttatattgacacgtattgtatccctagagaattaccatgcctatataatgaaccatatatgaaagaaatacatcaaaagcagtaagagaattgaaggagttgtgtttaggacaagagaagaggcttttattccaaggaaaatgtggctgatcatgaaggttttcctcctgcaaattttagcgtttctagtttttggtggtggcatccattgccaagcttcgacccgtcggcttacttttgtggtaaatactatatatgattctggccttaacgccaccttgtaatcatgatatttagggagtggtattgctctcatttcgtaccatatgacctactaccttggtgtcgttgagtcgttcatgcatgctatcaatttctaattggttatacacttacatgaatggatcgatacaactattcatgcatgtgatatttcttttgggatcaggttgcatggctaacttttaattggttgcaggtgagggaagcttcatataaaaggctttgtagcaccaagaacatcttaacagtaaatggaaaatttccgggaccaaccatatatgctacgaaaggagagacgatcattgtcgacgtttataacaagggaaatgaaaacatcaccattcactggtaggtcctgtgcgtgtctcaaagaaagagcagtggtaccatgcttgcatgacatatattcttttatatctaagagggggctacaatatataactttgaaaataaagtcaaatttaaaacaatacttttaggttatttgctttagttccattgaaatacaattgatgcctcttgttattatgataatatgttgttgcatgccatcttttgttactttgaaaattagtactagttttaacgtatagttatggtttcgcaggcatggggtgaccatgcctagatatccatggacagatggtcccgagtatatcacacaatgcccaattcggccagggtcaaagtttacacagaagatcatcctttccactgaagaaggcactctatggtggcatgctcacagtgattggacccgagccactgttcatggagctataattatctatcccaagaatggaaccaagtatccttttcacaaacctgatagagaggtccctatcatattaggtataagtgttgttacttttaaaggttaatttacatattatgaattaaccaacaaagcaaaatctaaaattattgaagttgttgaaatgcaggagaatggtggaagaatgatgtgaatgcggttcgagatgaagggcttgcaaccggaggtgaccccgacccctctgatgctttattgataaatggacaacccggtgatctatatccatgctcaaaatcaggtacaaagtttaacttcccattttaaaattgtacacaatttcattttcttatatgttagccatattactttttcttattaacatcaacatatttaaagcttaatgctaagaaagaggaatatagctatgaggatggtagagccatgatttaaaacacaaaagaaggctagtccaaatataattttgaactatggagccaaatttacacccctcatcaatcaatcacttcataattagtggatcctcatggaaactttttctttttcttttggctagtcataagtatacaactttccctttctaattgcagacacattc

SEQ ID NO: 13269 - DNA, 8131 bp, Vitis vinifera
  Intron number 9 from transcript GSVIVT01008843001 (locus G SVIVG01008843001) derived from phytozome v7.0 (chr-ID chr1 8; pos 2710166 to 2718296)
tatttagcagtcgcagccacactattttcaccttggtaattatttctgattttcaggcaattacttttcaaacatgcctagttctgcctattttgacattgctataattctatgttctgtatgcttagttgttgtgccaaccatgaacgaaacaccatgtgttcattaggaaattagaggcgctgatggaattattcaacatggaccctagatagtaagaactatgcagttctttgacaaattagaagggatatagctggagcatggggatcaatcaatgcatttgagatggtggcttccaattctaagatagatattaatgaggatgaatctccagatatacatcaagaaagagaattagtattagttggaattaaattgagattactactagttggaattaaattaggattaatatttattagagtcaaattaggagtagctaattaagttataagaaaattagaattagaatcctaataggctttggattttttagagaagcctataaataagggtaattgatgtaaaccaaagtgatggattgatgattaataatatcatgttttattgcacactctgcaattttcaatgatgagactccattaattttcttttaggtgagattcctagaagaccctagtgtcttcttattttctttctttatattatttttttacttaattttgctaccctaaactacataccttgttcctttccttaaaccctaaaaaagtaaaaactctagcccacctatttggttgtagggaaccatcgcagggttgtcctacatctgatactcttttgatggataaaatttttggacctttctctacttgtgtatgtcatccttgtgcgagggctgtgatcatttaggacactcctcaaagtgagagaaattggaattcttctaaatatataaggatttaaaaaaacataaaacactctttttaacaagaaactacacttctaaatatagtgctttacaaaagtgataagtgatgagagagagagcgagagagggtgagagagagggcaacggcgattgtgatggcgaggaggaggaggaggagggctggctaagttgaacaagaggaaagcgctgttggaatttgaggatttggaagaggccagacgagtcgtctcctctgggagctgcgcgtgggaaggaacccaggtaaggttggaacattggagccctaggagcggatgttgggcagagggggaagagagaagggacgtctgggtaaggattgttgggctcccaatttcgttatggagcccagaaattttgaggagagtgggggatgcatgtggtggttttatcaccgccgatgaaaatacgagatcgatgagagatctccaatgggccagaatcctagtgaaatggggaggggaagctaaaccgaacgtgttggaaatcgaaggggaggaagaaagctacgttgtgtccctatggtgggaatgttggccggtgttgaggaggaaatgcagggacgaagttgatcgtcaaagcagggaggttaggggtgaggaggatccacgcgcggggcagcgagtgatgaagggttgggggagcgggaggctcgagatgctgcacccgtcagacgatgggacggtgctgcagggggtgggtcgggtcggatcgagaccagtccagagttaagcccgtccacccgtaattgggtctcatctgatgatatgaagtctttaagcccaatcgcgggcccaagggaaacaagaagggagggcgggcctagcctattgtttgggtccatggacttgaaaaataaaggggtggttgtaagtgatgttggcccagacgaaggcccatcggaagttgtgggctgctattctaaaggtccagcgttgtctctagcccagctgacaaataaaggcctgtgttgtttaaaggcctgcacaacaaggaagggctctaaggcattagcagttcaagaggtaacgggccttagtttgaagggttctgcgcacagtcattctccagaagcagagttctttgctgcgagggagaatgaggatacaaggaagctacaaggaggggtgaggctgacagtgacggatagggcgcttgaggaggaatcaatgaggtatggaaaggggattggttcctgggggaaaagggaaatggggaactctcatcttaattcttttccttttgatcggactctgggggggagtttttcgatcattctggggatttggatgaggagggtcgggccgataaatcactgtggctaacagtgtataaggcatgcaatgaaaggattaaggaatgtaaggaactgggaggcatccactgcaacagtgacaaaggtagggagatggaaggggtaggcgatatagatgatgctcaagttgtgagaagtgagctggagggtaactgggaagagagtggattggcaagattcagcaagtttctgggcttccctatggagggattggagaaggaaatcctaaattttctgacaaagatcaggaaaagaagggagaaaatacatagcaaagagttacgggaaaagtctaaatttgaaagggagttaaaacgtttagaatgttccataaactatgagggagggctgaaacagaaaggctcggtacagggcaaagggcgccaaattgtagttgtccaatgaaggtgaaaattttgagctggaatgtgaggggggcaaatgatagctccaaaagaaaagtaattaagatgtttataagaaatcagagggtggacttaacgtgcattcaggagacaaaagtgcagtgtatgacggatagcattgcgagaagtataggctctgggagattcctaggctggagagcagtgaatgcggagggagcttcgggaggtattcttatatgctgggatagaagggctctggacatgctagattgggaggagggtcagtttaccttgtcctgcagattccgcaatgtagaagatggaaatgtatgggtttttacgggagtgtatggccctttttctaaggtagagagggatgctttatgggaagagtttggggcgatcagagggctgtgggaggatccttggtgcatagggggggattttaacattactttgttttcaagggaaaggagtgggcagaggaggattagctcagcaatgagaaattttgctgaaattgtggatgatcttgggctggtggatcttcctctgcaggggggagattttacttggaatgagggtctacataatcagtcttgggctcgtttagacaggtttctagtgtctcccagctggatagatcaattcagtgggattaaccagtgcaggctgccccgtccggtgtccgatcatttcccaattatgttagtggggggtgggataagacgaggcccgaccccattcagatttgaaaatatgtggcttaaggttgagggatttaaagagctggtacgcagctggtggcaaggtattgatgttaggggtagtgctagctacaagttggctactaaaatgaaggatatcaaacagaagctgaaagtgtggaatagagaagtatttggtaagctggagagcaacaaatctgcagctttgcaacaggtggaattttgggatagggaggaaaatgacagaattctgactatggagaaatcagaacttaagaaagaggcaaaagaaaattacaaaaaatgggtgattatggaggaaactcactggagacaactttctagggagatatggctgaaagagggggatagaaacacgggtttctttcatcgtatgacaagtgctcaccgtagaaataattgtatggagagagttaagattaatggggagtggtttctagaggagcaggaaattagagaaggaataactaatgcgtttaaagagctactttcagaagattcggggtggaaggcggatattgggagtcttcagctagatcagatcagtcaagaagagtccgagattttggagaggccctttacagaggaggagattcagggggctttaatggagatgaatggggataaagcccctggtccggatggttttactctggctttttggcaaagttgttgggagtttattaaagaggagattatagaaatgttcaaggaattctatgagcatagctctttcctcaaaagccttaacaatacttttttggttttgatccccaagaaatgtggtgttgaggatcttggggattttagacctattagtctattagggggtctttacaagttattggctaaagtgctggctaacagattgaagagagtggttggtaaggtggtctcaaattctcagaatgcctttgtgaggggaagacagattcttgacgcttctctaatagcaaatgaagtgatagactcatggcaaaaacgaagagaaaagggtcttatatgcaaactggatatagagaaagcttatgatagtatcaattggaagtttctattgaaggtgttgcagaaaatgggctttgggtctaagtgggtggggtggatgtggagttgtatatcttcagctaaattctcagtgatggttaatggagtgcctgcaggtttctttcctagctccaaaggtcttagacaaggagatcccttgtctccttatctctttgttatgggaatggaagtgttggatgttcttattaggagagctgtggaggggggcttcttatcagggtgcaacataaggggcggtagtgagtctccattgcatatctctcatttgttctttgcggacgataccatcatattctgtgaggccagaaaggaccacttaactcatttaagttggatcttgttttggtttggagcggcttcaggactaaagattaacctagcaaagagtgaaatcattccagtgggagaggtggtggggatggaggagttggctgttgaactagggtgcaaggtgggctctttaccttctcagtacttgggtctacccttaggggtactcaatagagcgccttatatgtgggatggggtggaagagagagtcaggagaagactagctctttggaaaagacaatatatatctaaagggggaagagttaccttaataaaaagcactttggctagcatgccaatctaccaaatgtcaatcttcaggatgcccaagatggtggctagaagacttgagaaagtgcaaagggactttttgtggggaggaggacatatggaggggaaaactcacttggttaattgggaggtggtatgtacagataaggctaaaggtgggctaggtattagaaagctagccttgttgaacaaagcattacttggcaaatggatatggaggtatgcttgtgacaaagataatctttggaaacaagtgatcaaggtgaagtacgggcaagaggatttcgggtggaggccaaagaaggctatgggggcggtgggagtaggggtgtggaaggagatatggaaagaatcagaatggtgctggaataacatgattttcaaagtagggaagggcaacacaatcagattttggacagatgtgtggtgttcagagacagcgttgtccaattgttttcctcatctctttgctatggcagttcaaaggaacgcaacggttgaggaaatgtgggatcaaaattcgggtcacggaaattggaatctaaattttttgagggatttcaatgattgggagttggggttggttggggattttcttcagattttgaggggccacaaaccctctggggtagaagactcagtcctgtggagtaaaggaagaagggcgcacttcagggtaaaggaagcgtataatttgctggtgagatctgatgatacaggctttccttcaagaagcatttgggtgacaagggtgccaactaaagtttgcttttttgcatgggaggcgacgtgtgggagggtgctgactttggatagacttcaaagaagaggtttacaacttccaaatcgctgctttctgtgtggttgtgaggaagaaagtgtaaatcatatactcatacactgtacagtggttagagttctatgggatatagtgtttggtttagtagatgtgaaatgggttttcccagaaactgtaaaggatgttttagttagttggaggggttcgtttgtgggaaagaaaaggaaaaagatttgggaagccattccgttgtgtattttttggacggtgtggaaggaaaggaatagattagcctttagggggggggtgttgaacgttcagaagttaaagaatttttttgtttgtaatttgtggagttgggccaaactgtatgtaggtgaggaggcgttttcccttataggatttcttgagtggatggcttccacttaatgggaggtggttctgtttttgttgttttttgaggcttagaggccttgtataccccctgtatactttgtggcgttttgcctttgattgaatatactttacttatcaaaaaaaaaaaagaaactacacttacattgtatgaggtaaaaaaaatttacacaaataaagaaggatcagaatctttcaaaaaaaatttgtttgtgaaattaaagagattcccttttagactattacataattaaacatcaaaatccttttgcagagtcacccttggttcaatatttattaatgtgttgatagcttcagctttagtcagttatatatttttataagcaaaaatacataaattagatcaaaagaatgtcaaacaggggtcaatccatgtgcacaggaagtacacaagttacaccaaaagataaatcagggagaagcaacaaataataaaggagaatgaggaattacagctgttagtcagtctaaagaataacctttattaatgaaattcatgaagaatatctaataaccacaatcaagtagaccatgaaacatgcactgcagaacacttccatcattgtgttcaggcgcactcaatggcaccaaactttacaaacatcaaggaccataaatcttgaactaccaagcattggagcaaatggatagacattcacctcatccctgttgcacatgcagcatgcttcaccagtgggccttcctctcctctccagctggtctgtggttaagttcctttcatatactgctaccagacagagaactctttagaatggcctgaccatttgaagcctctatgaccggggcattaacatcaaattccagtaaaccagacgttctttggtccatttctgtttttgttgcaactgttctctcccttacttccaatctatgttcacttttcatgaaggaatgaaccatatccagctccaatcatagaacttcctggtgaatcttggaccaatatcctcatctcttaccagcaccaacaactgctaccctagcctttatctttgtgatttttaacatttggtcttaacttctatacatctaacctaaatctcattctctcctattccccaccgtacagacaatgtgttgcaaaaaattgccctcacctcttaatgttcttccaccaaccttttccaagcagggtcctttgtctccttctgctcttgcacaaaccctttccagacatcccctggtcaattttttttctcaaacatctctaccacagggtcccatgcagctttaaccttgtgaaaactccaaaaaggatgcccaaataggtagagggcaaattcccctcctagcattccaacaaaggcttgcttggttaattattaaattgtaacgttataactcagaaaaaggggcagttctttttaagcttgtttaaggttttttctccaactttttccacaatggcctaactaaaaccttgattgtgataatatttatgaaaggaaaaggaggcttttgaatttctattatacgttctttatgaatatgatagacaaacagttgtatctccattcttcttgggtgtgcaacctaatgaagttgagcctttcgtaatagattatgttgactgccttagtaaaagtgggaatctgactcttcagggtacttgtaaacaaaggtatttatatggcaatgttgccaagtgctatgcatttagtaatttggacatttccctgttaagctatgacattatgccttttgacgaattgggcctactttgagcatattattctttattcatataattatttttattctgctaatggatatgttttgtatatcagaccattgaaagcagtcctc

SEQ ID NO: 13270 - DNA, 5879 bp, Vitis vinifera
  Intron number 20 from transcript GSVIVT01029870001 (locus GSVIVG01029870001) derived from phytozome v7.0 (chr-ID chr 8; pos 844356 to 850234 reverse strand)
tttctggtttccccgggagcgatctcgtcagtggggtcatccctaccatccggcctcgctgatctaccattaaattttctccttctgaaccttactttgattagtttgttcatgtttgtttaaagaaatttaagactgatcatacatacagcctgcaatatctttgtgcagtctatgaggaactacttgtatataatgatgaatcccagttcacatgatttgttagaagagtttgtattgaatcctataatatactctgatatacacatcgatacgttttaaagtcatgaaggcgtttgattatggcatagaagaagactttcttttatgtcataaatatcgaaaaaacatcaatatatttttagtcttattattggtagtcaagttgtatttgttcgtagtcaagttgtatttgtttgtagttgtattcgatatcttaaagttttttagatttgaatggttgatttatgttcctcctgccagatatcccatacaagataagatatggttgatttatcttaaaaatattgctatatttctttttctgatgggatatagcattaaatattgatgttccctttaaccacttgatttgttgagtgatgtaacgtgaatctttaaaaattaattttctatttcaaaataattttaaatttattttttatttaaaaaatactaaaaaaaaaaagagaaaaaacgttaaagaaaatagtttttttttcatgtttgatttgatggtagaaaaaaaaaattaaaattaaaaataatatatttttaaattatttaatatttatatgacttgaaaaataaatcaaataaatttaaaaaaacgtataaaaataatttattaattttataaatattattttcctcaatttttttttcctctatatttatttcctcttgtattttctatcaaattttgtaggaactaaaaatgggaataatttccaaatgaggccatgtgttttgaaacctttttttatttttttttattttttaaaaatacatcatcaataaaaattttaattatgaagtgattaataatcttttgacatattatattataatactcttaacatttttttttttataaaaacacctcatcttttatttattttttttactttataaaaatgataaaaaccccattaggtgtagattaaataaaaaataaagaatattaaaactaaaaattaaaatgtaaaaccaatgatgtaaaaatagaaatagggaaatagcagaaatcaatattttatatttatatttttaggttcaatttttttaattttaatcattttttatttttcatttcatggttgatggtagctaatcgagcttttatacaattttattattaaaaaaaggagagatttttgtaccaaaaacattagattatcaaaatattcgatagaaagttattattatccacttaaggattgaggataattttttcatttgaggtgatatacaccctttttgcaaatcttaaaaattttatggacgaggttttattatgtattttcaaaaaggtatataagattttcaaaacaaatgagttggtctaggaagtattcttaaaaattgttctaagatagaaaatgaatccatttacaaaatttgaagatattaattttcaatgggtgttgaaaatgaatcatcaatcatatgatgacatatttatatttttaattttaattgtctatatcgtaatgtctcatatctcatttatttgtatttgttcaacgatttagacatcatgattccacacacaaggaatgtttgagatttggatttttatgaattaatattgatagttgacttgattttcagtttacaacactcaatatcaatggtgttatattatgttttcaattttaattgtttgtactctaatgtctcaaatcctatttattttatcatgattttgtacatgatgaatgattgagatttagaatttcttcaattgactcaacaaaagacttaatataaatatatttaagttatgtttggttctcaaaaaatattaagaaagaaaaatactaaggaaaatgattttctcatatttgattttacgataaaaaatataaaatataatcaaaattatttaaaaatttatgcattttaaaatgagttaatctttatgtaataaatgaaaataagtgaaatagatttaaagaaacatataaaatattttagtgactttgaatctatttttttttatttcattttttatttcttttaatttttctctttatttttttccattttctctcaaattttttttggaaacaagcataaccttaatttttataaataaagaatatttgtacctaaatattaatatattagatgatttttttgaaaaatattttcaattcacttgttccatcattaatattatttttattaatctttttaaaataaacattttttcaatttctatttagtagaatggttgaaaatatttactaagaagtattaagttgtaaaattatttacataaaaataaataaataaataaaatgtggggaaaacttaaagcctagtagaaccttttttgtttttgagactcaaaaacacatttgattttttttttttttttttaaatatagattttttttttttgataacttgctttaaaaataaagtattttctcataacatatttacttatttttaattgttttttgaaagttatttttcaaaaaattatataaaaatataacaatgatagaaaataaaacactataaataaaaaaatatttttatgaaatatttgaaaaacaaaaacaggttgagaaaatattttttaaaaatattttagagtagaaaataagttcatctatggtattaaatgatattttttgccatatgcatcataagtttggtgataatatatatacatattttcaattttaattattagcactcttacatctcgatcttatttatttatattatataaattatcatacatattcaacttctcgggtttgtcggtgtccatggaaattttgattttttttttgggtttttggtaaaactcatatcacacatcactcaatatcaatgggagaaaatgtctatagttggtgtcatattcccaagagaaattaatacatattccaaattcaaatcacatcaatctttttatcatttagcacttagggcacggcacataagtcaatggatttcttaagttaattcaccgatatactaaatataaatatatttaagaaatatgtaattaaaaggatataataatccctaaattatgaatctaaccactttcattttttttaaagtaatttattttttatataaatatcatttactatttcaaatatttatatatagatttttaaataaaatgttatttaaaaaaaaaataatgagaacatttttgtcaaaatgagacaaaaaaaaaatggttaaatttcaaaaattaggttttcacatactttttaatcaaataaccttatatttaaattttataaaataaacatttgatatcattttaataacagttttttaataacttactataaaagcaaactattttttgacaacatatttaattatttttattttttttctagaaattattttaaaaattaattatacaaatataaaaagtaatagaaaataaagcattataaacaaattttattttttaaaaaaatattgacaaacacaaaaaccaagttgaaaaaatttctagaccctatttgaataattttctgtttttaaaaattgctaacattgtttagctattatctttcgaaaacaatttttaaaaataaagtggcgtataaaataatttttagagaataatgaattatttttattatttattttttaatttaaaaaaaacatgaacatgttttaccatatttttcaaaacttgtgtttaaaatttattttttattttttaaattaaaaataattttaaaaataagtttaagaaaacatcatcaaacgaggctccaaattcttgaaattttctcaaaaattattttggaaaacattttcaaacgctggttgatttcagacgttatcaattatgaaataatttaatcacttatttatatcatgtgacacataatttgccatgtgaacactttgcacatggtacgataaaagtactagacatttaatcttaaaaaacatatgtgatgttacaacgtattctaaggtttgattaaattaattgctaatccgaatccaattcccgtcaaattcaactactagatccaaatggaagggcctatattatttattaatttaaatatctattaccgaatcccgtcaacggtcactaatgcttttccccaggccgtcactttcttgaaaaataaaaaatgtaacctaaaagtctaaaacacgacatttacatcatcaattacgcgatggtttgagaaaactttcactccaatgtagatattttcgtctggttttatggaattccaaaattatccaagatatatttttctccaacgttttatttagcattgattacttagatttttataaataatttcgattttttttaaaaagaaaaattctattatatatatttatatcaaacttttaatttaaaccttttgatatgaatagctaattttgtttgattttaaaaaatttatgtaatactatttgttgaatgaaattataaataaaaataaaattataatataaataaatgagattaaaataagaaaaactaagtacaatagggtgagatattttaataaattttttgtaatattatttgttgaatgaaattataaataaaaataaaattataatataaataaatgagattaaaataggaaaaactaaatataatagggtgagatattttaatattcgacctaataaaaaaacagaatttgatgaatcgtgaagtcaaattaaatcaacgtgtgtgtgttttaatatgatatcttaaaaaaaaatctaaaaatgatgaaaataatccaataccaataataataattttataactattttttctaccattaatccatgttattatacattttaattttttttaatggatgaaaataataattaaaatatattgttaaaaaatattcaattttttgttttatgaataaaaaaaatatatttttttctttttttcttttaatttattttaacaaattgatccttatcttcaaatataatattttttgttatatttttttaattaataatccatcaccaatctcctggtagaaaggattgggtgagcgcgtgaaaaggttggggaagagagtgatgaactggtccaagtacaagcctatctgctccagttgtagtcaaataaccaactactctggagacaaaaacgccattgatgaatattttgaacctcagtgatgaagacaagagctgttaaaactattatcaatattacctttattctctattattctcaagtggggagcatgaggacaaaggtgctatcagagagatcgttttctcatataaatttttttcttcttttttactattctcatgaagatgacaacgacgacgattcttcagcccaccacgtgctccgtcaccccattgactttctcgttttttgggtttcaaatctcctgttctctcacacccagctgcattgttgcttctgcttctccctacttcactcttgcaagtaagccctttttgatttttgatttttaattttttttgtggggttttttttgggtggttttgtttggtttgaattggggggtttgggattttgggtactgtttggttggtgggaaaattgagggaaaaaaagaagtcaaattgaatacagctgcagcattggaaggtgaggagagatttccttctttattttattttttgggaggggg

SEQ ID NO: 13271 - DNA, 5992 bp, Vitis vinifera
  Intron number 3 from transcript GSVIVT01018063001 (locus G SVIVG01018063001) derived from phytozome v7.0 (chr-ID chr5 ; pos 6029551 to 6035542 reverse strand)
ttgtctgaaattggtggtttcgatcggcagatttggacaataggcagcaatatcatcaagctgaaattctcacagaaaacattcttgttttctaacacaagggaggctgttgtgttttcttggaaaggaggccaatggatatgcgggaatgcttgttgcttatgatgatccatgagcacaatcatctgcgattataatgagcagacaagtttatgagtctcgctcaacaagctggctttatggatattgttggtctctcttgcttttctggttcttgtagtgtcgttggggaattcaaaagttgtgaatggaaatgagcagtttaatgacagcaagacagagtctgatgatacagtgaatgcggtgggaacgttgctgcagcagttactattgtggttgtagcaattccagaaagcttgctgttgtgggtcgcgtctagaagaggctgatgggcactgccatgatgccaccaccatttttattgacaaaaggggcaacctttcgttgaacccagatgaaagtgatgaagctttcgctcagtaagaacctactgaagaaagtgctttattttcagatgccacatgcgctcccagattaatccatcaagaagttattacagcgcttcgccaagcatgaaacgcctggatctgggtggaaggatggaatatgtgcaataattcaatatgaatataatttctttccatgcctccaccatttgatcccggcaagccatatgctcaccagagtctgatctttttgtgcaagtacgatttcaggaggaagcaaccaccattctcagaacgtcaaaggccatatagtgtaaagcccctttcctgaagcacgaaagcaagcaaatatgccaggttcaatattatggcctttactagcatatggtggtagaagaacctatattcttggaggccgaagcttacttaattcggaataattaatatagagcgtggccaactgcgacaagccatctgcaattgaagatgctacaaccacaatagtaagtgcagcaacaacgattccccccacagcattcactatatcatcagcctttgtcttgctgctattgaactcctgattcccattctcatcttctgaattccacgtttcaagtagcaaaccaacgacactacaagaaccacaaaaacaactgggagaccagcattatcaaggataaagttaggttgttgagccagacttgtgtatgtatctgttctttatatattcacggcagactgctcatggatgtcttccccacaaacatctgacatgtatatcaattggccgccccaaaagacaaggacagattctgcctattattagcctacccgtttcagacaaaatcaaattggatatcgtcgtcggcctgatcagatcataactggaggaattgcctattttccttgagtaacataacagcagggacatcatcgaccagaaagacagccacaaggaagattccacaccgtaacccttctttcagcccatgttcattaatggcaagagaaagtgcagaaaagctactagtatgaggatggtaaaaccctaatggaaagagcattttttaggtggctttgccatgtttgaggccttcttcttcgcatccccttctattcctttaaagctagctctggccttttgtcttccactatttgaggtgaggcttgtttcatcaatcatggagaagtcctaccccagcttaacattgatcacaggtatcagattgattatatgtttttggcatgccgagtgtggaccctgtacgaccgtatgcgcaatctatgatcaagtcattagatttatgtagtgtttcagttcttgtgaacctgatatcaataatttttttggcacttcaaggatactgttgtttctttcctgtactgcgctgtctgtgaggggcctcccgagatgccaatggtcgtttctttgccaatttgtatgcttccccccgtgtcacatgctctagctacgtgaccagcttaacaatgttttgcttgctgaaaagtcaaaagaataatgtggaaaaaggttaggaggaaagacacacacccaaatatatatatatatatatatatatgacatttcttccatcttatcttcaaacttcattgtgattttgtagattatcttatgtgattggttgaatatccaaatcacatgtgctagcctctctcgacgtggcatatgaaatgatggctggcaggtggacctagtcaacagaatagcttttattttcatacattttttttaggctggtccacagaaaaggactgacgtaacagaaaaaattaaaactacaattaattattatctttctaatttttggcaattatcaaatcaaaattataaaatgggacaattatggtgaagggttgatgaatcttttaatttcatcaacatctcacaaatatcaaagttgcatgcgaagtacatgaaaattttaggtctttgctgttcgcacatatctatttacgttttttttcttaattttctcattatttgtttttgagattaaccattaaaaatattattcacatacatgtacctatatccacatattgtctatatatttataagatatttgtattaaccaagacgccccgataaatatgctattatgaatatatttatgtatttttataaatattaatttaatactaatatcttgcataggtgcgaaaatatatatatataatatttgtgcatatgtgtaaatagatgttttagtaatttggtatgaaaaagggtcaaagaaaataaaaagaaaagcatatatattaatttatgatatgcaagtttgtatatgccttatagagtcatttaattaaattttaaaaataaaaaacaataataatcaaaggttaaattaatgaaaaataaattaagataatagttacggtttaaaagaaaataaaaattataggaatttaaaatagattttaagaataattttatttattaattttatgaattttttagaactttaagatattaattatcaagagtatttaaaagataaatattaatatattaaatagttgcagtgctcatcagacacctatcatctaattgtgaaaacttatattctttgaggcaaatatgaattttatatgaaccttagatccatttgctagagatgaaaattctcaccttctaaaaatcatattaaatgtatgttaggtattttcggatgataacttcttcacataaccttcaaagcaattttgaaatttactttactattttaacttaattatacaaaacatgtgacttaaggtaattatagatttatatacccttaattttaacataattataccttacaaaattcttttcatatcatatgggagaacaaatttatttataaattattacttttcattgtacatgagactcaatttcagtatgtaagttatttaaagcaccaaagaaaggtgaggttttttaggaaattttcatataaatacaaattttgaaacatgagtgtgtttgagatcatttttattcgaaatatttttagtaaaagtgtttttttggaagtatttttcggagaattacctattaagtgcaaaacacttgtttcattattgattttttagattttttaaaatattttctaaattttgtcaaataactaaatttttcatattttttttattttcatatgaatgtatttgacagaagtatatttaatgaaagtattttttttaaaaaatatttttaggagaattacctactaaatgaaaaacacttatttcaatactgatttttcatatttttaaaaatattttctaaattttgttaaacatctaatttcttttaaaaaacattttttagattaaaaaacgttttattgtcaaacagattctaagccaaattccattaaagcccgaagaaaagataccttatatataaataaataaataaagttaatttttttagacttttattgttcttgaaaaaattaagatttttttttttaaatttatcactttttaaaaagactataaaattcttctctatatgacacacaagactagattgggtagttgaaaattaaaaaaaaaaaatctaaaatttaaattccaatcttctcaataatcaaatataggctaaccgattctctttaaataaactatgatggcctctttttatgtgtggcatgcggtgagttgatataattaatagaatagctcttaatttgcatgcataaagtttttctcatgttttcttcttgacttaaaaatataaatctaaatataatccaatttcattatgtaatttatttcttaattaatataagtaaaattaaatattgtttgaattaatatgattaatttcctgatctaattaacatattattatttaattgaccaatttattcaaaattaaggaagattattcatatcaaacactttcaaaagatacacgtggacttggggtccatgatgcaccattttttttttcttgcaatttaaaaaccttttcacatcactttcctaattcctattgtacatttgacgaggaagttgtcagaaaatcaaagtctagtgtgaacataaataaattatttagatcatgttcccacttcccatcatatgtgctttcttggtcgtaacaataaaagaaacttggtagtgctttccacttctcaaaactttagcatataagtcttgcttatgatatgggattatccaagataagattgttccatcattccatgaaattgtctaagttatcatattttttaataagtgacgtggccttattttaatatactaatatcctagtttttctcaccacaagttgtcgtaggacgaaaaaggctatgcattaaggaatcataaatatgtcagattaaaattctcattgattgaatttaacttttctaacaaattgggaaaaagaaatgaaaaagaatcagatagaatccatttatgtatttgcaaatgagattctattcaaacttgagattttgttttcttcttatttcttaatttttctctaagaatgatccccctactgtggtttaatacctcttcttttcctctcatggctttctgaacaagggaaaaacttttgaacaattttagttatactgtacattccctgatatatataccaacagagccttgtggaccaaagcttcttagttcttgcctctctagctcccagacgtggaagctgccaactcttctggttgtgtgccgatcgatgaggatggagagatctttagaattatttagaaacaagtgtaaagtctaactgactccatttatatcgccgtttgtcgactggataaaaaggaagacaacgcgatgaagctatgaatctacacctgtaaccagcgaatgattatccagatccatcaaaccttacgcggcgacaggtggagttgaagaacattttgaccctcaaaaattagcatttccccatcacccattgcatcgcctgagctattaacgactgttttgggatcctcgtaaattcgtaagcgcttcctggaaatttctgggtaccgcgttgactagtcaaagtgaaggatattttttattttatttattatcataagatttcatatttcagatatcttacaatttaattatgtagttccttgggcacgaagaattcgctacccaataaacacgaacgttacaggatggaacacgtcatattcaatgcaatggggtctctgaacaccgactattagtattctccttataagaacattcaactctttagcacttctgcattcacgtggttcctcccatttcatgcttcttatctcacacaatttctctataatagctttaattttcatttcgttggttttctctcttctttcattgagctaggtacgtgttactttgttaaataattcatcttcgtttccgctttatcatctttgtcgtatacttttctctgttgaaaagcatgtccagcattttgcatgttaactcaagttgcagagagtccatactcg

SEQ ID NO: 13272 - DNA, 11368 bp, Vitis vinifera
  Intron number 10 from transcript GSVIVT01023507001 (locus GSVIVG01023507001) derived from phytozome v7.0 (chr-ID chr 14; pos 10746061 to 10757428 reverse strand)
attttgctccttaacaggaaccatatttccatctggtaaaaatttgacatctcttagattacctctaataattagtaggttattttttgttatgtttcttattttgtagaactgaaagcttgtgatggaggtgcattagtgttctcttatgaataaatcaatgagatgattatctaccagttgcttgttatggatagcataaggatctttctgtgttctcaaaatcaatttgtctggtctgaactccataccttttgcattgtaagacaaattgacatatacctgttctttgtgtgcaagattttaagttctgagttgagcatgcttcctatttttgaggggatataaactgtgatatcttataatcgaatgtgtgtcatcagttctggattttgtaaatcggcactgccatgtttggtttgctggataagcaatctggatatagaatatatgcattcctggatattttctccctttgaaaatgcaggaatttaccttctgaatagtgctttgatttctggtaattgggatcatgtaataataacatttgatgattatgcttcaatttggacaatcatgttaaaaggacaaactaaatgaataccagatttattgagtaagataacaatgaaaaaagcttgtttaatttatcattgttggtcatcaaaaaattgtgcaggagctgttttgatatgattaattaattaatcattttaattcttattaataaactgaatgctaaaaaaaaaaattatgggtagaataaattgataaattaacaaaagaatgattaattaggagtaatcctttatattaagtgtaaaggtctctgatatattgattctaaattagcttattgttaatatgatgatgataagataagaaatctagatctttaaatgatttgaagtgtctttcttccttgtaggatctgaaattcaaacctttgtagtctagaactgtttatggccaaaattcttctttacaagattcagcctctagaccttatatatagtaaataaggtttaccagaacattgtttggcaactttgtgcttttactagtgggatataaaaatcctacccttcccatgggattcctagatgcacaaataagaaatatagaggttggggcagggacctatcctatccttctatccactctatattgaacaaagtgtgcaaatatgatttctgtatttacccattttattcaaagcaaatgcttaatactataggtacttggaaaaagtttaactcctagtttagtgaggtagataatgatcatctattatatgttaggtggactctcttgtattttgaggcagcttcgggcttgaagatcaacttggagaaaagtgagatcatcccagttgggagggtggatgggtttagtggttggttggctaaccaaatggtttagtgggtggggagccttgtttctgattatttgttatagcctttgggtgtattcttttaaatctttttcgatatggactaaattgaggaaatgttgaaaaggtggtttgtttcttggacactttagtatctctcttgaaaaacaccgtttatgaaaaggatgaagaatccttaatatatatatatatatattcaaaaactgatcaaaatataattgagcttctctactaagcaaggagaactatacaaaatggattagaccacataaaactgtacatagatatcatctcctcaaactcggactaagctcctctcattgctaaccaagcctttttgatgtacacactgaatactaattgagctgaatgatattgagaggaatgcctttaaaagcgttagtagaagaggcctataaagaggaataaaagtgaggtggatcccaagtgtctttgatgtcctccatttatcctcaaagatcttaacatttctctctcctaacacgatccaaatcaatgtgacataagtgattttccaaagggccttgcttgtaacaaagctccccagagcctaaatgaagtgatcattatgttgcctatactcttgggttgaacctaatccatcctaacctgtttgaatggactgtgcaataaccccaaatgcattggatagtgtaggaagaggtggttaattgcctctccattctctatacatcagatgcaccaatcatggtaaacgctttgaaaggtcttctcaactgtaacatgttattggtatttacctttttgtgtgccataagccaaacaaaggccttgaccttagacaagactttagattttcataaaaaattggttggatagaaaggaacaagatttgatatattggacaaggttaaaaaggaatagtttaatgggaatgagcctaaagaggacaatgaccagcctcttgcatttgaaacggttggagatgagtgcatgagagtgagagatgacccgagtcttttaaggtacttgtagaataagaaggattggaaggtaaatggaatacatttcttcttttatttcaatttgtacatcccacatatttatacaaatactcctagtacaaaaaatggaaaaggattggaaggtaaatggaatacatttcttattctatttcaatctatacatcccacagatttatacaaatactcctagtacaaaaaatggaaactttcctaacctaattctatgaaatccctttgattataggattgttctaatcctctccttaattacaaaaatatagaactatattctttcctaattacattcttccacactccccttcaagctagtgaatagatgttttccattcccaacttggatatacttgcttgaaacgttgtattacttaaacctttggtaagtatatttgcaagttaacggttagtagatacataaggaatatagatcaacccactatctagtttttcctatataaaatgtttgttatagatcccagttataatttgttgccaatgataatgaaactttgatcctattcatcttggcaactggggcaaacatctctaaataatccacgtcatatgtctatatcctttagccatcattctcgccttatacctttctaatgttctatttgctatatacttaatagtataggtccacttacatcccactagtctttttgttgcaggcaaatttaccaactcccaagttttatttttctccaaggcctccatttatgcatttatagcttgtccccaattttcattagataaagcctcaaatagaatggttggaatatgaatattgttcaaatatgtaagaaagctattatggatggagacaacttttcaaatgatacaacatgggaaagtggatacaatagacatttagtgcattccctcattccctccttgatggcaatagggaggttttggtctatgggtttttcaaactgaagttttgacttggtttgtaagggaggatgagagaccgttacctcattttgtgaagtcagttcagattcttggacttgtattagttgaggaattgcaactttcttcctttaagtatacttttccaatcattcaattcttaggagtaggctcaatggatgacttgggttcaaagtagggtaaagatactggatcagacactttaggagggtcaatacgatcaatgagaggtatagatactggatcaaacactttaaggtcaataaggtcaatgagaaagggatcactgaaatagaagtcctgatacttgtcttccttgatggaattctccccttgaatataaagagtgagaaaataagactcactttcgttgaaagtaatattagttgagacaaaaaaaaaattggatggtggatgataacacttatatcccttttaagttaatgaatatcctaaaaaaatacatttgactcctcttggatccaattttcctcagtttgggctgtgaatatgcatgaaggacacacccaaatatcttaggaatgagatggtttatggttctcttattaggataaaataatgagagtatttttatgggacttttcaaacctaagattctagaaggtaatcggtttatgagatgtgtggggtttaggataacttcccctcaatgagatttaggcacatgttttgaaacaaaaaagctcatgttgtatcatgaaggtgaccatttttcctctcaacaactccattttgctatggggtgtttacacatgatgactcatgaattataccatcatgatgaaagtatggagttagaacttgattgaaataatctccagtgttgtcagatcaaaaccttttgatagtgacaccaaattagtttttttatcatgttatggaaatttaggagaacaaaacttacattatattttgtttaagtaaaaagatccaagaaaccctagtacaatcatcgatgaaagacacaaactaacctgccctagatatatttggaacaaggtaaggaccctaaatatcactatgaattaaatggaaaggttctgaactttttttattattgattgcttaaggtaaccaaagatttaagacaaggagatactatttccccgtgcctattcattatttataatttgcagatgataccatctttttctccaaatcttcaatagaagatctacaaaaccttaatctaaatttattggtttttaggaacttatcagggcttaagatatgttgaactactaattttcctaaaagattaagcttataggatttttatccacaatgtatatgctctttaatatcctccttcatgtgcaaccttgtactcgcaagtggagtgacacacaggtttgtaggcaaacaactataagcaacctcttttaggcttgcacatggggttgataaattggagaaataaatattatgcaatgaggcttgaacacatggcctcctgcctaacgagactctaataccatgttaaactatcaattttcctaaaagcttaaacttgtaagatttaggtccacaatgtataacatactttttaccaaaatcaatttagataagagcattcttgctaatatcaacacaagtcaagactaatctctaggtttgcttctatgcttggatgtcaaatcttaaattggcctttatcttatctaagtttcccattaaggggaacctgaaggcaaacacatattgggttctattgattgatagaattttgagaagattgaatgggtagaaaaaaaacatttttgtcactaggatagaataactttaatttagacataaacgtataatatctcaagctattttttatctgttttcaatatttcaacatcaatagcatcaaagattaagaaattgcaaagagattttctcttgttagagtttgaaggtcaaggagggcaaaaggctcatcttatcaattagaacatagtttgtaagcctaagaagtttggaggtttaggattgaagaagatccctttgagaaatactgctcttttaggggagtggctttggaagctccacaaggaaactttttccctttggtatcaagttattttgggaatttgggagacacatcctaatggaaggaacaacaacattctgaccaaatggtcatattggtgcccttggaagccaattgcacagattttccagttttttattcacacttgttttgtggtgggtgatgacatgagaattcacttttgggaagatttatgattgggggatcaacctttatgttcatggttaaaagtctctattttaaccatccttggcaatgtgtcttctttttcttggaaccttaacttccatcacaacctgactaatttgaagattgaggactatggaagaatgtaattaggaaagattatagttgtatatttttataattaaggagaggattaggacaatcccataatctaggggatttgataaaattaggttaggaaagtttctattttttgtgctaggagtatttgtataaatatgtgggatataaatattgaaatagaggaagaaatttattccatttacctttcaattcttcttattctatgtggtatcaaagccttaggctcttaaatctagaaatatatatatatatatattatcagaaacgaagaatagtgtattaatagtagtaaagatacaagagaaggatgagaggtccttccctcaaaatacaaaatctgatcaaagtaagaatacacccctctatagaaaactatatacaaagataatccccaactatctcaaacttttaaatcacaaaccacaatccaattgagttgtaaaacactaagaggaagtcctttaaaagcaacaatacaagaggcctatagagaggaatagaaatgaagtaaattccataacatcccttccgatctccccttattctaaaaaatcctagcgtttctctcttgccacaatccacaacaaagtgaggcaagcgatttgctaaagtgtcttgcctctaattgaattcctcaaacctctaaatgcaataattatcatgtcttcaatactcattggtggaacctaatccaaccttactagattgaagagtttgtgccgaagcctagcagttaaagggcaatgtagaaaaatgtggtcaatcgattctccatttccttcgcatagaatgcaccactaaggacaaagggatttgtagggtcttctcaactgaagcttgtcattggtgtttacctttccatgtaccactaaccaagcaaaggccttaacctttgaaggggcttttgatctccacaaaaacttggtcggaaggaacaagacaagattttagaaatttgacaagggtaagaaaaaagatttaacagtaaacaaagcctattgtctttggggaattgggagataattcatttttgggaagatttgtgcaatagccttcccaaccactagacgaatatatggggagaaatcctaggaaacttgtgtaatagtcttccaaggacatttgtgtgaccatctaaccaccatgttggcgtcccatccattaagatgcgtcccatagatactcgcaataacctgatgccacaaaccacttctttccctagggaaccttcaaagctatttccttaagagagcattatttctcaaggaagtcttcccaaatcccaaacctttcaactcctttggcctacaaataacatcccacctgataagatgatctttcttcccttcccccaccccggatcaaaggaaatcccttcgtagtttctcaatctttgaggctattgatgctgggatcttgaagagggagaggaaatagctagggatgtgaaacagacttggctgaattaaagtaatcctcccccctgagacaaaagagtctttttccacccatccaaccttctcgatattctctcaaccaccggatcccaaaagaaaaaaagatttcttttcggatttcttgttgagttgtagatcatagtcgatcttcattgttgagcttacggtttccctcacatctgagtcgatcttcattgtcaaccttaaggtttccctctgttgcaaacacagcctcgtactcactccacaaactcagatcatgaactcaacaattggatacctcagttttcatcctcacgccattctcttgacgctgacgtccttgtgaactcgtcgtgaaaccaaaatcatgccctcgactttgcatttgtacaaatcttctttcccacaagcctcatacccctagggtttcataattagatttaaggttaggcattccacttttgatctatatagtattagttgataaagatagattttactaggtttgtttttatgagtttggctagattccttgactgagcatgtttcatttgttttcttggatgttgaagtctcaattaggcccaaatcaatccttttgaattgaaccaaactaatctcaatatgcttggtttggtttgatttttctcgccacataggtgtggttcggtttgcttcagacacaaaccgatcaagttggttcgtcaaaatgttacctaataactgaccaaactgagccttcttacacccatacttatacaagtaggtctaaactctgagatttttttagtttgactcttttttggcacaagcaatgaaggtagcattaatgctttggtttagtacttgttattgtggaactctcaagaaacccttaaaatcctccttgattacatcccaaccctcctaaaacattgcaatgttgaatctcttatgcctagatgccttttccttaattgaaatgcgacattgtaaacctcctcttctaagaatgggtggtctagccatgcaaccttctttattgaaatgggagaccaattcaatccttctaagctccaagagttgccaaggggcttggagtgtaactttctaaaaaaatgtactatctcctccaagatgttttcaatgttatctagaattacctcatcttcaaacaatgaggactttttgaatttttttattttgcctactattggccaccctttggaaatacttggaattacacttcattctttttcaacatgaccttagctttttgtctctagtgcacctcttcctttagcaaaatatcccttagttccctttcccttaagaccttcattgttaaagttcaggagttaaatttccttcttgctcaccaacatcaatgctaacgatgtctgaaagaaatttatttatttatttattataatcttttttcagttgtgatttgacaaattgtagtttcttcatgattttatgaccttcccaacctttcacctgtcactcactccactaaagcctaaatcttttcttgaaatctaggtatggtaaccaaatgttttgaaacctaaatgggttcaaccccacttgaatggattggtttctagaatgattagacaacgattaggagtcaatctggaaagcacttcttagaggggatcccacttgtttgaatacagaagtctatccaacctcttccaaattggaattcttgcatgtttgaccatgtgaaagacccaattctaagaggagggtctattaattcactttctcttatgaatctatcaaaatcctttatgtttgaggttaaactagaactacctaacttttctacaattcctcttactatggtaaaatcctctctcctaccctaacacacacaccatttcgaaaaagttagtctaaaaaggttttgtaactccatctagaaatcctacttgagattcaaaatattaggcccataaaccgaggcaagccaaaaaaatcccctaaaacatctttctatcttgccaatacttttctagttgacctttgttactcttagaatggtgagaagcagattggagggatctaaaagtgagttccttttgagtgggtggattgggggtgggggagattttagggggtggaggtgggttggtttgggaggccattgagataagaagattcacttagttggtggcaagtatatgcttgaaaagtctgatgttagcttgggtattaggaattttaggcctcttaatatgccttacttggtaagtggctttggaggttgtagtggagcatggcaggtttcggagaaaggtgattgttgaaagcatggagaaatggagggaggttggtacactatagaaggtagagaagttgaactccttttctagttctagtgttaagtagataagctggtttggaagattgatagaaagggcttgtttggagttatatggtctataatttgttaaatgagtgagaagctgctactttcctatctaatttgcttttttgaaatttgagggtgccttatttttatttttttgttttttcttttgtttttgtgtttttgtgtttgtttttttgtttttttgttttttttttttgtgtgtgtaaatccttgcccaatccttaccattgggcatctcatcgggatagggtgaaagctggtcaattggttttacctttgcagacaagattctgaatcagcagtcacattctcagccttcatgattggctgctgcattatggtcctagattttctgtccatcgggtgtttttgtgttttgggttcttccttgttttctgggcatcaagcgggagatagtttggaagttgatttctctgcctgttctagatggtctagaaaaaggcacaatatcagaacacttaaaggattggagtaatctggtctggaagcaaaaatatgttcttgaagacctttctattctattgatattatgggcatgggttaggtattggcatgtgctgtactggctttagctttttctccttttgtgtttgtacatggtttacacccctgcttttatttggagcttttattaattcatttaccatatttgccaaaaagctcattcaggttaactaaatttttagtgatgtattacgcacttgctccttcacttgagcttcaatctacttctgctaagtcatattatctcctcaactcttcaattacattgttcctttaatcatatagcagcatgggtattttcgtgggagtcgtgggttacacctgaaaaaaggatttcctaaatagaaatagtgcatgtaattgattagattggtggaaccaatatgatagtggttctgactcttttaatgtttatgtgccatggtttaattgttatgtgaaatgttcacctacattcactatttggcttgttccattttcatcaatatattccatctgattggatagcctaggatttttattccttaatcttccttcccttgcttctgggaaaaaatgtggcttaaaatccaaagaaactgagtttagacaaggttcctagtattaatccggatcttctcatctttgttgtgcttggtttgcaaaaaacttaccttgagaaaagttaaacttctttgacctgagctgggatatactttcacccaatgtctgctggagtttcttttctggcctaaaggcacatgagttgtctttaaagtgtcctctttaatcaggaaatgtctgtcaaagtgaatatttcaatctcaattttccttgctcatcttccttgtagccttctctacttttcttaatactatcatgtctctttccagctgtgacccagggtaccattggcacaccccatataaagccactaattccactgcaattgatgatttttgtcctttgctattcaaaccattgaaagtgttagtgataggtgattttgagaagatttcggcaacagagtaatcttttcataaacctcgagaaattttagaggatgcagtcatatccatcaaaactctattatgtacctaaaaaagtgaggttaggcattgtcctggaaaataacatgcgatatgaatgaaaattgtctttggaaattttggtatcacagccctgtacctaatttttatgtgtgagtcctatgaggttaaacctgtttttgtttttgtccctaacgagtgagttgttcttgatcatctagccaat

SEQ ID NO: 13273 - DNA, 4729 bp, Vitis vinifera
  Intron number 2 from transcript GSVIVT01009199001 (locus G SVIVG01009199001) derived from phytozome v7.0 (chr-ID chr1 8; pos 6177844 to 6182572 reverse strand)
ttgtggtgaagttcaataaggtttttcttctacatcatttcttggatttggtttgtttaatttattaaactttttagttagggtagccaaatgggcatatgtttcttaccatgttgtttctagctaacccttttaagtggtgcttacgatctttgctggttagtggatcactttaatttatggtgagataatgattgtttggttaaacaagcaacattgattgctgaaactttacaagttttcactctaaacataaatttttgatctgtagttgaagggtagagatttgatgtgcggatgttgattttgaatgatgcaaagtttcttgaatgttagttgcataatatcttaagttttgctaactcaccagggtaactcagttggttaggacgaatattgggaagtgtggtcctagtaagtgacacagttcctgggttcgaatcctgtcattgatgatattttgaatttacccggtgatggttgttgtgtgacggtcaacaccctgaggtttgggtccttatggagagtcccaagggcttggccatgaaaggctcctcggttataaaaaaacaaaagaaaaaaaaaatgaggtttttcctatcaaaaaaaaaaaatgaggttttgctatctataaaatgtcttttgcaccaatttttattgggaaataaaatttaagagcaagttatataattcatttctcaagtagtctagtgaagttgtgcttgtgtgtggtgataggtggtgatcttcatgcatgacattgtgatttggctttgttgggattttagcagtttttctattgagtggacaaatataagttcaattcaccaagaagggatgaaaaaagaatatatgagaaggcatagatttgttcaaggggaagctcctggtccaaaagggataccaacaagtaaaacattgttagcggggtgtaagtattactttgatcaggatttgtactttcaaggaaggacttctcatccttctcttatacttttattatcattaataaattttttttatgataataattatatatataaaaaaaagtaccttccaagcttgcaaaaacaggaaaacgtgcgtaacaaagtacaagactggaggccatcaataatctttttcaagaaaaaagaggatgaaaatcctttttttctttgtatttgaatttatcctaagattagaaagccccttgggaaggcacatgtattggatttatcttctatccctaaatctcatggcaggtagcatgggttacatgacttgatgatgatgtagtacaaatgtacctttgttcaatcacttattgttattttgcttgtgatctgatacatgtattaggaagtatggagtgctaatgtgatgtgatgtaggagagtcctagggttgttgtctacaatcaaatagggtgggctgggtctttattcttctaaggtttttaaggaagggagaggaacactgatagagggtgtcagtagggaaaaaggaatttttttaaaaaaaaaaagaaaaaaaaaaagagctgaaaggaaaaagggataaaacaaagctttagagtcactaaagcctttttggaatttcacttcgaagaaaaggtaatagtgtcttatcataagaaacaatgatgcaccaaaaaaagaaaaaaagaaaaaaaaaagcattatttgattcactatccttttcggtttacatcaagccttattcattggctgtagaaaacccaagacctattaaaactctaatcaactaaattggaccctgattcttttcctaaaactcctttatcttccaaataaaggaataaaataaaactaaggaaatgcaaaattttttaaaccctattggaactcaaatgactaccactaattgtgactatacctaaatatgccaaattaccaaactacattgattaggccaaaactctggatttcttcattttcttttctttgttcatgattaaactttgtttttatttttatttttttaatcagatcacgaacaaagaaaagaatgttcatgattaaactttcaatatgcattttcattaaaatgacttgcagtcatttatagatattattaactttaggctaaataactttcatagattttagaggaatcacctcttatgagtgttgggaacttctctcttttaggcaatatttcttgcattcactctctcatatatgtatggtgtcctcattgtcctatggttcacaagatggcaactccaccctcttatggctaagggttggttctatgcatccagcaaaatctactttcccatgtagatattgtttgttttggttttaaaatgtagagtccacacatcctagaagagtcgcttgttgtgagtgatagtaaccttttgttctaggtgatctcacccaaacccattttcttggtttctgctatattcctaactcttttatgtagaaggtgcagtggaaaaaggcttatgagaaatgactcgctttttatcttccttcttatgtttttccttcctcttttggtttgaagctgtcttgcctcaactgataaaaaaaaggttgtcttatcccttgttatacatttctttcatttgaatataattctctatctcctagaaaaactggccgcaggcccttgattgtacattattgcgttgttactactttgggaagttagaagtaaaaaatgaaaaatcaacatgcaagaaaagaaaattaaacagcattttgatgcagaacatttacactggtaatggttctattgaggaggatttggttggtcagactttgagacaatccagaattgctcaaatcaggtcctacctgttgacaaaaagcaaagtgggcaacttgtgttaattttgtgattgtgagagagagatcaattaggagagatttacattcaatgttgaaaaaaccacaactgaatgtggataatcatgttgtgcctgctccaataaaattgcatgtgatttccattatattgaatcagttacatgcatgcatatcagtcaacaaggctgaggaagagctggtcaagcaagaagccttgttagataatttggtgggcattttattccttagaactcttaggatgcagatgtaggttccatgtggatcttggttcttgctttatttttcttcttttcttggatgtactttctttgtagtttttggccagaaaggaagctcatccatatatttctgattcaatatttctaaattggttgtttccaataaaaaaattgtatttcatagaatataaaactactttcttataattggacacaagttagtgcgttgttagtttttacacaatttatactaccatggatggagcagaatcaaacatcatgttgtttgcataatagaaatgctgttggttctacctgccatgcatgatcaaggatgttggtgaaagagctccaacaaaaggtgggtgggcaggaatgtggtcctttttttccttaggcaaaattatttttctctgttcatctcccctcaattgaaggttgtcttttcagtgtagtgtttggtgttatcatgtccatttaagtgcaaacaggagggggagtccattgatcatattcttcttcactgctccaaagcaaggattctttgacaccttttgttctccattttcgggtatagatggggtgatctcttcctcggttaaagatacccttttaagttggcatgacttctttgttgggaataaaaggaaaaaggtgcggaaagccgctcctctttgcatatttttgacaatttggagggaaagagcttttgaggacaaggaacaaaatgatcgaaagttagaactattgttcctttgtgatctttttgcttgagttagcttgtatattagagaaggtccaatggctttgcttgattttgtagagtgggttgggtcttcttgagtggcttggggattttttatgcactattttgaggccttccttttggtgctcattgtatgcgtttaatgtactctagtgcaccttttttctattattaatttatacatatctttttttacctataaaaaaatttccgtttaaggtttgcttctttacgtggtttacaactttgaacagaaatctctgttgactaccttaaccatagagatacggtaccctccatcagtgtgttgttctgatgaattacctgaccagttttctaccagtttacttccagtgtggtccctaattgtttgtcgtttcatttgattgaatttcttaagaatatctttttgaaggggttagcagaaggatgtttgaatgactagtaaaatatgatttttggtaagctctgtggccttgggaatgacttgctctcatttgtttctgttccctttgtcctctttggatttgttagaacctggattctatgattttcagtgaactctgtggccttgggaatgacttgctctcatttgttgctgttccctttttcctctttggattagccagaacctggatcctatttgctttctttttggttaaaatttttgtttataaagttccaatcaaggtaagttagttttcaggtagcaatcaaggtggattagttttttggaaattaatgctgtattgaagtgtcattttttgaatgtactacatacattgtggattttctataacataaacattgcagactagtgcctctactggatcatgtcattcatgttgtgatttttgtaacttacagggtgcaattgaatctgtttctgttggtgaaatcag

SEQ ID NO: 13274 - DNA, 6899 bp, Vitis vinifera
  Intron number 22 from transcript GSVIVT01025344001 (locus GSVIVG01025344001) derived from phytozome v7.0 (chr-ID chr 6; pos 1721719 to 1728617)
agagagtccttggtattgcgtacctgagttctgtttgagtggagtttttatagtgctcaaagggggaaagcacaaaagtgcttagctgccgccttgacctaatgctgcaatgatgattgtgtagtaagtgacatgacaatcattgcagttgcaaggcagttggtgactgtgtcagatggtatgtcatgacgtagcttgccgtcatttaagtatgttgaaggtatgggtgatgggcaggatgacccattgatgttgatgtatggatgcggaaggtcccataagtcactccaatgttagaatgccgtcgtttcacatatcagggaggatttggggctatcaagaggacggggttcgctcagtggccccaaatggtcaagataaagtgcttcagggcgcctcgaaggttgttcgggtagtaatggaaggagtgacatgtggttcaataatggtactatcacgtgaacagacacgtggatgtacacgtgggcagacacgtggaagaaggttcccataggtatgtacaaaaacaaggcttagtgtttatagacaatgaaccaagaattggtgaaattggaaatgtaaaatgattgattttgagaagcataaatgttacccgtacgatgcattcagactttgaaaaaggtgaaaaaaaggtagggtgttgcaagatttctctaggtttcttttggtctcaatttcataatgaagtaaaaaacacattgatcagtaatcaccatcacgacattaccatttggattctcctctgcatttcaaccatggcgaaacgcaaaaaacagacggaggttccctggatgggtgcaacaagttgcctaatgcccaaaatctggcccaacccaaataacctttaatttattaatttattttttatgtgttgaaaaccccaaaggctaaatttaggtatcatccatggtaagactcgaatccaaaatcaagtaccacttactcacatcacacttcctaatgttcgctttaaccaattgggataccttaacgggtccaaatgaaatttctatttctagaaaattagggttcaaatatattcactatcaataataagaaaatttaaatctacttataaagaaaaaatctaggatatcaaatttgcaatctcaatcactgaaagtaaagtatatggtaaaatttagggttatttgaataaaagcaataaaataatctcatatttttaaatatgttgctttccaattttaaacatgaaagggattggatttacaaatttagaatcatttcatattttttaatcaaataattctaaaatttaagctattaaatacatatataaataagtgagatcaaatacaaataaatagataaaaatataaacaaattaaaccaatatataaaataatgagatataaatgaggtggaaagtaataaaatcaaattataaacgtcacatattatgattagactcaattttcaataaatgtcaatttgatattgtaatcaaacctatgtattaagccaagtaaatatcagtaattttaaatattaatgaagtaaatttgtgaagacaattgagaattcgtttggtaatgattttagaaagtggttttagtctaaaaaattcttttgaaaaaaattacatgtttgactaaattatgagatttctctatgctttatgagctttatcaagagatttcgcacatgttatgaacaaataattactcaactcatcatacatcattgtacaacaagtttttttttttttaaaaaaaaaaagaaagaatgaggcatgactatattatagttgaaattaaaaataaaaataaaaattgatgtgtatataatcatatgagagttaagttaaactttactttggttatgtttaaagatgtgttgttaagtgcttcattttattttattttttattgagatttgaacctaaacctgtgctcgagataattggctatatgtttccgagagatctatggattttcaaggaacaacttttgaattgaccaaacttttatcctaaagagaaaccaatatcttttttcttaacatagacttgcccaaccttaggtgatgtgcttacatgactcttcctagtcttaaactttgtgtggaacttcttttctttctttgtttttaggatttgatttatcaggaagtttgactcactcactagagtataacacatgattgaaacctattgaagagtctattaaaggatctacttttgtcatgtccaggtttgttgcaaacagtgcagtggggagtggagctcgtggaggacttcaaagatagagcactttcctaggccttaagaaaggtgttttttccactaggagtctcatatctttattcacataatctaggcctgttttatctttagtgaactttaccttgctagttatttcatcatttgtcctttggtgaaacatctcatttttagatccgaaatcctttctaattttttttttttaatttctagatatatatatatatttttctcaatcacattctcatgttcacattcaacaaattttattttgttgaccttttcagtgtttagtgagttgtctaattcattaacttttaaggccctattatgtagcttaatactatctattttaatttttacactttcttcaagcagggatttatatgcactgtataaactagcaagctcacacttaagatcatcaacatattctatatcatgcatgagatcagagtcagagtttattgactcaacaaaagcaagataattatcattttgatcatatctactatctccttagtttgaagactcaccatcacttaactcagaatcactccaagtaacaagcattgttttcttaatatttatgagaacaagaataatccacaaccatgtgtcccactcctccataattaaaacattcaacctttttattctttgatgatttttttttccttttctttcatattattatcaactctttttcctcttatagagtttgttttgtgaaaatttatttgatgatctttcctacctttttttttaaaacttttagacaagagtgaaagcttatcatatgttaaaaattgattattagatttttcatcctctttaccttcattcttagaagctttgaaggttgcctccttaggattttgaaaaccaaccatgattctagttagtaagcctttgaattttgtacaactttacaacaaaagttccctattgtgtaattgatcatgatgtcctatgtctatttagtatgtttgcatgtgactatcctgcaaaaacttatcatgactcaccttattaaaaatatagagagctgagtattggtctcactaccctttttgtccactttattccattcttatttggattttagttcatcagttgatcgacctattctatccagttttaatgatgatccccagttgaatctaaccatattctaaacctattccctctactttcttaaaaagaattctatatatgctttccaatgaggataattattaccatcaaaataaggtggattatttatagaagatctcattcttttatggtttaatgatttaagatctttatgtttttttatttttttattttttggctttgatacaaattgagagcttaagaccttataccatgaaactatctagagagagggactttaggggggaaggggagtggggggaaggggagcgggagagcttttgaatagataatcttgtaatatttgcccaaaatatcgaaattttagtttttatatgttatttaattgagatataattaatcaagaaaaacaaattaagaacattcaatcgcacaaagagatgcatgatttacatggaaaactactcacaaagataccttacaaatgtaaattaaaaccatggctttgagaccataaagttaaattccattaaatataaaattaggtatacagttttaccttatagttgttactttttttgagacttatattattagtacctacacacaatatttttgtgctcctctgcttcttaatttaaaattcttttccaaatcaagtttattccgaatttctaaaaaagtccactttatatcttttacatctcattgtcctcaattaactcaaccatacttgttaattttgggttgattttgctgcaatatttaacctttataggcagtgtaaatcacaagactgcatgtagagccctaaatcaagatgaataaaacaaaattgtcaacttaactaaataatctaattggtttcaaaacactaaggttgtgtttgttttttgattgaataaaaaaaaccaaaatatttggttttttctattcaattaaaagtaacctattgatattaaccaataaaactaaattaaacctattgataacaagtttattttagttatattggttgatattaatatgttacttttagttgaatagaaaaagacaaaattaatcaaaagacaagaaaaaaaaaacaccacctaagcatctacaaaaaaatacaaaaaatttaagaaaacaggacaacacctagaattgaggtatagcttaaagatgagctaataagggatgggatacacatcaaattgatcaaaaatatcaaagaatataaggagcggggatcaatcttagtgctcatcactagaattttgaaatacatgcatattttctagggatgtaaaaatggtgcacatacaatgttcaaaataatattaataatgataatccaattttttagaattgcttaattaattaaatgaataaaaaatctggttttaaaaaggaatgcactcaaatcaatataatgaaagaactttattaaacaaattaattgttgatttatttattgtttgaaccatgcaagtttttgaaggaaaacccaagtcaatacccttaatctatgttgtttgagtttgaatagatgtgattacagactcaccagccagtccttttagccatggccactaattcatactttcatgtgtggaaatcttatctgcactgtggtcaagttgagctataaaagtcttatgaagacaatctgctacttcattttaaagacttattgtagattagtataatcagttgcatatgagattgtggaaaactttgcagcctttactgagtcacatgcttaaatataatatttgctctatgatgtggcagatgaatgcaaattgattagctgaaagtaatttggttatggtgggaggaaattttgaaactgatgatgaggattcattaaattgtgtagtcacaattttcttggtcaggatttgagttgattttgtgtagagctattcagatgaagcctcttttaaatttaaatcatgtcaaaatttaatattaaatttctaataatgatttttcactcacagtttctaattagtatttctgagtgcaacaaattaaaatatgttgttttggtaattaaattacttttattttttaaaatattttacgaatcaatattttttactatttcttaattacccatgttgataaacaaattttttttgtaatactcatccttgaaagttttgatgcacttaaaaacacataaagtcaaaaaactaagacgtgtttgtttgttcagccttttattgaaagtaatttgtttgtgaattttaaattgtttatttttttttacttttttgttataacttttttatagaatagaaaaattcaaaatatttgactttttctctaaatggataaaataatatgttggtttttcttgattttttttaatacataataaaaataaaatattataaaaacaaataatctaatacttaacattattaaatactatttagttttaagttttatttttctcactattattaatattattatttttatataacttaatacatacatatatatatatatatagatatatcttttaaagataaacatccatatgatttgaatgacaattctaacttcaaaaaatttgaaaattcaaaacaacttcaaaaatttgtaacattgataatgacttctttaacacttgtggttacggtgtatatattttaaagataaacatccatgtgatttgaatgacaattctaacttcaaaaaatttgaaaattcaaacaacttaaaaaatttgtaacattgataatgacttatttaacacttgtggttacggtgtatatcttttaaagataaacatccatgtgattcgaatgacaattctaacttcaaaaaatttgaaaattcaaaactacttcaaaaatttctaacattgataatgacttatttaacacttgtggttacgatgcaatgacttttcttcaattgggtccatctggtgtactttcttaaatggattatctttttattcaacatgtaagtataattttcttctatcaatcttaatcatatcttttttcaaacatgtttttataaacaatatgattagtacacactttagggattgttgtcatatgttgacaaactctcatcttccttttagataaaggcaagatttcctatcattatggtcaaggcttgatgaaatccacgagttgttatattatagtaatactataaaatatatacaaaaagaattaaaaaataactaaaacctagtactagctttgtttaagctgttagattaatctgataaaggtatattaatttcccatgtcatagtcctacactaatctctccaattttgacaattcttctttcataggcatagggtactttaattttcttttttttaggaaaaaaattgttctttcataatggcctttccttgtgcacttccctatataaaggcagagagcaaggtactcttggccacagaaaacaatggcaatacaaagatattttcactttagcctcctcctccttaacttagccaccattatcatagctgctgaaacagtagact

SEQ ID NO: 13275 - DNA, 2078 bp, Vitis vinifera
  Intron number 1 from transcript GSVIVT01012211001 (locus G SVIVG01012211001) derived from phytozome v7.0 (chr-ID chr1 ; pos 530409 to 532486)
agagagaccgaggccgccgagaagttgtttcagcggttaggattcttttcttccgtttatattcgcagtgatgtttttattgtttttcaagaaatgttttagtattaatgttgatttttgtctatttctgaaaatggaacgtcagaattctctttcacttacccccatttccagaaaattaaggctgttccttctggaaaacaaattatcattgaatttttttttcctgggaaacagcatacacaaaaaatttgaatatgatatgcttgattagtggagaatgaaaatgaacttggtacctaagacatttgcatggatttttccatttttagtttcacgtaaaattgttattagatgccatggatttgttaaagctccgtaggttaagatatgggtcaagaatttacaaaaccagataagattcatgcttggggagattggccatgaagaaaatttatgaaggtgatcgataaaatagtttatttgttaaggcttcattaatggcaagatttaattactgtttgagttgaggctaagatatgggacaagaatttacaaaacaagattagcttcatgcttgggagattggccataaagaaatatttatgaaggtggctgataaaatggtttagagaaactctcattggtgataagaaataggataagataagtaaacctctcgattattccttataataatcaaagatcttgtcatttctcatatcttatgttcaactaatgggatatgataagtgatgagataacttatccaacttttttttttttaaatctcatgagatatatccatcccatggatctgcctatcaaaaaagaaaaaaaaaaaaaaacatcccatggatcctaaattcgttcctctcatccattttcttcattttttaatggcacttggtgtattttttattttaaaaaatatcaaatacggatatgcaatatattttcctttttatttttcatttcttctacaaatcaaacatgatcatattataacatctctgattggatataatgaactagaatatcgtttctatatgatataatatccaagaacatcatattctacattgacaatgatatcttaggatatgtatatattatcctatcgtgtcagccaaatgtagtcaaagtgtctagcaaaagatggtgaaacctgtttacgttagatgttggctgtaatggttggatattattaatgaagtacatgactaaactgaaataattagagagatgaatgatttttccatcacaacaggctttacattaatgtgcacatgagctctcatcttttgctttggttatgagtgaactaattatttatatcttagaatgtggatgttctgattgttgtggatgtagttttcaagagtgggaatagagggtaaatgctaattttgaacttagaactgtatataatttaaaatttcacaggattgttggtcatagcatatatatgattttaactttagtaattatgaagagcggaagtgagtgcatactgaagattgatgattgggcttaaaataaaaaagggaagaagaaaagaaaagaaaaaacagagtacaaggataccctcaaagtcttaaggctcatggctgccaaagggaggatcacaggaatctgaagatgggataaatgaatgccccaaacagcatttaaatgctgtctgttataatggacgactattttcttctttacctataaaaaaaaatggtaatagacgactatttcacttttttatttaatctttttttatttaaaaaatcatatttacctttagttgacttgtatgcttttttattttattttattttataggcactataaattagttggtttatatgcttatgtcaggggactgtcctttgcagtccttattctctgtttttctatttattatattcttttatttctggattggatttgaacaagagaagtttgttcttctatttgtcactttgcttgtttgcataaaattttactccatcacaggttctttccctacaaacactcatatttttcattattttttatggatggatctttactttatttatatcagg

SEQ ID NO: 13276 - DNA, 8871 bp, Vitis vinifera
  Intron number 4 from transcript GSVIVT01034781001 (locus G SVIVG01034781001) derived from phytozome v7.0 (chr-ID chr1 8; pos 21449852 to 21458722)
gagataatcagtactttgaggtgaattaatattccttctttcaaaattagctaaattctacttcacaccataaattattttgttgtaaggctttttttttggattcatcagaagtagtgctgcatatagtgtgccatttgagtaggaccaaattttgtagtgttctgaaaatgctgaagaaaatgcaacaggaatgatataatttttggaaatgcttaagataacattatgtataattaattggttatgttcaggctaatacatacctatatattgttggatgtagttgtggatcaaatattaattggaagtgatgaaaatggttggaaattattatcaaaatatacaaatttgaagtgaaaattcttggtttattaatccttgtatcctgtggtacccaaactcttgaaacttcattcaatgtacctgtgttgacatgacatgacatgaaaaaagatacgagtgtgggtgtagatcacaattagatactcctattttgctttaaatatcgagtattttgtatttttaaaattagggataaagtagaatagatgtatttttatcatgaatatgctattttttgtttctaagtgatttcttttctttattatgtcacatccaagcatcattcaagattattttttagatgagttctcatatcctaaaatttgagatatgaaagattaggcacctagatacacacccacacctggcacttgtacccaaacctatgtagcatgacatataacaatgagccatttggaaacattgttaaaagaacttgtgattgggtggttgggttttaaacagtggatgcatgttagttagagtagtagtacttgttgtttggtgttttttttggttattattattatttttttggtgggtggggggttggtgggagggatgaaaattgtgtggctactgcatattgataaacaataacatatttgaatattatactgccatgtaacaaaaataaagggagactaatttttagtttgatagggagagagctccatgtcccaatcagttcttttattgcttcactttttttattgctttctacctagggtttggcttattgtagttgaggatctaattctaatctttcatggattggtccttgtagaggtaatagagtacgatctcatgaccttgggtagtttagggttgagtcatataagtatttggtgatttgaaggcccttaagcatttcgacttatggatgatttactcaagtttttggaggctccattcaactgctcaaagataggctccttgtatagtggaggtgttcaatcattttttttgttaggtttttctagttgtggtgaggactcctcattcttctcatgtactttttatcttataataacacatcttttatttctgatgaaaagaaatgttgaaaataataaaactaaagttaacctgcacagtaacttgcacaacaaataggtatcaaatctagctaaaaggcatgataacacttcttgaagatagttggagcatcccacctgtgtaagggattgtggcaactctatctttgggatacaacttagctcagattcaatattggtcattaactttcttgcactaattggcaagaaccaagtacctcaacctcttttcacgttgccttagaaaattctctctcacacaaaaaacaccttaaaaagatattttgttatgaatcttaaaagttttcattgaaagaaataaacttttgtttactttccatgtaatagaaggtattgaaattttatataataaatgttttttgattctaataaccttttgttgattcatgttagtaaaccaggatttggagggaaaggtttatctctgctgctagaaggggttgagtcatgttgtgggctaaaggaaagaacccccttcaggaagctatggtcggaaagagatagagaatacagtctggagctctgaaataatagagcagggagattcttgttttgcattgtaagagatgcggggaacaaaagattttcactggcttttcctgaagggagagggtttgttggaggctggaaaattctcgctagtaaactgagaagtttgggagtctctccccttcaatggaaaggagctctgttgaaaaaccacttaccttctcaagcttcacccagcagtagtgtagtcagagacacatctcctcttagggattgccccgcgcctcgagatgccatctggctagaaatggagaaagaaactctggataggaacaaggaattgctgggcagatgccttgtgggctcttgggaaggagactctgatcgtcttccggacctcgtttccttcgggtcgtgggcgaagaactcatggctcttggaagggaacctctgggtgtcaaatatgagagcaaatctcttgcttctggagtttgaatttgaggacgaagcagagagggtgtttaactcagggtcgagatgcttcagaggaagaagcttctccctagaaaaatggaagccatctgtaggatgccttgagggtgttagaggggatgtgcgccacgtgtgggtcagaatcttaggccttcctctgcatctctgggacagaagtctcttcaagaagtttggagactcttgtgggaagttcgtggctgtggacgaaaacactgctgatcgtcggaacctcaagtgggccagagtcctcgtcgaaaccagaggctggcaacacccaagttcgctgcaggtggttgccggcccctcatgttttgctctgcaactctggtgggaagaagagccctgcttctcccctgtgatcccctcccatgggtctggtgtttggaagattggggaagacgaggtggccccttcacgcgctaaggggagcgtggactcccgaccctcttccacagtcctcctgcagattgtaaagctgccctcgccggtcttggggagtggtgcccctacctcggacaagacaggagcagctgctacctcttcccgcgcccacgaagttgagacgggccggcatcccctgtcccctgcccgtgatttggagacgggccaaggtatgggcgccctggcccattcgggcctggcttgtggcgtttcctttgggcctgggctagagaaggcccaggtctcagcctctatggggtctccccctaagccccccgatccagtccatttaaatgaatttgggcgtggaagccctaagtgctcgtcgagccggaggagagaagcccccgcttcggctctcaccttcgcagaacatccccagatgaaagcgtagccccgtttggacacgccgatgtcagcgaccgagccttccctccccggcgaagcttgcaaaattccccagagacatgcgtcgccccctttggatgcgtcgatgtcagcgattgagccctccctccccgccgaagctcgcaagacaccccaaaggcaagcgtcgcccctttcggaagaatcgccgcctgtgaaggagctttcctctcctgtccaacctcgcaatccacaaggtactctttctctacccccgatctcctcgaaaggggagccatcctcttcttctactccattttgggtttcggggcttgagaggggtaagggtcgatgctctagtccgtggaaattggcgacaagggaagaggaagcgacgccgaaccctctgtccatgatgctcagagatgggacgacagtggttctgacggaagccccaagctctgatccggaaattgacgtggcgaagcagaaagacctgtcggttgctcatccacgcgaagaaggatggtcagatgaggagctctccaagctttttcattttagtagtgtcttgggaatgccggttgaagggcatgaagtagaaattctggccttgcttaagaaactgaagctgaggactggaaataactccctctgcaagagaagaaagaagaaaaaatcttgcaccacccgctttgaaagagagttaaaaggattggaatgctctgttagttatggggagacatccgggataaccaaaagatctggtcataactcctgggatttgattccagttgattaatgagaattaaaattctctgttaaaacgtccgagggatcaatgattgtgcaaaaagaaaactgattaagggagtggtgaggaatcaaaaaccagatttggtttgcctcttggagacgaaggtgaaagatgtttctctgcaattggttaaaagtgtgggagtaggaagatttctcaattgggctttagtggacgccaggggtgcggcaggaggcctcctcctcttctgggataacagagtcttggagaaattagagatagaaagcggggggtactccatctctgttcgctttagaaattgcgctgatggattctcttggattttctctggagtttacggaccagtgataggtagtgaaaaggaagatttttgggaggagcttggagccatccgtggtctgtgggaagacccctggtgcatagggggggactttaatgctgtaagatttccagaggaaagaagaaatgcccttagactcacaacggagatgaggagatttacagaggtgattggggagctggggctgagggatttcccactggctggaggtcctttcacttggatagggggtttgaactctcaagctgcctctagattggaccgtttcctgatctcagacccttgggaggaccacttctctgccatcactcaatctgctctccctcgcttggtctctgatcacagccccatagttctagaagctggtggattctcgacaggcaaaagcccctttcgtttcaaaaatatgtggctgaaattagatggtttcaaagacctagtaagaagctggtggaatggctattcagtcgaaggctatagcagccattgcattgttgagaagctcaaagctcttaagaaggaccttaaaaactggaacaaagaggtggtaggcaacgtttcttttaatagagcagaggccttttcccgcctgcagcgatgggaggccaaggagaatgaaagccctctgactcctggagacgtggaggccaaaaaccgggctcttgaggactacaagaaatgggctctgctggaagaaacttcttggagacaaaagtcaagagaaatctagttaaaagaaggcgataaaaataccaaatatttccacaaaatggccaatgctaaggcaagaaggaacttcctgtctaagattaaagtgaatggtgtgaatctctcttccgtggaagatataaaagaaggtgtttgtagggcctaccagtccttgctctcagattctggggattggaggcctagtattaatggccttaacttcaaggagctgggagaaggcttggccagcagcctagaagttatgttttcagaggaagaaatttttgcagcactaagcagcttctgtggtgacaaagccccaggcctggatggttttacaatggctttctggctgttttgttgggacgttgtaaaaccagagattttgggtctctttagagagttctacctccatgggactttccaaagaagcttaaactccacgttcctcttgctcattcctaagaaggaggggaccgaagacctaagtgatttcagaccaatcagccttgtagggagtgtgtacaaattgcttgccaaagtccttgccaatagactgaaatcagtgatgggggaagtgatttctgattctcagcatgctttcgttcatgggagacagattttggatgctgttcttatcgctaatgaagcccttgattctagattgaaaggcaacaacccgggcctccttctcaagatggacattgagaaggcttttgaccatgtcaagtgggactttctcatggatgtgatgtctaagatgggatttgggcatagatggattaagtggatgaattggtgctgctctacggcttccttctcaatcctcattaatggaagcccctcgggcttctttcgtagctctaggggattgagacagggcaaccctctatccccctatctattcctttttgccatggaagcccttagccaattgctgtcttgtgcaagaaatggaggctttatttctggtttcagagtgggaggaagaggaagagaggggctgatcgtgtcccatctcttgtttgccgacgacaccttaatcttctgtgacgccgaagcagatcagttgcgttatcttagctggaccttcatgtggtttgaggcgatttcaggattaaaagtcaatctgagcaaaacggaggccattccagtgggggaaggcattcctatggagactcttgcgtcggtcttgggatgtaagataggaagcttacctacctcctacttgggtcttcctcttggagccccttacatatctaccagggtgtgggatgcagtagaagaaagattcaggaaaaggttgtctctctggaaaaggcaatacctctccaaaggtggccgtcttaccttgctaaaaagcactctctctagcctcccaacctatttcctttctctctttgtgatccccaagaaggtgtgcgcaagacttgaaaagatccaaagggatttcttatggggcgggggtgccttagagaataaaccccacttggtgagttggaaggctatttgtgctactaaaaaggaaggaggcctgggcattcgaagtctatctacctttaacaaggcccttcttgggaaatggttgtggagattcgctaatgagaatgagtccctttggaagcaaattatctctagtaagtatgaccttcaagaggggggatggtgctccaaaggagtaagagaccgttatggggtgggggtttggaaggctatcagaaatggttgggagaactttcgttctcattcccgcttcatcataggggatggcactagagtgaaattttggaaggacttgtggtgtggaaatcaagctctagaggaagctttccccattttgtttaatctttccgtcaacaaagatggctgggtcgctgaggcttgggaggaagaagaagttggggaaagctggggaccttgctttaataggcaccttaatgattgggaggtgggagaagtagagagcttattatgtaagcttcatcctttgaccattagaagaggtgtggaggacttgtttcggtggaaagagaacaagaatgggtccttttcggtcaagtccttttatagtttactttcaagggacaccaagccccccttcccggctagaactatttggacgccttgggttccaattagggctagcttctttgggtgggaggcggcttggaacaggctactcaccactgaccgcctgaagagatttggatggagcattcccaacagatgttttttgtgtaaacaagaggaggaaaccacagatcaccttccttcttctgttttgcgagaaagccagaatgttatggcttctgatcttctccctttttggggtgcattgggtgatgcactcctctgtgaaaagaaacctcttgggttggcatggttcttttgtgggcaaaaaaagggagaaagcctggagagctgcccccctctgcctgatgtggaccatttggaaagaaaggaatagaagggccttcgatgatattgagaggaacgatcaagatattaaatccatttttttgtacacttttgtgaattggattagggtatacatagaggaacacactttgtcgttgatagattttgttgactggttagccaccaagtaagggtcaggcttgtttgttcttttgttttttgcttccttgtatatggtatactccgtgtataccctttctcttgccttttggctcttaatgaattttctttacctatcaaaaaaaaaaaaatgttagtaaaccaagtacgttgattatattaatgaaaaaaacatgtaccattacatgaaaatttgtagtcacatgaaaaaatatataaactcatctttcaagtccaaagaactaatgtaaaatagatgtcccatggtccatagatattgagtcagttaattgtgcttttcaaggtactcaaacaaaagttgtttaaggtatatggagaattaatcatgacgtatgaaaataaaacataaatgtggttatttaactattgaatcctagaatgcttctatgataaactactgtttaagaaaataaatatacctacttaaatcttaaagaaactacaattttgccgttttgaattatatttaagacgtagcgtttccatgtaatttccttgggatctctgaatcacttaaggtcaatgatataaaatcagtttccaatgtacatacttgtctggttgtattggttaagactgtcaattcgtggttctacatctgcacttgaccttcaattcacattttaaataatggtggaactcatagttctgcaggaattaatcctgcaacacaaatacataatattttgcattcttttgcatatttttacaagaaacagatgagagaaggaaaaatttgttagcatgcaaaatgcatcagatgcttctaaaatctggacattttccattttggtgggaattttcccatatgttgattgttgatagaggaactgccctgcatattatacgttaaataggaatggaacacattgactgtttgcttgctcagctttatactggtttcacttgtcttaccatttatctagaaatgcaactgttgaatgtggaaaaatgtcagacacaatagattgagtcatggtaagtaggtttaggcgccttgaaaaatctgccaatatttgctgctcgatggttctcttatatcaattactcagttattgacacttgtaacacacatttcacacatggagagaaacataaatatatttactgatctgttacattttgttttttatttttatttttcctcaaggttattggttcggaaagctttg

SEQ ID NO: 13277 - DNA, 2585 bp, Vitis vinifera
  Intron number 1 from transcript GSVIVT01031200001 (locus G SVIVG01031200001) derived from phytozome v7.0 (chr-ID chr1 4; pos 1242605 to 1245189)
aaagcggtatcagtcagccctgcagtcgcgatctggtgagcttgacaagtttggttgttgtgttttttttttcggtgaggaaatggaggtgaacgagagaaattttttttttttggtaatctggactttttggtgtttggaccagattaagccctaggttaggaattattttgttttgctattctgtttttggtaggtgaggcccgtcagggaatggaagaatgggagaaattgaagttcgggaatctccaggattttatttgagcctaagacagaaaaatatttattttttgatgatctggaaatgaaggaaaaaaagtggagttgttttgttgtgtcctgtttggtagatgagaaaatggaggaaaatatggggaattgcaggtttgaggtcttgtattcttgttgtttaggtctgaccaaacttaagatagaaaatatttgtttgtgaatgtaggaaattgcctggaatgggaatttttcattttttgttatttaaaccgaactgcccctgaggtaaaaaaaacatattcgtttttcgttgcttgccaaatgaaggagaaaacagggaaagtcttctcgttgcttcttgtttggtagatgagaaaatgaaggagaatgaggggaattgccaaattggtgtttgtatccttgaacttttgttgtttagaccagactgagcctaagataaaattaatttgtttctgctctgttttggtagaggaggaaatggaggaaaatgagaggaattgaagacttgcagtcttgggtctcttactgttataccatactgagcctatgataccaaatatttcctttatgttctcttggtaaattagagaatggaggaaaatgaaaggtcctgaagttttgcaatcttagattttttgttcttgaggctaaactcagcctaggatagaaaaaaaaggaagaggaattaatgttttggactctgaggttttctggtttttagattaaataaagagagaatgagcataataaatgcattaggttgcagaaaatggagggtgagaaaagaatggaaaatttggagcttagagttttttcatttggctggcaagaaagttaagagaaaataacagggattgaaaaatttaaacttaccttaattttttggaacaaacagtttctgagatgaaaattcctcctcctttatgttccatttggttactgagaaatttaaaacctcaactctactaagtgtgacatggctaatagaatgaatgttaaaaaaaaagggaaatagaagagctttgaggctcagatttgtcatcatgtagacttaagaaattggaaatgtgcattcaactgatcctaataccactgtttgtttgctgggaaaacaaaagacggaaggactttgtttaaatatcaagcttttggattctggttgcttaaaactaaacaaacacctttcttgaacttagattaacattatcatttggcttgtacattttcattttacgttcaagtcatgacatgtttaataaactttcgaggaaagggaatattaggaaagagaatcagagtgagaaggatagagaatgcaaggtatcgaaattgagaatttcattggagtgttcacaaatttgtcaggaaacatactgagaatgaaattgctaccctttgaagtgtttagtactagtagaggaaatagaatgaaatgtttagttttattgtaatgaccttatccattttattttagatctatgattgcaaagcaaaaaaacatgttaaattgattgtgcataggaataaaacttatgtctgcctatgaaaaaaaaatcataggaataaaacttgtcttgaattctaattgaaaaacaaaaaactcatgtcttaaatttgttataattttacataaaaaaaattctaccattactttttaatatgcaattatttataaaattaacaacatttcataattaatttatctcttttttattaataaaaattattagtgacataacaaataactataacatgaataatgcactataatattgggggcatgataattattgcttatttggaggcacaatggaaaattaggcaatcaatgcacaaaattcgattcctcaaatttgaaaaatccaattcatgaaggagggtgggaaaacaagtttcctcatatttgatgaatgagtttcctcaaattgtagtagggcccacacaaacttttcattctgaagtctaagtaaacagaagcgttggaggaatggaaatgaattcctttctattgattctgggtgaatcaagtagacatgcctttagttgctgagtaacagatgggaaggaaagggaatttgaaaatttcagtctttgttctttttgttgtttaagcctgagtaaataaaaacatgccaatctgatgagcctaatacaagcatttaggtttgctgatgtaagcatttcacagaaaacataggattcaaaatttaattttgtgtttctttcttcagccaccagtttaacagttagatttctgaagttcatggattaagtattagttgaatttgttcttaattttactttaatttgaatgttatgttattgatgtagat

SEQ ID NO: 13278 - DNA, 7412 bp, Vitis vinifera
  Intron number 6 from transcript GSVIVT01034332001 (locus G SVIVG01034332001) derived from phytozome v7.0 (chr-ID chr1 0; pos 17946080 to 17953491)
ggcgtttgggtgcttttaactcatctaatctacaggttcggtcatagttcattttgcatcattttctctcattattcttatttttcattatgtttgttgggctgtttgtgcacatgtctgcttgcatggtctagtaaatcccaatggttttaattcacaatgatcatagtagtttttaagtttttatattacattggctttttggctaatattattctttatatcttctcttcctgttatatatctgatgataaccttatcattacatctgaaattaaattaggataggaaagaacttcattttttggaaacaaggttggcatatgagtcactaaatcatattcaaagtctctagaaggcattggagctgaaaggtttaggatgatggaattagccaatatgaatactgtgggattttttttaggaagagatattggctctaaactaatctgaatcttaagttccttagatgacacccttcttttataggattagaaaatgaattaagaaatgccaaaagggtgtgacctaggcagggatgaaaatgtcgagatatattggtgatgtttcgccgatatattgtgtatcgttaagctccgacacgatacatgcatagggaatatcggagccacaatatttccaataaaattgccattttttgccgacatatcggtgatacaccgatattttcatgatattttggtagttgcaccaatgtattggtgccccatcaccccatttttttttttcccaaaactcttctaattggcctaggcccaactctcactcatgccagcctagcgccagcctggcgtgcactgcacgcctatgagccctcctccactccaaggatacacatttttggtgttatggattgtcgatgtgggattccaagaattggaatttttaaaaggtaaggaaaatccatttgaacccccaacctcatgctcacaatcacccaccaacaccagccgaccaactatgcttttgttgatttaatgtacatattatatgtatatgtacattattagcattaaatatttttaccatatatataaacaaatattataaattatatatatatatatatatatatatatatattataaattaatcataataaatttagtataaataaattaattttggttatggtgacttttatataataattacatataaaataaatatcaatttttggataaaattatcaaaattttaaaatagaaaatacttatacaaattatcatcatttttttgtcattaaatacatccaaattaaatgaatatgcataaaatatgttttcaagttataaacattattattaaatatcacaactgtacatatatcatcatttatttttgacacgaaatattttttttttatttttttattttgataaaccaagagaagaattcaaattaaaacacaccaaaacaggggcgctccctatgtacaccgacaatatacaaagaaagcctcacccaaggcaacaaaggagaaacaaagacctagaaatgccaaaaatgaccaacaaatcaaacacccaacacattcataaaagagagagagtccatgtccatgaactgttgagaccattcaagtagagaccgaaggaagatattcttcaagctcgtatctgacttctcttcttgttggaacactcttctattttgctctccccaaatacaccaaaacaaacaaataggcgccattttccaaactacactcctcttcttttctaggcctttaattttccattcaagaagcaaatttttcactgagttcgggaacacccacaccaccccaaaagaagagagcaccatagtctaaagctcccttgtcttaccgcaatgaattagaatatgatccgccgattcctcattctctttacaaagattgcatctattaaccatagaccaacccctcctcattaacatatcaacaatagaaattttaccccaaacagcttcccaagcaaaaaaacgagttcttaaaggggcacacgaaccccatacctcctttgctggaaataagggactgttctccacctttaaagacctataataagatttaacactgaactttcctttcctctcaatcttccaaattagagaatcctccccttcttggacatgagatgaaaaataataagttctgtattttagattgactatacacacaatttatagaggagattacaagagaagaaataggaaacaagagacataataggaaactaacttattcctaaatcataaaactatctatttacaaaaataggaaactaacataataggaaaataattctcctattctatttacagctcaacactccccctgaagccgaggaataaatgtcttccattcccagcatgaatataagatcgtgaaacattgaactgttcaacccttttgttaggatatcagctaattgatgttctgatggaatataggacatacacactacttcttcctccaatttttctttaatgaaatgcctatcaatctcaatatgttttgtcctatcgtgttgtatagggttatgagcaatattgatagctgacttgttgtcacaatagagcttcataggaccatcccacttgattctcaaatcatttagaataatcttcagctaaagtagttcacataacccttgagcgatgaccctaaaatctgattctgtagacaactttgctaccacattttgctttttacttctccatgttaccagattacctccaagaaaagtacaataccctatagttgatcttcgatccactagggaacctgcatagttagcgtcgatgtatgtttctagagcaatagtattgttcttcttaaacaaaattcctttcccggggtttcctttcaaataatgcaataccctgtaagtagcttgaagatggggttctcttggatcatgcatgaattgactgatcacgctcaccgagtaggcgatgtctggccgagtgtgagcaaggcatatgagcctaccaaccagcctctggtacattcttttatccaccactggttcttctttagcttctcccaacttgtggtttggatccattggggtaaagactggtttacacgcaatcttccttgtttttgccaataaatcagtcacatacttttgttgagagatgaagatctcttgtgtggaatatggcacctcaatactgaggaagtacttcagtttccttagttcctttatctcaaactctgttgctaatctctgcttcacttcatgcttttctctctcatcatttccagtcactatgatgttgtcaacatacactagaagagcagttactccccctacagctgagtgcttaatgaagagagtgtggtcatcttggctttgtttgtactcagactctttcatgacttttgcaaatctcccaaaccaagccctaggagattgttttagcccataaagggcctttttcagcttgcacaccttgttacctgtgtttccctcaaatcctggtaggatgttcatgtaaatctcttcatctaaatcaccatgaagaaatgcattcttaacatcatactgttagagttgccaattgtagtgggcagtcaatgacaacaggattcttgcagtattcatttttgcaactggagcaaaagtctcctgataatcaactccataagtttgagtgtaccctttggctaccaatcttgttttatgtctctcaagagatccatcagtcttatattttagtgtgaaaatccacttgcaatcaacaatgtttttccctttcggtctttcaacaatctcccatgttttattcttttctaatgcactcatctcctctctcatagcatccttccattccctttttgtcaatgcctcaggaacagtgttaaggatgatagtggtgtttagactcacaataaaattcttatgggctggtgataggtgcttaagagacacatagtgtgatagtggataaagtggtcggttactgcattctttggtgctttttcttacagcaatgggaaggtctaggtctaggttgtctgttgagtcaatggaagtttcaccaggttgtgtatgtaaaggtgggtccgattttaccgtgatttcattcccagggtctgagttggattcttggacctgcttttgttctggaatggccttttccctttaatgcaccttaggaaactgtggaaaattgcgagtgacactggctggaacaagggatgacatgggttcagtggtaaaattgggtgactcaggtgtgattgactcggatgacttaggttcatcaccatgggttgagacatgaggaagatcaagaagttcaaaggactcacaaggactatcttctatcattgaaatctcctcctgaagagaggacttggggaaaaaaagtttattttctgtgaaggtgacatctacaaagatgtaaaattttctagctgagggattgtaacacttgtatcctttttgagtggatgagtaaccaagaaagacacattttatggctcgggggtctagcttgtctctatgttggttgtggacatgaacaaatgcagtgcacccaaataccctaggagtgagcccatttgaggttctgaagggtggatagaaactcttaaatatctctacggggcttttgttgtctaacactcgtgagggaattctatttatcatgtatgtggcagtaagaacagttttcccccaataggacttaggaacattcccttaaaagagtaagacccaggttgtgttgagtaaatgctcatttttccactcggctaccccattttgttggggtgtgttaacacatgatgagtcatggagaatgccctgtgattgaaaatagggtgacaaaatctggttgaagtaatctgtagcattgtctgtcctaaagctttttattttaaccccaaattggttttgaaccattgagtggaaattaggtataacaatgctaacatcatatttttgtttaagaagaaagatccatgtaacccgagtgcagtcatcaattaaggatacaaaccaacgagccccaaaaacattaggtatagtaaaaggactccatatgtcactatgaatcaaatgaaaagggtaagaacttcttttattgctaataggaaaagatacacgagtatgttttgccaattcacaagtttcgcaatgaaactcagaaatatctaatcattggaacaaatgaggaaacatgacctttaaaaccctaaaagatggatgacctagacgtaggtgatacaaccaaatggtatctttatttgaggaattgagaaaagacaatgacaaattattactagttttctgagataattcaagtggtaaagactactcctttcctcagcaagcccaatcctcctccccgagccttgttcttgaaaaacacaataagaagggaaaaaaatagcataacatttaagatcgtgggtaagcttttgaatggaaacaaggttggccgataattttggtacatggaggacatttttaagaataagggtaggtgtgatgtatatgtctccgaaacctgcaacggtagctaaaaagccattagccactgcaattttcttgttacttgggtttggggtataggtatggaaaagttgagattgggtggtcatatggtctgtggcaccggagtctattatccaagagtcatcataaatcctgtgtgagacatttatgcaaaaagagagtgaaggtgtacctgaaagagccaaagaacaagttccagtaggtctgtcaagggatcccaattgagatcatttaaggtaattttttccatccagcctatacgcagcctgaatgttttgcaattccctgggttgttgaaatcgaacaatctccttccacgaaaaaacctgatctcttgggaattaaggcaaattgcaaaaaaaaaaaaaaccaatagtaatgaaggctagtaaaagaacacgtaaataaaaaaaaaatccagctatgaaggccagaaaaatggcgatgaagttcagaatgatgcccaggtcttaaaaacctacaactttgataccatgacatgaaatatgagatgaaaaataataagttttgtattttagattgaatatacacaatttatataggagattacaagacaagaaataagaaacaagagatataataggaaactaacttatttctaaatcataaaactatttatttacagaaataagaaactaataaaactatctatttgcaaaaataggaaactaacataataggaaaatacttatcctattctatttacaactcaacaattttatatcatttaatataattgaattaaatagattataattttgatattaaatatatttttaaattagacatattatagtcgaatctcacaatattattatgaaataatattttatgtaatttaataataaatgtacacttagaaaattcatattttttatcgatgtatatgatattattataaaatatgataaattatatcatgcatatatcaaattcttcaacaaaacaactttaaaatatctattatacttctcattacatttctacaaggtttttattacatttccatgaattttgattaattttaggtctatctatattttttttcaaaatatttgccgatatattcgtaaaattgaagtaccaatatatctataattaccaatattttcatccttggacctaagtactggtatgcatacaagaaattcccaaagagaaaaaaaaattaaaaaaaagagtaggggatataaaacaaagtttctcaaatgggttacctcaagctcaagtttaacaggtgcttgttgggttgcaaatgttatttgacattaattaagataattgcttttgctttttatttttatttgctaaaattctgctaagtctcttagtcctttgtttgatatgttttttttttttttttgatagatagtcctttttttgatatgttaaaactcatgatcaattatttttacagtttggataaatttggattatagttttcgaatgttatgcccatatcttttcccttctatgtcattagaaaccctactagcatcttgcattgaagttcctaccatttaacccagaaatatggtagttgtaggtcaatatctcttataaatggaattgacataatatccatttgtattggataaaaatacaacaggttatgtagataatacgacaaaggcagatccaatttattttttaaattgctctattgaccttttgcctgaaaaagggagatgtctatgtcaatcatcctcactgcataaatcacttgttgagaacttctgacgctttttagtgactgttattatcactgctaatttgttcttttcagttttagttttgtgtaaaccatagtgaagcatcttaataccatgtcaatgacagttggcaaattcatca

SEQ ID NO: 13279 - DNA, 1697 bp, Vitis vinifera
  Intron number 1 from transcript GSVIVT01023269001 (locus G SVIVG01023269001) derived from phytozome v7.0 (chr-ID chr1 2; pos 20406254 to 20407950)
gctcgaaaccctgcgaaatttcctgaccgaaccaggtatctctcttctttgaaatagctgtattgatgctctgtttgtttcgtgagaaaaagttagggtaaagaatgggagtgaggagatttggagaaggagaggggaaaaaatgtaaaaaaataggatttttcctctcatttccaggtagccaaatgatggtgatgaacttaaatggattgagggtttggtaaattaggccgacactgtagttttttgttgagaaaagcatggggaaaacaatgggagatgagaaaatttggaaaagaaagggaaaaggtttttctttttgccgtcattctctcggcaaccaaatgaaggacttttcggcttgggctgattttattgtttggatgctttgattacctctgagcatcaggatgatttttatttatttatttaggcagaactgcaaatatataaatagctcctggcaaggaggtgctcaaagtataccctgtacattagaatgatgatatatttatactgatattctgattgtttgctcagaaaaatataggaaaaagaacaggtgctaccaaatctgaaaaaagaaaagaataatagaaaggaaaagagaggttttctttgtctgccatttcttccaaaaccaaacaaagggtgatgtgctttaatggattttgattttggtttgatgttgttctttggttggattatttgtcttcgtacattaggacatagtctcatgtgttggacctcttattgcttatactagtgggttaagaactattcatttacccaccattttctcctgagacaacttgaaattagaaaagaaaaaggaaacttaaatatttttaattgtaggttattttggttttagagaaaaatgagaaacacatcccaagtaggcacaatagctagtattaggctcacttctcaaatgatgaaaaatcggactcaaaatattgatttgtttccttcattttttttcttgttgagtgaatcgagcagttggagctttctgctcattctgtaaatttggtaatgtaatgcaaaagcagtttatcattaaaagcaacaggggttcagggagtgataaaacacatgattgctaaggggatgtggctgtaactagaatcaaattgcataacaggattgatgtagcaccctataacattctcaaatagtcttgtttgtaactctccctctctctctcacacacacatgtttctccttgtttggttcttgggttcattttgtagtttttgaagaagatattgtggggtccataggggtaaaatctattgtaacagagaaaatgcccatcataggcattccctcatttacctttgtcaatttcctgttttttaggttgaaagcatcttgaaagagtcaatcaattttaatgtaataacatataatcatttggacatttaagaatccaaatgaactcttttaatggatctttcactctaacctcatttcttgtgaatttaacttttgagtgctttgcctaaactttttatagctctgaaatatgattaggagttaagtacttttccaatttttaggaagtcttaaataatttctgattgaccttttcttggaaaaacaatccggttgaagacaatctcatggtgcagtagcttgtgtaatgttatatgcaaggtttttggttcacaatctccttttgggccactcca

SEQ ID NO: 13280 - DNA, 3562 bp, Vitis vinifera
  Intron number 1 from transcript GSVIVT01008112001 (locus G SVIVG01008112001) derived from phytozome v7.0 (chr-ID chr1 7; pos 5684550 to 5688111)
tgctcctgcttctgcgctcaactcgctgtcacaatgtatgcttgtctctctataatccttttttctatccaccattccattatgcatatgtagtcaatttgtttttgaggaaaatcggtgattggttgcattagtcaatgaggacttcagtgttgcagagtttattttgctgtttttgtactgggctattctgggtatttggtattttttcgcattttgattctttttcttttagctcttaatgttgtgatctggtgtaaatttgtagttcttttagttggtcttttgtttggttgccgagaaaagggaaaaaatttggattttgaattctgggtatttcgtatgatgggtgccgagaaaacttgaggttgagtcaactgggtctggtggaagtatttggctcaggtgagttgagttgggttttctgtttgtggaaagagatgacaagagttgtagggcatattttatggtagcacttaactgtcaagttacccatgggaaatgggcatctgattgcatattaaagtttgttcgattggttttcataaagctcctgtttgagaaaccaaaaccctaggaagctgattccacctctggttgtgatcatcattgtactgttcatgagaaattttaactctagcaaggttttattctgtaatctgtatcatacttggttcatgctggcaagaacagctgatttaaattatgctagcgaatgccaactcctaaaagggcaatggtaattagtttcattgctcactctgcttcatcctcaatagattactgcagttttaagggtcattggttacattcctcattgttgactcttaactcatttggtgttttgttttcctgttttatcatattttatctcattcatttttttcccatagatagggaaatcgatgtaaaagacgtgtatacatatatgaaacacctaaatattgcaagaatgaggtttaaaataatataaaagtaatttcatcaaagtcgcatgtggtaaaagaggcaaatatataacctgttttagtatatgcatcaaaacacttcaatcttgaggagatcggcttaataggatatgatattttaatatttgaattaatcatgaaatctaaataataagtctattaataaatactattattccaaatgctccaagtttcaacagtcccaagaccaaaatactatgaacatcaaaaagaaactataggtatgcacagttgcaactacatatttgtatgaccatatatatattggtcaacagggggaagatcaactattattaaaaacattctatcaactcttctaatattcttcatgccctgatttttcattcaagagagattttccactagaagatcacccaaaagggaagaagattcatttggtgagttggttgacagtgtgctcgaataaaaaggttggaaggctaggcattataaagcttgctactttaaatagagccttgtgcagtaagcagttttggagatttgttaatgagaaagacaggcttttgaggaaggtcatcaaaggaaggtttggagagtagaagggggttgggttgctcaagaggtatgggggtggaattaaatgcggtgggaggagaccaatcttcaaaccaccatttttgttggaaatagtaagaggacaaagttttagttggataggtgggtcagaaaaagttccttggaaaaagcatttcttctttctatagtcttgcttcagccaaatttgcaagagtggaggatctttgcctgattgagaggggtcagagtcactggaatctttagtttaaaaagcgtttttaggaatagggcctggaggccgttgataggcttatgaagagtaccatttttgtaaatttgattgagaaaagggaacataccttcttgttaagctaggcggagaagagatattccaagtgaattcttatacgtcttgtgtactttggtgtgccactttgacattttattaatattatttgcatttacctatcaaaaaaaaaagaaaaaaaagagattccaagtgaattctttctacaatttgatgtgctttggagatcattctctttttctttgaaagaggaggtgtggggttcatgtgcccctttaagagcttgtttctttgcttgggaagtagggtggaagaaaattttaacaatagaccaaataatgacaaggggacttttgtgaatagatgtagtctttgtagagctaatttagaattgacaaaccatatgttaatgggtgtcttgattaaaagtgatacaataatccttgattggggaaaattaactccatgttttcaaaacatgaaatatgacctcttttgggcaaaaatgcctatcactttttttttttaatacctatcttatgttaaaaagagcccggggggggggggggggggtgggggggttatgtttacaactctagttatatttagaatttccaaaagcaaggttatttttccaaattaagaattattttattcttttggtgcagatattcctatcttaattcactataaaaaagttcaattgtcgtggggcatattattattattatttttgggaataaaagagtttttccagaatcaattaaaatctcttattgagttcgaaggcttgggagttggggcatgaataaaaggtcaagggaggtgtgtagaggctttttgtggtgcattcggaaagagctaatagttggattttcaatgaggtggaggtatctgactagaaatttaaagaggcttttattaaatccctttgggagtggtctaaagtcctgttgggaatggttttgcttgacttcattgatggcctaagtcgaagatagttggtttttgtacagtttcctatgttcattctcatccattgtaaatttcgagtgtacatgggatgtgcccctctttttgccaggcactggttaatttgtttctataaaaaaaaaaaggccttccaagttcatcattattctctcacacccaccaaaaatggggacgaagcctcaaacaagaaacctgattttaacttaaaaacaagaagaaagtgtaagtatgaactaactcaatttctcagtgctttgaagaaaattaatatatgtgtcattatttataaaaaaaaaaaaaaggcatcagagagagagttttttatagcagaggcaaactaaaatggaaattaatacatttctatactttttctgcctccagaatgaggaggatgaagtgtctagagtctgttcttttctgttttcaaatctatatatgaatgagttgttttctggtgactttaattgtgcatatattctgtctttgcaacttgttttaattgagtagtaatgttatgttaatcatgtttccagccttatcctctataatatggtcaatttttccattaaaaatattgaactgttacttgggtcctttggttgattgcatgattatatgtggcagctgcacaatgtttgaagcttgtttgtttcttaagcaatgtggagcttatttttggttttgatcaaccattattgcaggtcctaactcagaaaggggtggaaataattagaat

SEQ ID NO: 13281 - DNA, 2479 bp, Vitis vinifera
  Intron number 7 from transcript GSVIVT01021535001 (locus G SVIVG01021535001) derived from phytozome v7.0 (chr-ID chr1 0; pos 6745193 to 6747671)
tgattggaggtggaaagctagatccaaggattcctgtaagtcttttccgtctgcaacagtttatcagttcatcctttccaagtctctaggtcccttaaagcataatatctaattctttaatttagcaccacttgtttatgacttgcggtatatttttgtaaccatcccacttgtggtagctgtaccatattttctcatcttgtttctttgatcatcaaatcttaataacctataaatatttatgaagattatggagataatgatgtagttttacaagagatgtcattttaagaaatttggaatacttttctgttcgttaacttctgagaaagggtaggccagatcaaagaccattgtcccagaagtcctgtgggatatttgtgtgagattgtttctgagttgttagctgggatctggagaaaagtatgggaatgtggtttatttgaatactaaaagtatgtggatgagaagcaaatcttggatgcagtatttgcccggctaacaaatgtttggacattatattgagaaatcagctcctggctaatttgtgagctggatgtttagatgccttataaccttgtaaattgggaatttcttccttgcttgttgaggaagatggcccttggggataagtgagatgaaatacttgcattttgataatgttgttcttataagtggagcaggtagattgttcttttgtatttcaacaatgttgttctttgttgtggtggatgggttttcttgtggccttctatagaaaattttaagaggattaaggcaaagagatcctctctttctgcgtttgtttatggtcattgtggaggctttttgtggaccaatgctaaggatgggcgaaagaactttgtaaaaaggtcctgaagtggctggggcaatagctgaggagagagcacatattatttacttctatgtggatgatagctgtgttttaatccgtaaatgctgagcaacttatatttttaagaggagggttgcgctagtttgaagcagccataatgttaattgaataagatgagtgctctcctaatgggtcatatgcatttggacgtgctagctaacagccttggaatgcatcacttgggattttcttttattttggattttagttggttgcttttctaaaggtagatgagtttggaatttggtgatgggaagtttgaaaaggagttttaagtggctgaaatagtgtacctttcaggagggaggcaaattattttaatctgatgaagtcataaagttctttcattggctgaatgtaaaatgagttattggctggatgcttagcatggggagatccctattatggagtgctttgcaaacttttatgaaattgctttagctacagaggcatgtgcacatgacaatgtgagctgtgaggcacaagagggtgattgtaaaagttgtgatatactactttgtaaaagtttcttttgttaggagttgggtagggttgattttgtctttaacagctctatttgacaaagataaatagatgtagggaagaaaaagttaattggcacaggagtttgaatggggcttttcttttttgtgaatctccttctcctttttagtttgtctcccaggatagaaagtactttcctagccaaagaggtgtagaatatgttggttctggagttggctgactaccactgtgcattggaaagtggtaatggatatgtagaacttctatctctctctgggttatggtgggtaaaagctcagtggattgatggactgatgtttcaaatacagtggcattgccacatgctattttgtggtgcatctggaaaagaaattggaggcttttgaagaaaaagaggtttttacagtgaaaccaaagttgtatatcagcaaagccctttctttggagtagcacagtaggctttgggttcatagacttcttagtttctttaaaattctgaattttattttctattttatgtgtataccttgcatacatatgggctactaactcacactctttgtttactttaatacgatttttttttcttttggtttaaaaagtaaaaaaacaattatgaatatttatcttccttttgtagtgccatcactaaaacctatatttcatctaatgttggtgacagcatagcagtatcatatggttttgaaaccatttacattcagtgatcatgtgcaagagcatggaacaatcctagactagtaccatcctaggatttttcattctaggcccaaaatcaacaccaaaacccttccaatgtattggattgcaattgcaaataaagtggagagaaatatagccctgatgagcttctccatacattgtagattctattatttttatttatttattacatttccagctgaaacctgaggttgacaaattcttctgattttaacactctttttttgcttttgctgggggctgctgggccgcaatggatcacatcaatcagctgagcgatcaagaggatcttattgt

SEQ ID NO: 13282 - DNA, 9510 bp, Vitis vinifera
  Intron number 4 from transcript GSVIVT01007916001 (locus G SVIVG01007916001) derived from phytozome v7.0 (chr-ID chr1 7; pos 7584291 to 7593800 reverse strand)
gcttcccttttgtttgcctgctgatatccatcttggtaatacttcctttttttatgcttcttttttagtaagcaagtagtaaggactataaattggcacctatggggtgggcacaaccccagtaaacaagaagtatagagcatcaaattttaagaaaaatgaaaaaagtgaaaatgtgaatctcaataatgaactacacctagaggggggtgaataggtgttgtagaacaatttaaaaattctcccaacaaagattacctaaccttagactatcttaatgtcaagaaatttttcttccaataacttttcaacaaagcaaaacatccacaagcaataatgtatgcatcaacactctcccaacaatttataaatgcaaaacacatgcaaatgcttcaacactcctaaaaaataaatcaaaatatagagtgagagaaagagacaatgaacaccggatttttaacgtggaaagcctccgaagagatcaaaaaccacgggcctatcaccgattgaaaactccactatgaagaataaaaactgagtacaaggttttacctagctcaagccaaccaatccttcccggaatacttgactagtaccttcatttttcagcttttccttttggagcacacttggagtccgcaccaagctcaatctcggcctcttcttgaatccacacaagaagaaaatgggtttttgcacaaacccaaatagaatgagagattgagatatgaaggaaggaaggaatcaacccatttgttgcccaagaaaatccattaaaaaccaattcggaaaacattaagagaagtggattttctttgcaatcaaaaaccccaaattgggaaaacaaaatgagaagatgaagaacacaaggagtgtggctgctctctccacgtttctgcagtcactctacccagaaaatatgagaagattggtttttaaagtgtaaaaagaagcccttaatctaatggctgagatttgatcaaaaaaacattagttggatcgatccacccctacacttggatcgatccagaaacagggaaatgacagtcttgcaccaaaaaccatttctcctaactttctaacacatttaaagcttaaaaaccgggttgattcatatccaatcaccacacactcggctacatacctcggcctcttagcaaagtcttagtcttcaaagtcaagtaatccgaataggaataggaaagccaagttaggggacatttaggaattttgtccggaattgccaacctagctaaacactcacaaaaagaaatctacacaaggtcaaaaatgggatcagctcttgctcaatctttgtatgaaatccaggaaaaacaaatttcctctcctgctggactctaccagcaaaaaagaaatttgagaaaactagctttcaatgccaaatcagagtgctctatcttttaaaagtcttgcagcactgcttttttgcaaaagcaccagaacaaatgtagtgaactatcctccgcacctctttccaactttgccagcaaatttcatgtgttagtagctggacaacatattcttcagaaaacatggcagcttcagaaacactctgaacaaggagaaaaacaaggaccatgtgcttcacatgcacctacaatggattaggatgtggtccacctcctgtgcatatgtagcttgtgtttaatggagtgttctatgtactcatcccctatgtttatttcatggttttaaaaaccggaccggacggtcacggttttggtttggtccgaccaattgagccggccaagggttgaaccggaattggaccggttgaaccggcggtcggaccaaagaaccgactgattcaacttttttttttttaagccaaaaaaactttttgattcattttgcaccaaaatgataacgtttcttaagggaactggatcactctatgaagagcccatccgccccctttgtcattaaacccaataagcttttagtcccacaagttaatgattcttgtatgccttttataccccacaatccctatatatttttttttatccattttcgatgtgggattagttagtgagaagaaaaaaaatttgcaagcttgggaccttcaggtgtaaaaattgaagcttaactattaagctatgaaacttcttcattgtattatatttgcaaataaaaatatataacaaaattaatatttttttttcaaatttttattgtataaaagtataaaactgcaaatagaataggaaatgaatatatatacatttttttattctattctatatttaaaactatatacacgacatcttctttataaaggatttttctcaacacaaaaataggaaacaacttaacaacctaacaatatacaactatttacaaaaataaataaaataaataaataaataaatctcctaatatcttatacatttatatctcctaatatcatgctaattatctcagtcgatcctatctttttcaacaaaaacctttcacatttatttttgtaataattatataatgtaactaaaaaaaaaaatttaattaatataataatttcaaaataataaaatacaaaagacatgcaaataaaactaaatattataatttttttcattttaaatatatctttatatttaaatattataaatgttctatttaataaaatttaaaatattaatatattcatatttttcttcatcatttaatttgatatgttaaatataaaaatgaaatattattaaaatatttaattatatataattttaatttcttataattatttaaaattttatataatatataaattattatttatgacatcactagtttgaccatggtctgattaccggtccgactagtgaactgtgaaccggtaactttttcggtttaatcaccggttcggttataaaaacattggtttattttattccatgttttcgttggtttttttttctttgggaggggtggtgcatatgattgaagagactattgagaacttatatgcatttgaatacaaactaaacaatcatattcctttctacgcataatgcctaagtccattttcttgattagtggtattcataacctaattattatgaatgagaattagttaagattatatttcataaatgcaaaatgttgtatttggttaatatatttgttgtttctgataaaaaaaaaagttgcatttggtcagagaaagactattaaaaaattagtgtttagttggatacgaatagttggcctttatctttctctctctctaggttggaagaaagaacttaattacaaagaatatattgcatagaaatgaatatagtagtgcttacctaggtaaaaccatatgaatgtaatatttcctagcaaaccacatacttctagatgcatattaccttagaaataggaacttttgagtgacaatgaaactcaataaatagctacacacatgcttgcgtgctcttatcacatataagctgacaaaccatgtttctaaaatgggtaagaatattctttttaataagtaagaatgtcatcatgaaagtgaactaatccagataagagaagtcaaatatggagggctagctttgatattggactgcagggtagaaaatctacctaacacatactaggccttcgtttaggagctcttcacaaattagcaagggtgtgggaattagtagaggagagattttagagaaagtttggtttgtgtgagaggtaacatcttttaaaaggaggaagacaccttgatcaagagcatgttgtcaagtttgcaaatttgtctcatgtctttgtttatcgttcccaaaagggtgagcttaagtttagagtagatccaaaggcatttcctttggggccttgggggattgagaatagacctcatttggttaattgatttactgttcgattggataagaaaaatgttggttttggcatcagaaatcttcatacttctaataaggctctcctcgacaaacggagctggagatttgttactaagagggagtccctttggaaataggttagagttggaaagcttaaggcagatgaaggggggtggtgagggatggctatgagactatgaggtgggtttgtggaagggtatttgaagaaatttgagggagagaaaaaatacttctctttatttttctcattactttcaaactgattctcacatcgatatttatacatgaatgattgagattgtctgcctaagaaaaagaaatctaattcttgatttttggagaaaatctatcataaaatcaagaaataaaattagaatagaacataactatatcataattgtgcatataactgtgacataactctaacacaactatagttgtaacgcaactgtacctttcgaatttcctccggatttccacattccccttcaagttgggttgtaaatgttgatcattcccaacttggatctcaagtcttcaaagttggttctagaaagcgccttggtaagaatgtctactatctagagcattgttggagtgtaaatcaatgaaatcgtcccttcttctatcttcttcttagtaaaatgatggtctatgatgaactgggttcttagcaatatttatggtagtttgattgtcacaggacattttcatagaatcttctattggaattttcaattcgtttgggagtctctttaacgacattccttcgtagattccatgtgtcataactctaaattctgtttttgcattgatgtgagttacaacaaattgtttcttgctttgccaagtaaccaaattcccccatgcatgggtgcaatatccttaggttaatctttggtcaattatggagctagcctagtctgcatctgaaaaaatttaaatttttctcttgtgtttttttgaaatagagtcctttcctggtgtcattttgagatatcttacaatatgatatacgactttcatatgttcctcaattggattgttcatgaattagctaaccacactgactgaaaaagcaatgtctagtcttgtgtgagagagataaataagttttttcactagtctttgatatctccctttatccactagagcacttcctttgactgttcctagtttagcagtgtagtttataggtgtgtctacagttttacccccaagcattccaatctcctttagcaagtctaggacatacttgcgttgggagactccaatacccatttttgatctagcaatttccatcccaagaaaatatttaagattccccaagtctttaattttgaactcatgggcaagaaaactcttgagcttggctattttttcttcatgatcttctctaggatagaattgaaataatctcttgcattgttagttttcaacacttgcattttggtatggaattgggtttggatcatgttataaatttttttgaaaatttgacctacttttgatttttctttcagcaggatgatccaagaaattctagtatgatcatctataaaggacacataccatccagtccttattatgttctttatcttaggtggcccccaaacattactatgtatcatggaaaaaagatgagatggtttgtgtggttgaattggataaggtttgtgaacatgcttggataattgacaaattccacactgaaaaccatttgaacttttagtgaataatgacgagaagagttttttgagatataagaaacttggatgtcctggtcgatagtgccataacataacatcactatctttattagaactaaagatagaaagcgaccgttcttcacttttggttgacgttgtctttcaatataatcagccactttgaaaatatagtcttgaacacacctcagcattgccaatcatcttcctcgaattcaaattctgaaaaacacaatgatttgggaaaaaaattaatgacataattcttttctcgagtaagtttgctaatggacaacaaattgcaatgcaagtttggaaccaaaggaacaaagtcaagagttatgtccttagagatgacaacataacctataccagccacctttgagagagaaccatcaactatatgaaccgtataatccttagaacaaggtgaataattttgaaaattgtggcatctctagtcatgcaatcaaaagctcttaagtcaataatccaaggactcaaattttccttttttacttattgggcagtaataaaattaccttttgagctaaggatctgaacccgttgatagaattggaggaatttgccctctgttaagactggttgaacatttttttgcaatagttccaattgccctttgctgaacggattggaattaggtggtactgcgttgtcctcaatagtgacatggtgttctcaactttctctatcattttgagaacgtgatggcttccaatccgctggtttctcatggattttctatcacgtgtccttggtatgacctagttttcggtagtgatcacaccaaggtctcctttttcttggtcaattgttgttagaaggattgggaggaccccaagtcgctaaggctgaacccggtgacaggttggctggtttgtgaccccaacatgattttctttttactttcttcttggtgcacttctgagacaacttttcggatgttaggtaaaggtttagttcctgatattctgcctcaaacttcatctagatttttgttcagttcgaataaaaatttgtaaatctgtttcttctcaacgatgttcttgtacttgattgcatctgttgggcagtcccatttggtggtttcaaacatgtctagttgttgccaatagagagttaaaagattgaaatagtgagtgatcgacaactcaccttagcataaatcatggaggatcctttttatctcaaatgcctctactgtgtattatgtatcagaataagtctcccttgctgcttccaagatttcttactccatttcatagagtataaaattttctcctatgtcattattcaccgagttaattaaccaagacataaccatattattctcaaccttccatcctttgaatttgggatcttctttcataggttaaggcactacattggtgaggtagtcattcttgcctctaccacatacaaacatcatgactgcgtgggaccattgaagatagttttgcccattcagtttgtgtctaggaaggagaaaagcaacaccgtctgatcctttatgattgcttggaataggagcttcttgagtggaagtgacttctgaggttgagaagtccttcttggtggccattatgtatttggtcatggaaagattgaatggttcaaaattagctctgatatcacgaagaaatttcagggaaagaaaaaaaatgattctttttatttttctcattactttcaaactgattcttgcattgatatttatacatgaatgtctgagatcatttgcctaagaaaaagaaatctaatccttgattttaggagaaaatctctcatgaaatcaggaagtaaaattaaaatagaaaacaactatgtcacaactgtaccttccgcatttcctccggatttccacatttttagatcaagtggaaggtctttaataacatatctcatttcattgtgggtaatgacaaaagggtaaaattttggaaagataaatggtatggagaaagtattttggatgagtgctttttagagttattttctagtagttgttaaagactcttaggtagtagagatgtgggagtaggttagggaggggggtcagtggagtccttactttcatagacagttctatgattgggaattaggaaggtgagctttttttctggagattgtaatggaggccaattagaagggctggggatatattgggttggaaggaaaccaatagtagcaaattcactgtcaatattttctgtgctttctcagcctaggaagaagtcagcctttccccacaaacatagtttggaacccataggtgacaatgaaggtgagttcccttatttaagaagctgtttggagaaagattttaatgcttgatcaacttagaagctgggatgaggtatattgaatagatgttacatgtgtaaaggggaagaagagttggttgatctcttgctccttcattgttccaaagcaagaatcttgtagcaactggttttttctctgtttagagtggcctaggtgatgcacttctttgtaacaagaactctcttgagttggcataactcaattgtggggaagaagcaaaagaaagcttggagggtccctcatttttgcctattttaaatattatggaagtaaaggaatagaagaacactcaaagatgcaaaacagtcggattacttagcaaaataaaaaaagatgcaaaacagtcagatcaagcaatcaaatcttcctttatgtgcacctgtttggattaggctagagtgtatataaatgatcattctttgaccatgataagctttatagattggttgagtttcaagtaagaaaggaggtttttattttctcttcgtttttgctcacttgggaaataggcatgccaccaagttaattgctttgataccttcccaaaaaattttactctagggttaccaccaaagggttgcccaagataagttaaagcctcctcattacctagagttgaagccaacctattgagataccccctaaaagagtactattcatgaggttaatcctgagctaagagatcatgccaagggctttgataataaacctatggtttgacaaaaagcttttaagtcaaagagaagaaatgggatctttcgcaaagggtactcaagttcattgtctcttaacaagttttatgtcatttccatgctgctttagtacagatgaaatctttaaacgttctagtacctttcattaattctccaacttattccttattacgatatatgatagtggttgggcactgctaagggaggtagcagcacagggacaatggatgcataagtagattgatagttgtttaatgcatgtgtgatttacaaaggaggctatgttgttttatatgcattagttcatgttaatcttaaatgttttggatagtaaattaccaaatataattctttattttctgtccctgttgcagatgcagtataggacattttaatgagctaacaaaacacactgcattcatgaagatgcagaattttcctcttttattcttcttcagtcatacaaattagatttgaggagttatcagaaaactagtttttctgattggtccatgatttttcatccccaaattaccaacaatttgtgacaaacatttttattagtttgaaaacatatccttttctgcttgtatacatgttttttttttttttttgataggaaacaacacatgtatatattgatagaaaaaaaagtacaatagaaggatgaggaatccttgcttatatacatgttaagaaggatattttttttaatttttaaattttgtattgtgtagctaatgatgtgtgtatcttgctttattccatgctttagttatgttgcttgaattgttttcagtttttggtcatcaaaataatcctgcccacttaaca

SEQ ID NO: 13283 - DNA, 3502 bp, Vitis vinifera
  Intron number 12 from transcript GSVIVT01022835001 (locus GSVIVG01022835001) derived from phytozome v7.0 (chr-ID chr 12; pos 18936606 to 18940107 reverse strand)
aaggtggtgattccacatacattaagacttgggtgtgccatacagtcagtcaggtacttgtcctacactccaaaaaaaaaagaaacactgacgtgccaatttattaaagtagccaaacttgtgcgtctgaatttctaatcatttctattgtggtaacatattgatgtttctcaggttaacacaagtctccttatacacaaacttgtaagattccattgcctatggtgagacagacaaggtgccaagtagccctccacgtatcagagacttgtgttcttgatatatgactatgatctttccaatcaaacaatatttcatgagtctccccctggaaaggcagaagcaaacacacacatctgagactattccattggaaatttacaatatgccctgcgtcaatatttcctgccctgttgttggagatttgagggtgcagaattctgccctttgacttcagatattttctcttatgctacaagcctgaaaacaaagaagtgaagaggtgtggaggaagactgacaataggtgcttgcattttaacatagatgagtgaaatatttcaatggcttggtcaatttacctttataatgggcagaggtgattcctgaatttatccatatatttctgtgatacaggcaaacatggaggaatttctggtagtttatggtcagttaaacattttaatttctttatttcttttttgtggcctactttagatttgtacttgttgatcccttttccatccttaaaaatggagatttaactttctgccatacttacaatcatttacacatcattctacaggtgctatgaggctggtgtatttttcgcttaaaaggccaattttgtaaggacaattgcaacatttccatattgtaaggcaatgcctaacaaaaaggtaccattaccaaagatttaatttgatgacattattaaccttgtttggcctctaagttacatgaatattaagactaaaaaggttttgcaggtttatgtatttgctttggaatatcagtgatttaaacactagtacatcttcaaataccttaggtattgcctatttgtatctctggtcaaatgtgcttggaattttacctgcatcacaaatacactctagatctaaccattgcatgaaaacaatttagaattatatgggtgtttatttggagccttttgcaagttattttttcaaaggagttgaattagaatcaagatattgtatcttttctcccttccatatcaagttaatcaccgtttctcctctcccgtctcatattaagtatctaggaagaacatgaaagatttcttatgagaaacacatttttgttttgataaggagaaatatatcaagtgactataaataatttaaatgaatttattttacatttctgattttgaaacagaattagaatataagaatttatgaaattagaataagggatccctccaaaaagcctatcattcaatttcttttggtctctattttaagtccaatttgtgttgatctggaatggcccagtgcctcaaactcaaatttcatcctttgacttgatgccaccatcttctactgtgcccccttccttcactcgtacattgtcatgatacaacatattgaggtcttcttgtatttgtagaagaaagacttcaaagcacctcttaattctggtcattgggaactattccatttcaatcttgccaagttcaggtcagttgtgtgtgacatctggtgcatgggtgcattttttttagctaatttatggttagagaaatattttaatttctttggtccattttctgagggtacaacaggggagactctctttgtaatctgcaaattacaagttgttcttacatcactttgtaggttgtatgaggctgaaatgtgtgatatcttatacccaccagaaagtaacaggtatgttttctttgggcttatacttttcgataactaaggcatttgttgctttaatttgtaataaaattatttcaaaggttgttggggatggaaggtggagtgaggaagatgctgctcttttagtgcctgagagcttaactggtattgaacagggagatggaaagtagaagatggtgtttaattggttaagttaggtcatgtttgactgaggttgctctgttttggttttgcagtcagcattttaccagagatggtgtttactgtgcttctgcttgcataaagggagagatcagcagttagccacatttgaaaggcaaggatacaggaatatagcatctttgttatgattttactgcatttatttctttcctaattttgatttcattttgttcttgttttggtttttcttatgtcttctgtatacgttgtgttgctgttgggatgatcacttagatcactgtcatgtaccccactcaaaaacaggatccttttcttagaattgacaatgttcctgttcttctcattggaggaagtcttggctctcattgaagttcttagttagagtacctaatatgcaagatatgatcaaatattacttgaattggaatttccagaactctgttagtgatgaattacagggatcacaccatctttttccttgtttccttgtcccgcaataactatgtacttttgcttatgggtcatgaaggattaagcaattaaagacaataggagtcatcatcatcacaagtcacagcatataataaataagaaatagaaaattaaaggtgaaaaatgaaatccattcacttataccccaaatgataccgaaacatgcctctgactagttattcacagacaaataataaacatgtcttctgtttcagatatctcagccagccctttgatcatccctcatgagtcaccttcattaactggtgctgaaagcttctgcaaaggcgcctgaagatgctcctgttttagtgctaggaacatgatttgtattaaacaagaagatggcgggtatgctactaccaaagctaagaaacccaaaattcttttggttttaaaataatgtcttcctttcaattaaccatttgttgatggatacacacattttatgtgcatctgtccatgtcttcgtgattattttctttcaggtggttatgacctttccaattccaatcacgctttaactccatcttcttgagtcaggcaccccctccaatggaaaacagatgtctgactcagtagtccttttctctttattgtttggtgtcattgtttcatgcaaagctgtgttttgcaaataatgatgaactattagattgatggatgtccttagattgatgaatatccttttggttgagatggttcagagcttcatgatacaaaaaactgttgggaaactagcatcttataatagtcttgatgtgtgtacgtgctagatctttaaagtggacgaacaaggggattttctggttggtgggattcaacttacaacttaggggatttgttgctctggaaagggtatgtaaaatttgtttatcagtgttttttctccccttacttttctagagacagatt

SEQ ID NO: 13284 - DNA, 570 bp, Vitis vinifera
  Intron number 2 from transcript GSVIVT01028872001 (locus G SVIVG01028872001) derived from phytozome v7.0 (chr-ID chr1 6; pos 17934266 to 17934835 reverse strand)
gcttttttgattggatcaggtcatatgtgttgatattgtattatttctgttctgcacttctaatattgttcaaaattcttaaaaagttatttattctatgatatcatgtgctttgataatgccaaagagattttgatttgttcatctactggtagaacttgaatatggagtgtgattaatgcttttcttccctctatgggaagtggaaaaattgctctagttgtatcaagtatgttttgagtctggatcacacaggcaataacattcattcttcagtgtgaaggttgtcttgcattatgaaattatacaactaaaattcaaaatgaagttttataaaaagagaagaaaaaaattgtcaagaacagtaatcaagtttcaatctaaagaaaaactcacctacatattatatattgtgaaatcattttagatttgacagaatggctcttgatgacattggtaaacctaggttttctgcagggtctgctagtgattctatttgactttttattttttaattttggatgctatatgacagttgcaacaacaattgggactgtcgtggcatttctg

SEQ ID NO: 13285 - DNA, 8812 bp, Vitis vinifera
  Intron number 21 from transcript GSVIVT01032046001 (locus GSVIVG01032046001) derived from phytozome v7.0 (chr-ID chr 13; pos 23226600 to 23235411)
agaaagtttcagttattcgtaacctttgccaaaaggtaaacattacatcatcttttttacaacatatctcatctctactcttctgtgcaattgaaatcttcattgccagaaaatgtctcttacctgtttaatatgttatttatgcttgcgtccctttttaataccaggttttgaactaattactagttagctagttggagatctagaaaactccatcctatccatgaaggtgatgaaatattaacttgtatgctaacccaatgatattgccgcaaaactcatgacttgatcttgcaaaaagaactaaataaccaacatatggatttatttggctaggcatgcactttgatgttttcctaaatctaaacagtttcccaagtatgaaggtgaattaatggaaatgctgaaaaatgggagagagagagagagcgagagaaggtgagagagagtgcgcaggagagtgtgatggtgaggagggggatgaggggtcggcgccgcgaagcagaaggaaggaatgcaaattcatcgtggaatccaaggagtttgagattattggggacgagaggaaaggaaaaatccaagtcctcattgtggagaagaagggaggggtttcgtcatgggtttgtttgggttcggacagtctagggttgttcttggaaggtctgaacctctgtattaaggatgagaaagaggcaagatggggaagggagtggaaggaacagggtcgaacattctctatgtcacgagggataaacaaagcgggggggtttatccggctaggggtctccgatctagagaggaaacatttctgcatcttcatcccgagaggcagaaaggaaaagagggggtggatgaccatggcggagaagcttaaagaggtgataggctcttttgtcagtaaatcaaaaacccaggaaggaaaggctatggggaaaattgttggggggagttcgtacgcaacaatagcaaaacgagctctgttgggcaatccaaacgcgatcgtagtgaaggtgaaaagagaggaatcgatgggattgctgaagaagttagaacactgtgttgtggcgagtaggaagggtaacttagggggagatgatgatcttgagaagctgggacagctttgggcaaaatcgtgggagcttaaaggtagcttagggttggctaaaatggaaaagggaagggttctactggactttgaagacttggaagaggcgcgtcgtgttgtatcttctgggaatcgcacgatggaaggggtccaggtagggctggatttttggagtccgaggagtgggacgacagaggaggagaaggcaaaggaaatttgggtgagattatttgggcttccagtctcgctttggagcctagagattttgaagaaagtgggggacgaatgcggcggctttatcacagtcgacgaacaaacgaagacgttgggcgagctacagtgggccagaatcttagtgagaggaagaggcgatgctcgaccgagtgttctggaagtcgaagtggaggaggaggtctatgaggtatcgttatggtgggaatgccgtccggtgataaggaggtcttccagacaagcagatggcagtcgtagcagcgaggttgggggtgaggagtcctcacgcgcggagaagcgagtgacgaaggggtgggtgagcgtgaggctcgagaacctgcatccgtcagatgatgggaccggtgggcagaggactgattcgggtcgggctgtatccaacgcagcccgaagcccaataatcccgtcttgggctcaatctggtgcagtgcaccacttaagcccaaatgccagcccaaaggagttaagaggggtcggtgggcctgggctgaagagtggagtaatgggattgaaaatgaaaggggtggctgcaagtccagaagcaggcccgtcgcatagacctgatgaggtgggttgttccactataggcccagtctcgccatcaaacaaaggcccaaattcaaagggatatggtcaacagcctgatataggtgtaaagacaagggagggcccatcttcatcagcaggccaagaccataatatctttcagaagaaggacttattgtggacggggcttgatccaggtaagtctcatgtgccagagccttttgttgcgtgggagactgaggacatgaggaagttaattggtgtggctaggatatcagagacggataaggtgcttgaagaggagtcaatgaggtatggaagggggttgtgttcttgggggaaaagggttttggggatctctcatctcaattcttttaattttgatcggacttcgggaggggaatctttcgatcattctggggattggaatgaggaagttcgggttgacaatacaatgtggctaacagtatatgagggctgtattgaaaggagcaatggatgtagggaggtgggagcaaatgaaagcagcagtgataagggcagggggattcctggggttggtgccatatatgattcccaaacagagagaggaatgcaggatgataaatgggaggagagtgatttggcgaaattcagtcaattcctgggattccccacggagggattggagaaggaaatcctgaattttctgtctcaaatcagaaaaaggagggagaaaatccatagtaaagagctattggaaaaatctaagtttgaaagggagttaaaaagactggaatgctccatcaattatgaggggggaattaaacagaaaggctcggtacagggcaaagggcgccagattgtgattgtctaaggaagatgaaaattctgagttggaatgtgaggggagcaaatgatagctctaaaagaaaagtaattaagacgtttataaggaatcagagggtggacgtaatctgtattcaggagactaaaattcaagctatgttggataacattgcgagaagcataggctccggaagattcctagagtggaaagctgtgaatgcggaaggagcttcgggagggattctgatatgctgggataaaaggtctctggagattatagattgggaagagggccagtttactttatcttgtagatttcggaatgtagaaaatggggcgatatggatttttacgggagtgtatggtctgttctccaaggtggaaagggaggctttatgggatgagttgggggcgattagagggctgtgggaagacccttggtgtatagggggggattttaacataactttgtttccgagggagaggagtagccagaggagaatgaattcagcaatgaggaaatttgcggaaatagtggatgatcttgggctgatggatctcccccttcaagggggagaatttacttggaatgggggacaaaacaattaggcctgggcaagattggacaggttccttgtttcccctagttggacagaccaatacaatgggattagtcaatgtaggctgccccgtccggtatccgatcatttcccaattatgctagtggggggggggggataagacgaggcccaactacattcagatttgaaaatatgtggtttaaggttgagggcttcaaagatttagtgcacagctggtggcaaggaattgaggttaggggcagtggtagttacaagttggctactaagatgaaggaaatcaaacagaaattgaaagtttggaatagagaagtctttgggaagctggagagcaataaatccttagccttgcagcaggtggagttttgggatagggaggaaagtgggagaattctgactgtggaggaaacagagcttaagaaagaagcaaaggataattataggaaatgggtgattatggaagaaactcattggagacagctttctagggaaatatggctgaaggagggggatagaaatacgggctattttcatcgtatggcaagcgctcatcgtagaaataattatttggagagaataaagatcaatggggagtggctgatagaggagcaggaaatcagggaaggaattgctagcgcgtttcaaagcttgctttcagaagatatggggtggaaggcagacatagggggccttcagttagaccagatcaaccaacaagaggctgagaccttggagaggccctttacagaggatgaaatctatgtggctctgatggagatgaatggggataaagcccctggttcggacggctttacaatggcattctggcaaagttgttgggagttcattgaagaggagattttggaaatgttcaaagacttctatgtccacagttctttcctcaagagcctcaacaataccttcttggtgctgatccccaagaaaagtggggttgaggaccttagagacttcagaccgattagtctcttgggggggctttacaagttattggctaaagtgctagctaatagaatgaagaaagtagttggtaaggtggtgtccacgtctcagaatgcctttgtgaagggaagacaaatccttgatgcttctttaattgcaaatgaagtgatagacacgtggcagaaacaaaaggaaaagggcattatatgcaagttggatatagagaaagcctatgacagcatcaattggaagttcttggtgaaggtgttacaaaagatgggcttcgggtctaaatgggtggggtggatgtggagttgcctatcgtcagctaaattttcagtgttggttaatggagtgcctgcaggtttctttcctagcactaaaggtcttagacaaggggatccgctgtccccttacctcttcatcatggggatggaagtgctagatgtgcttatcaggagagctgtggagggggggttcttatcaggatgcaacataaggggtggaagtggcccctctttgaacatctctcacttgttttttgctgatgacacaattatcttttgtgaggccagaaaggatcatctaacttacttgggttggattttattctggtttgaagcggcttcaggcctaaggattaacttagccaagagtgaaatcattccagttggagaggtggtggaggtggaggagttggctgttgagctaggctgtagggtggggactttaccttctcagtacttgggtcttcctttaggggccccaaatagagcgccttatatatgggatggggtggaggaaagagtgaggaggagactagctctttggaaacggcaatatatttctaaaggaggaagagtcaccttaataaaaagtaccttggctagcatgccaatctaccaaatgtccattttcataatgcccaaggttgttgttagaaggattgagaaagtgcaaagggattttctgtggggagggggaaacatggagagaaaagttcatttggttaaatgggaggtggtttgtacagacaaagataaaggtgggctaggccttagaaatctagctttgttgaacaaagctttacttggcaagtggatatggaggtatgcctgtgacaaagataatttgtggagacaagtgattaaggtgaagtatgggcaggagggtcttgattggaggcccaaaaaggcaaatggggcggttggtgtaggggtttggaaggagatttggaaagaatcagattggtgttgggataacatgacattccgagtaggaaagggcaacatgataagcttttggacagatgtgtggtgctcagaatcttcattgtctcaatgtttccctcatctctttggtatggctgcgcatcaaaatttgacggttgaggaaatgtgggatcaaaattcgggtcaaggaaactggaacctacactttttgagggacttcaatgattgggagattgagttggttggggagtttctccacatattgaggggttttaaaccttccttggaggaagattcagttctatggagaaaaggaagaagcggtcagtttagggttaaggaagcttacagtttgttgacgaactctgatgatatgggatttccttataaaagcatttgggtggcaagagtgccaactaaagttgctttttttgcgtgggaggcgtcatgggggaaggtgttaactttggatagtcttcaaagaagaggatttcaacttccaaatcgttgtttcttgtgtgaatgtgaagaagaaagtgtaaatcatatccttatatattgtacagtggttagagccttatgggatattgtctttggtttagttgatgtgaaatgggcttttccaggaactgcaaaggaggtcttagctagttggaggggttcgttttaggtgaggaggcgttctcccttataggctttttagagtggatagcctccacttaaagggaggtgattctttgttttgttttttgaggcctaagctgccttgtatacttcctgtatgctgtgcggcgttttgccttttttaatgcatatcttttacttatcaaaaaaaaaaattaatggaaatgctgcccccatggatacaaagctaaaaccacaagttctaggtctgtaaaggagtagctgcaccgaacacctaaacacttacacatgataaattaaaaatatgaacctaaacttagatagactaagtgtcaactcaagcaagcttatcgatagtatgttatttgcctttattatgaatttaagggatagactaagcttcttacttagtttatagaaatttgttacagtgaacaaaagtactatcgataagcttgcttgagttgaagtttgaattctattaaagtaacctcaagtatttttagggacaccgaacaatgttctgacatacatacaataacttgttctatggagcatggaatgtatcctattttggggagggctaggctgattttgtacccatcgtttttctttttagcctttttcccatgggtatgccttgtatactgtctttttatttttttttgataagtaaaagcaattgtattaagaaagcctgaagcacacctgaaattatacatggcaacaaggccaaagggagaagaaaaatgcaaaaaaatcccttacttacaacccaaccaatcaatgaaatcgaaaatggaccatgaagtacaatctacatgcaccctaacccaatctgaaaacatgtacaaaaaagaccgtaaaaatagcttgatccgctaatccagtattttcaaagattcttctatttctttccttccataaagtccaaaataaacataaaggggctgcattccatgccttttttctcttctttccaacaaaggtgccgttccaaccaagaatggtttccttgaaagaattgggcaaaacctaatgaacaccaaaaagagcaaaaataagatgccaaatcatagctgccttggggcaatgaataagcacatgatttgctgattcttcatccgctttacacaaatagcgcctacttggtaagacccaacccctcctttttagttgatccatagttagaattcttccccaaatagcctcccaagcaaaaaagctgattctctttggaacccaaggattccaaactaagcttgaagggagctgtactgatgcatggaactagggatgagaagaaagacttaattgtaaagaaacctttctttgaaaccctccaaaacatgacattctcatcaccccttctaagcgcatgaccatgtaacctactgaaaaaagtttccacctctttcatctcccaatcattgttaagtcttatgaatacagggttccaatgacccaaattctcggactgatcccataatagaaactacccaagcatccctggaggaggcaagagagtacaaacttggaaaagcctcttccaaagaatcctctccacaccacctatccttccaaaactgcactcttctaccaccccccaccttaaaagccacccttttgctaaactccatccacccgttcctaatcgccttccaaagccccactccatgactctcctttgaagcgccagaacaccaacatccttcttcctctccaaatttccttacaatcacttgtttccataaagaatcttgctccgaagcaaatctccaacaccattttccaagaagagccttattcagcctagaaaggtttttgatacctaagcccccatcctttttctccatgcaaacaatagaccaattcaccaaatgcggcttactttgagaagctcctcccccccaaaggaagtttctttgaatcttttccaaccttaggctcaccttgcgagaaatgataaataacgacataaagtaaattgggaggctagaaagagtgttctttaccaaagtcaaccttcctcctttggacaaatactgtcttttctacaaagcgagccgtttttgaaatctctcctccactacatcctaaacctgagatgatttgaaagcagctcccaaaggcaaacccaaataacaagagggaagagaacccactttgcagcccaacaccctagccaagtcctcaaaattaagaaccacccccactagaatcagctcgcttttgtgaagattgatttttagcctggaaatcgcttcaaaccacataaaagcccaacttaaggcctccacatgctcctctttttattggtgcccagttaatacatccataaatggatatgtgatatcatatgtcaatctaatatttgtgtcaatattctatttagtattataaagaattctattcagttgaagatatggatggatttaggccaaaacggttgtcgttattttaaggtgttcacctacagctgctgattatatttcatgtgatgatgatggatattatggctatattgactctcaaagtgatactcacactcctgcttctttactttaagcttgcctttttgaatcagctacattatgatagaatatggtgctgttgacaggtaggcataaccattgcagctcgcaaat

SEQ ID NO: 13286 - DNA, 2629 bp, Vitis vinifera
  Intron number 12 from transcript GSVIVT01034334001 (locus GSVIVG01034334001) derived from phytozome v7.0 (chr-ID chr 10; pos 17916438 to 17919066)
gcttagcaataaggaggttattgctgtcaatcaaggtaagatttaagagtcaatatttatgtttgtttacaaggtagcatagagaatatcgtaaccaagacagaatgttcagtatagttattattgaagtcacaaataaaatacagagaatattgcttgctacaagcaaaatcccgatcaattgcaccaaacgggccatggctggagtcagcattgtttagattttcatatcatattttgtattattctttgttagttatgtttttaagaagcccaactgtgtttaagttccaacacctgtaagacaaaacatgtgtacaaaaagaatcagagaaggtttgaagtctgccggcgaagtttgacaggtttgaatgagcctgtaatggagcatctaaagaaagggaggaaaaacttgattatgtggagggcaaaaacatcaataatttatctcctgaggtttaaaaccatgcatctgtggcaagtttgcatctattcaaactgtttgagatgacattaaagtcctccaatctatcgactgggcttggttctaacttgagcaactgtttgggtggaatcaaaatcattgaggaggaaacaaccaaaatatcaactctgaagaatgatgatatttgcacaggaaaataaaagtttcagaaggaaccatggactgctccctaacaaagagggttgaagtaagtagtcagtaggtcacaggcagaatcaggttgcaaggaataaaacatcaagagatgaggttatttttcaaattttgttaatgaaggccacatggtacttagtgattgaactggtcaaccatgcaaatccagtagaggggatgggcaaaatgttaattgcaaatcactggatcccctatggtagcctgaatatttatccattggaaaaactgtgataaattgagtcgaacccagtcttctcgttctgttgctaacacgatatcatatgagccttgaaaggtgaagttggtccttactgaattgttggagcttgatgtcatggccattacaaaagaactcaatgccttggagaactgagcttggtttcttgttcaccaaccaggcatgaattttgtggggcgctgatggatttagatgaccaagctaatagcttatggaagttttgggcagttaaaattgtgtttagttgcattaggatctgattagattcaaagattggattttgatatacaccttgtaccattcaattgttctgacaatggccttggaacttaactggctatgaaactaattagatgttagaaatgctcttctaagcttggtctacatggaacaacattttgatttgtttttagaggtgttcaccctatgtttatagacttagtttgaaacgtaaagcaaaagttgggtttgtttatagaaaataaccatcctatccttgtcctgtaaagatggaaacaatctcaaagcatcgggttgctctataggattcctccttatctatcttcaccattccttagtgcttattctctcacttgtgtgtgtagatgacatttacctgataggaagtgatattgttttctgcaagagtttgtcaataccattggcttgcaatttgttactgattgatgctgcatatgggcatcatacgcatttaaccaaaggagtttctcattatgttaaaggggcttctgtctatgttcttcatctaatttgagaaaattcgattgatatttatgccttttacgaggctaactgagctagtattcctctcatactgtgattggcacccagttgctctaaattctgtctctaacatatctcttggatcactaaaaagaagccaatagctgctcaatctagtgcacaagcagagtaccaatccatggcagtggctatagcggaatagcctgaatagacttgagaggaatttgttcccaagagtagagacattagtatttgtattgctcacccaactagcttcactctgttataaccttaatgctcaatacatgtatatcaatttagtgtttctctggatatcaagattgattatcctcctctccataactgagttgtacttggttctcccattattcattttctctcatctgttcaaccaggcaacaatcttaaggggtatataattcgagtttgctttcttgaattccaagtcaagcttacatttgtttttttgtcctctttagcttcatggggcataatgaagaaagttctgttccaaaaggaatgtgtagcatggataatattgctggaagaaatcactatactgctggaagaaattatgatagaatgtctattcataaacaattgtgtagctaaaggggcagggattggagagtttataattcctttgtcctattgtttaacgttaacattaggaaattcaatgctttcaagacaatgaatatgtcaaagaaatgcacttttatctgagatgcagccctgaaattttttatcgtcaatctctgcaaatttcgttattttccattagctaatagaaggaaatataatcatttgaaggaaatataatgaactcgtattgatttggttgagagaaaaaagaaaaaaaagtaaaataaaaaaaaataaaaaaaaaagctctttttttttctaaacttttgtgaatgaagcag

SEQ ID NO: 13287 - DNA, 12145 bp, Vitis vinifera
  Intron number 4 from transcript GSVIVT01026351001 (locus G SVIVG01026351001) derived from phytozome v7.0 (chr-ID chr4 ; pos 14632235 to 14644379)
gagaaggtttatattttcttgtacttatgcctgtttagttatatgttatgattgttccgttgttttaagttgtaggataattataaacagtttgttataatataattgcagagattttttcatgatataaaaattgcagagcccctgaagagcttccatatggctgccagtgcatacctctctctctctctctccaatcaccttccagcatgctctttggggcaatttcaccaccctccaatagtatctattgagtagttccaccaccctccaatacttcctctaaagtgaacctaaatctgagaactccctgtaacagctttaatctaccatcaaaacttccttaggtgaacccaactcctaaaactccttatgaaagcttcagttgtatttcaacttttaaattaaaatttgaagatgatgttatatattctgcagtaattttatctttatgaataagaaagaaagagacttgtggaaatttgatggctggctatggatatgatagcaaagtggggagcaaaacatttgttgtttcttgtaggagatttgtaccccctaagtattgattttgtattttgaaccactttttcttttaacaatgtcctatgtttcttagaatggatagttttgtcctactttttattagagatgtgtggatggacagaggacagaatcctcatccttctttatacttatttcatgttaatgaactgtttgttttttattataaaagaaagaaagaaagaaaaaagatgatgtcatatctcatgtatgttttctttgcaaacttgagggggagcctatggatcatattctacttcattgcaccaaagcaaggattctatggcatctcatgttctccttatttgtgtagtttgggtgattccttctttggtgaaagatatcatgttaagtcgacatggttcctttgtagcctctttgcatattttggacaatttggtgagaacgaaatcaaagagcttttgaaaacaaggaacaaactgatcaaaagataaaactgttgttcctctgtaatcttttagcgtgggttagcatgtacataggtgaaggctcaatgcctttgattttaaagattgggtgggtcttgttgagtgtaagggtggttttttctgtcctctcttttgaggccttcctttaggtgccccttgtatatgtcttgtgtattttgatatactttttcgtttttaaatttatacataactatctttacctatcagaaaaaaaaaaaaaaaaacaaactcatatatggtgtttcaccaatatttgcagttctaccagctacctaccaaagattagactatgataagttctcagctagttatgtccatatctagtaaggatgtgtctggttcaatgctaaagatagtagttgatataagatttgtgagtggcctgtaatggcagcaataatgggtatttgtgtggtgaaggctgtagtcaatttagtgctaatgataattctgatgagatgcattaattaagttaatggcagtttaggctacaattctggtgacacaggtggctgtggaggcaggtggtgataatggtggtactgaccgttaaaaaggtagttccaattattggtggtgaccaaaaacctgttcagaacatgttgtgggtgaatggtagggatgattgtcttttttacttggtacttagttgaattggccatgtaagctgaattagttgactttgcctattaatgggtgagtgtaatttagagtgcttttgctagtctggagttctaacagggacaaagttcttttgcatcaaaaaattgttgatataatcactttctgtcatcatacttgacatcaattaacagaaaggaggtccgaggataagaaaaccaagaggttcagtgctatttgaaaaacttcagaaggattcatatcatcattggatctttagggagatttagttctcctttataatacattaaggattgggcaaaccaaaagtgagcctagttgcatgctttaagcactttaaaattgccacattatttgagaatgtatgccttgtcatgtatcttcaataataatttagctttaaatttcattgaagtttgtcaagtgaaatcaaaaaggaaacacaactctctattctatctttcatttagaacgcaagccctaaataaataggtaatctatacaagaagataattacaaaagaaataacatgttcctaaggactaggaaaccatgaaacagaaggctaaaaactaggtgtttacacacctttatttaaaaaaaaaaatagatgaatactctaataaaataactggataattagctagagattatctagagtaatctccaactcctacttgccaacactccccctcaagttggggagtatgtgttcagtaggcccagcttgcttgtgagcttgtcaaagttttgacaaggcagttcctttgttaggatgtctactgcttgttcccttttaggcacatgcttcacattaagcatttctccttcaatcttctcttttatgaaatgacaatctacctccacatgtcttgttctattatggtgaactgaattgtatgagatgcttatggctgctttattgtcacaatatagtaacattggattggttgtagtcatacgtagttctccataaaaccatcgctctaaactcacttggttaattgggaggtggtatgtacagataagaccaaaggggggctaggcattagaaagctagccttgttgaacaaagcattacttggcaagtggatatggaggtatgctagtgacaaagataatctttggaaacaagtgatcaaggtgaagtacgagcaggaggatttcgggtggaggccaaagaagactaagggggcggtgggagttggggtttggaaggagatttggaaagaatcagaatggtactggaataacatgttcttcaaagtagggaagggcaacacaatcaggttttggacagatgtgtggtgtgcagagacagcgctgtcccattgttttcctcatctctttgctatggcggtacaaaggaacgcaacggttgaggaaatgtgggatcaaaattcgggtaacggaaactggaatctaaattttctgagggacttcaatgattgggagttggggttggttggagattttcttcagattttgaggggccacaaaccctctggggtagaagactcagtcctgtggagtaaaggaggaaggacgcatttcagggtaaaggaagcgtataatttgctggtgagatctgaggatacaggttttccttctagaagcatttgggtgacaagggtgccaactaaagtttgtttttttgcatgggaggcgacgtgggggagggtgctgactttggatagacttcaaagaagagggttacaacttccaaatcgctgctttctatgtggttgtgaggaagaaagtgtaaatcatatactcatacactgtacagtggttagagttttatgggatatagtgtttggtttagtagatgtgaaatgggttttcccaaaaactgtaaaggatgttttagttagttggaggggttcgtttgtgggaaagaaaaggaaaaagatttgggaagccactccgttgtgtattttttggacggtgtggaaggaaaggaataggatagcttttagggagggggtgttgaacgttcaaaagttaaagaatatttttgtttgtaacttgtggagttgggccaaactgtatgtaggtgaggagacgttctcccttatagggtttcttgagtggatggcttccacttaatgggagttgtttttgttttgttgtttttgaggcttagttgccttgtataccccctgtatactttgtggcgtcttgccttttgaatgaatttcctttacttatcaaaaaaaaaaaacatcacttcttgtcaccacagattgcttcttacttctccatctcacaagatttccccaaacaaaggtgcagtatctggaagttgatcacctatcttttattgatcctgctcaatctacgtcagtaacttctaattttctctcttttgatttcctaaagaaaagtcccttcctagaagtcaatttgagatatctcaagatttgaaaaaacaccacttctagttgttcttcacaagggcgtgcatgtattaacttacaatgctcactgcaaaggcaatatttggttgagtgtgcaagataaataagcttacccataagtcgttgatatctgccttggtccataggagtcccattattatatgttccaattttcttattttgatccattggtctatcagcaagtttgcagctgcgcacacctatttccttcaacaaatcaagagtatactttcttttagagactacaataccctttctgctccttgccacttccattccaaggaagtaccttaggggtttgagatccttaatttcaaattctctacccataacacttgtgagcctttccatctcctcaagatcattccttgtgagaattatatcaacaacatacactatgagaatggtgatcttaccaatttgacaagtgcttgaagaatatgttatgattagtttgctcctatgtaaatccatgaccttttatagttcaggtgaatctctcgaacaatgccttaggagattatttcagaccgtaaagggattgtttcaattggtagacatgattattgcttccattgtcttcaaatcctagtggcgagttcatataaacttcctcgtctggttctcggtttaggaatgcattcttgacgtccaactgttaaagaggctagtctaggttggttgctagtgacaagaggacttgtatagcatttaatttggcaacaggtgtaattgtctcttggtaatctatctcgtatgtctcagtgaaacctttagtaatttaacatgttttatacctctcaactattccatttgatttgtatttaacagtgaacacttatttacaacccattgtagttttcccttttggcaattgaaccagtttccaagtagtattttctttcaacaccttcatttgctcctgtattgcatttttccacttagggatagtcaaggcctcttgtatagactttgaaatcttaacacaagaaatgttagtagtataagattggaaagaagaagataaacatttatacgacagaaagtgggatatgggtgcatggtgtaggatcctacacctttcctaagggctataggtaaatctagatttttagagacagattgatttagatttttttgggcagaatctaaaatacctggattgttttgcaaatctatcacactcagttcaggctcttaactatgtgattctaggataggcagccccctttgaggtttaatctttttactataaacacaaagctcatctctagatctccccctctttctgaaatgtattgagttggggacatagtgggcttagctagattgagatgagtggaattgggtagctttatggattcaaattctgatcgatttctagactcgggttgttcaggggcagatgagacactaataggctgtgtgtttgtttccccaaaacactcttcactctcaaggttctccccttaaagagtgtttgtagaaaaggacagttgggacttgcaaaagatgacatctctatagacaaaaaatttctttatggttggagaaaaacacttgcacccactttgggttgcagagtatcctaagaacacacacttgatggcttgtggattgggtttgcttttgttttggttatggacatgggtgaaggcaaacaaccaaacattttcaagggtaaggagttgagtgttggaaatgtgggataaaactcaatgaggacggacacatacgatactgaaggaaacaacttgggtgtcggttaattagatagcatgccttaaggacaacttctctccacaagtatttaggtatacacatggtaaacatgagggctcaagcaacttctaagaggtgacggttttttctcttggcaaggccattttgttgaggtgtattgacataagaactctgctgaatgatgccatgttgttgtaggtaacctcttaaaacagaatggaaatattcctgactgttgtcagtcctagggacttggattttgacttgaaattgggttctaaacatgaggtgcttgagcccccagtcctaaacatgagggcttgagctactttttagaggtgacaactttttgttgaggtgtattgacatatgaactctagtgaatgatgtcgttttgttctaggtaacctcctgaaatagaatggaaatattcttgattgttgtcaatcgtaaggagggacttgggtttatgcttgaaattgagttttaatcattgaatggaaggtttgaaatattttgcaagtttcaaaattttcttttagaagtatacccaactagacatcaataaaagttacggaccatttagttactctagatggtccccacatattgctatggataacagaaaaaggccttgatgatttctatggctgtaggaagaaaggaacatgagtatgcatggcaatttgacaaatttgacattgaaaggtatgagggtctttattttttaataacaatggaaacaagttttttaagtaagtgaaattagggtggcctaatctataacactactatattatttcatcactagtaatagaaacaaattcaaatccaaaaacaagagattgtctagtcttagagtctgcattctaaaaaaaatacaacccttcatgtaacttagcactgcccattgtcttccctaagtgtaactcctaaaattcacaagaagaggaggaaatttagcaatgcaaccaagatctctagttaacttatagactgtaggttacatgataaatttggaacataaagtactgaagttaagttaatattttcagagattttaattgagccttttgttgcaacaattgacaaggactcactagctatcttgacccttaaattattggaacaaggagtgtatgaagaaaaataattgaaaagtacctatcatatggtctgaagcacttgaatctacaatccaaggtgcttttgaattttttgtgacactaagggctgctaagaagttaactattgaagcaagactataagatttgatattgggtttgaactgttgtgattgattcagaagtctacacagctggtctatcttttccttgctaagaaagatttgtgtggttgtggattcttcacttttagagactgttcctgcattttttgaaacctgaaaaccccttccatcattctatctaggcctccaattggtaggtttgccatgcagcggccaacatttgtctttggtgtggccaagtctattacaatgatcataacacattcttcttctagttctctgctccccatggtatccattatcacctccttttgaagccagagcagaaccttccatgagggtattgattgagtccttctcttctcccaacatcacctttctccgattttcttcccttttgacttgagcgaatacttcatcaagagatgtaactggttccttttcaaggacccttcctcacacctcatccaggtccttattgagacctgccaaaaaatcaaacattctttccttctttgttttatagtacagtcaaagcaacaattgacctctataaataaatctaactcttgcaataaagcttgaagatcagtgtaatattgagttacacaatgattaccttgtgtggtctcttcaatttgcatccgatttaaaaaatgtgggttgagtttctaaggtctgaattagtcctctttactgcatcccacacatcctttgttgtacgtagaaataggtacatttgaccaatcttgagctctattgaattaatcagccatgcaataacgatggaatcttctaagtcccaattttgaagggtcagatcatcttcatgaggcttctttgtggttcctatcatgtgccttaattttcctcttcctttaatcaccaatttcataacctggaaccatttcagccaactttttcgattcaatttatgtccaagaaattgcaaagaggtattgtctcctctgtataatagtgaagcaaacacaggttgaaccatctgctgtatggaacctgaagtagctgatgaagactcgtctccacgacatcctccagtcatggcagtcttcacactaaggttgaatgaagcccaaatgtgttgctgctctgataccatgaaattagggaggaaacataattctctgttctatctttcattcagaatgctaaccctaaataaataggcaatttattcaggaaaataattatggaaaaaatgaaatattctgaaggactaggaaaccattaaacagagggctaaaaactagggggttacacacctttatttgaaataaaaagccagataaatactttaataaaataactggataattagctagagttcatctagaattatctccaactccgactcgccaacatcatgtctaccctatatttttctcgcaaatctcattctttctgtgtttctctcgatttttgctttagtttcaatcctgctcatatagaatggaagagtgtgattggtgttcagtttgttgttttacttagcccttaccctcaactattcttggagggaactagagctcaattttttaggatgtctccttgacaatgctagctaggataggactagaggttatcattagagatcatcggagcattgtcttaagtttgaagctggctagtatgtgagatgcaattgaagctgagattccctattctggagaccttatttgaggagtctgctttgggttttatctcacctactgtttcacagttactttaatttttcttacatgtttgagttcctcagtttcaaatcctctgtaccattcccaatcttttgtcagttaacaactaatgtccatctccatgaccataaagaaagagtcacctctaatggaacattattggaggatgattttctatggatttgtgttccttttttacaaccaaatattttgtgtgacccaagaggtgctgtggagatgaatgtggtcagtgggtgggtggagaatataatggaggacactactccctaaagcccctcattagggaaaaccaggaagacttatcacattagtgtttctcttctgcaactttctttcataacagagttggaacaactgtttgcattgaagtctctttcatgggtgagtggagttatttgtcgagtgaagttagattggataggcataaagatttgaactttaataagcctttaacaatgctaatatctatgtctcaatagatgatctcactcctgctgatctagagtaagctcttaatattgtacctagatgatctcttattatggatttaatacttagttgtccaagattgcctaaagaaaatttgtcaaagtttgactttactaaacctactatttttaggggagaggtgttaaccaatcaatcataattttcttcttcaatctctttgactagaatatacaaaggaatatacaaaagacttagtcaattaggcccaagggaagagaaaaagtaaattaaatctcggatggcatccacatatctccatctaccctcaaatatcttagcattcctctccatccaaagctatatcaaggataagatagatacttgtgaaagagccttcccttttgctaggctgccaaagcctttaaaagagattcccaacgcctttgctatgcctataggaggaacccattctacattggctatatcaaacaatcaatgccacggttctagtgttgtgagacaataaaaaaaaaaaaatgatatgcttattcattacttttcaaacatacaacacattggtcccaactaagagctttgtaaggcctccttaattgaagtcgttggccttaacctttttattagccacaaactatgcaaaaaaccttaaccttaggtggagctattgagtcccagattaattagcaaaagcaaagggagtcaagacaggagagaatggaagaactttgtagaatgggctcactaagaagggttctaagggtgtccatgaccaaaatttttcatctaggaaggaaggtgattggtacacatataacaagaaggaaagaagggtagttagctcttcaatctctagatcagaaaggttttgatgaaaattgaaatctaggatggatagaggatagaactagtgatcgctctaatttttgtcgtttattggatcaaaacaaaatttataacctaatttaccattctatagcaatttgtacccaatcaaaaagtggttttagtacaaactactgtagtatagtggtttttaggtatcgtccacaaagatgaattattcttggtaatgaaagcttgaatgagaggaaaagaaatgattgagatcaagtgaaaatgatttgacaattcatgattacaattcaaaatgacaatgattccaaattgagaagaaaatgaaatgtaaaataaaagaaaattaatagaaaatgaaattctcggagttaggattttctagaaaacaatctctatggtgaatagatgttaagatctaattttcatcaaattagattgaaaacctaaattttcatctaaaccgattttttatttagttttaggtttagatctaatttctcttcaaattaggttatctaatccaagagatcaattcaaatcatatattcaattcattttaagttatcttccaatgattcacacaatgcaactattcaatttcatcaaatctagcattaagaatttgatgaatctacctagcttgcattgtagtaatcatccaagacaatttgaagagaaaaatccccaaatttcaattaatcaatcaattggatcaaattacctttgcaattcaagctcatttctctatttcaccatagattttgcctttagatcctccctcctccaagaaaaacgagatttagccactcatgcttggagatttgatctcacaaggcatgtttggctagtgagaaaataagagaaaatgaaggaaagtagaatattatatagagagaggaaatctggaaagttctacaattgcaaaattgttaaaaaatcccccaaaatgagtaaatcaagtttctatttataggtcaaggtcaagtggacacttggcatcatctaagaggtctttcggaggctttttcaccaagaaatctggaaaaaatgcaatttcgcacaattgtgcgaagtggaaaattcatcagcaccattttcgccttcttggagcatttcgcatgattgtgcgaaattttcacatggtcatgcgaaatcagttttcacttttcccgtttgagctgcagccaaaatcctttttgttccatttcgcacgactgtgcgaatttttcgcatgttcatgcgaaatggaaaaacatagttttttcaactcctttttgtcatttcttccatttctttcttttgattccacttcaactacctccaaatcaactccaaatcccaatccaaaccgattgcattgcttctttcattatgcatttggatcatcatcaactttatttgttctcttcaatttgattcatctcttttgttaccaatttatcaaaatcataccttgaaatgactccaaaacttcataaaacttgttagtaactcttacaagggtaaaaacatgttaattgagtgttttaggcataattactacccaaaagatgtgaaactcatgagaattattctctaaaatgtgtgatttttgagtagaaatcaactagcatagaggaaatatataaatttctagtccttgcaaatctaaaagatttggaaattgaaacttgaaataaatggggctaatttctagtccttactccttaccagttaactagaagttgatcgaacgttgtactttgaactaactcaaaggactcaaagttataatttaataagggtagattatttttcatgttacatcttacgaattaactagaagttgatttgaactttgtgctttgaaccaacttctagttaatgttgcagatttagacaggagttcttatcaattaggttaatttgtctagcttgtactttcaaattgataaaggtttctataatgcttatgcttagttttccatggcagattac

SEQ ID NO: 13288 - DNA, 3669 bp, Vitis vinifera
  Intron number 2 from transcript GSVIVT01036674001 (locus G SVIVG01036674001) derived from phytozome v7.0 (chr-ID chr1 3; pos 20100873 to 20104541)
ctttgcttcgccggagtacaattactctgttactggtacggcctcttctgctagctcctctttttacttttttttttttttctagctttgtgctctgtttggtcactcagaaatggttggaaacgggaagaaaattgttaccgtttttaaattaaattttctttacattaaacttgtcggtttgaaatttttatttttatttgaaaatatgaggaaaagcttttcatatataaccattctataaaaagttaaaaatgttaatattgacaatataataaaagaaaatttgaatttacaacgttttcaagtaaaaaaaaaattgattatgaaaggaaaccaacaacctaataatttaaaattaattttaagataatcaatatataaatcaatttataactgaaaaatgagtcaaaccctgcctccactgcatgcccaaggacaaattaaatggatataataaatccaaatagatctaaggtcatttttatcgagacttctcgttaggtggtgattccaccaaacgttttttttaccaagaaaatgtttttctaaaaaaaaaaaaaaaaatatttaataaaatttataaaatatttttaaaaatctaaaaaattcaataataatatattttttggtaaatatagtaaaatttcacattatgatgttgaaaattcagttataatatttttttggggtaacggtgggaaaacttctttttaaaatgtcaagataaaaaaaaaaaaagaaaattgttcaccattcaattttttggtctcaagttgtgaatgaaaccatattaaaattgagaaatcaatatctcttttaattttatttatttatttatttttgatggttttcatgttgtttctaacagatccaactcccaaaaactattcccttgatctcttatttgattggattagcttgacttggacacccacccaactccaatagttatccaactctaataggaaaatcgggttgggttaacccaacttgtgcacccacccaactccaatagtaaaacattttatagataattattttaaaaacacttttaaagaacactttcaaggaaaaacaacatactctaaatatgcatttgagaatggttttagaaaactttcctaatatttctaacacttaagcaataaaaaaaattcaagtattaaaaatattaaaaacattttctagaatcattgccaaataggttctaagagtcatttcataatgattttaagaattatttttaatatttttaagacttaaaaagataaaaattttcaaagattagaaagcttagaagcattttatagaataaaatactaaaatcaaatattagaaaatttagaaccatttatagaataaaatactaaattttagaaataatatgcatttgtaactgaaattgatgttttttttttttttttttaatatcacagtcatttctaactataaaatgatttgtgagtcagctgatatttttccaagaaaaataagtgatttaatatttgacagaatatgctttccccttataacctacacaaaatttacaagtttttagcaaactattcttttggaactgccaacagaatctttctttaatcactgcacgtcggattgggctggcagagaaatgctaaatttccatattttcacattttttttaataactttgtaaaaaatttccatagcttttccggtgccatatctccatgatcttagctcagtaaatggatagcggaagttttctcaaaatttgttctcatgggatattttttaatcatcttccattctttatatatatataaaactttttcaagattactttaattttttttttatatatatatagccgtataacatttttttctaggatatctatttttcatattaaattgaaaataaaattttatttttgaaaacaattataaacgaattcacatggtatattttcattgttttttcaacaacataattgaaaaatgaaaaagaaaagaaagttgttgctacgaataccaagaaaatatatgtgggagagcacaaaattatgcactcaggtaaaattgaatattttgaatacaatattggagaactcaaaaatctttgcacgctcggtttgcatattaataatgcattcaccattgattggtcattggtctaaggaatttcaggatgatacaggagttccatcttcgcatggttgtaaagttatctggagcattggtataaataataggggtgataaagtttgaatttttatagtaacttaaacctaatgatcagcatgtcaaaggcatcaaatggagtgagtatttttctgtaaattatcttattgaattaatgaagaatcttactttacttggttgtgtcagtgtcttgggatcactggctagttcctctatatatcacaccacaatttacgtccaagatttaaaaattttgagttttttgatttatttaattcgtgttattaaaattgattatctatcttttgctttagtgaagctcaaaaaactatagcaccttgaaaattaatttttgtcacaagaccacatgtatgtctttcattgttgaataaatcattttggagcaaaatgtcataatcttctcaaataaccctcctttcttaagtttatataagagagtaggaagcttctaaagcctcttcgaagcatttatattagtggaggaatgtagatggttttagagaagcgtagaaatgtccacacgtttgtacactaaagtggaagacaaatgaagatgtggggcattttagagtgttctgagagtcatcttgtatagagcttatacataagacttgtataaagaattctagagaattatagggtagagtggagagggttgcttggttgcctataaatatgaggatgcctcatttggccaaggcatcaaacaattgaagagcttctagtagtgtaaaacttccttgtgcgatacaaaacttccttttttaagtgttgtcttcagttctcatcctaacttcctgtttagcctagcaagttaagtgcttgggaaagactaacttagcaatatcaaatggtttgagatgtctaagtaccgcacgtgagcttaggaaaagcttaagtctgtgataaaaagctcataagaattttgaagttttaactgtatcatctctattgtgctttttctatcaatttcaagtccgacgatatgttctttctaaatgatttgctaatagttttctacggtacatattttataagaattagggatgattaacaaaaaacccaatgagggcagttctgcagagatccacccttaaatggacaaaaataataataataataatagttggtatttgaatcgagagcaggaaaaattaaaaaaactttggattgtaaatagggtcattcctctaacaggtgctctgtatccctacctaataatataagacctgaaatagggaataaatttacaatcaaggattagaacgaggagcttccctgatgacaacttgtttacattcttaaacagaacttagttcattatgtaacttatatttttcagggtaatgaatgtccctagaattcatgtatgtgctctatcgaaattcaacatgtatcttgtgcttataatcgcagactaattttcctattctgcattatattatatcagctcctctgaaga

SEQ ID NO: 13289 - DNA, 6535 bp, Vitis vinifera
  Intron number 9 from transcript GSVIVT01030667001 (locus G SVIVG01030667001) derived from phytozome v7.0 (chr-ID chr1 4; pos 13208335 to 13214869 reverse strand)
gaagatcacctttggtatggaattagcttatgaagtatttttttagcatggtagttcaattattgttgcacctggcttttatttttttgctcgtaacattttctggattctaaaatggattttgccagtgttgaattttttttgtttcaaacttgagcaatgccggtgaaatgttgtgcaggaatattttgttctattacacttcctgaagcaagtattgccagtgttaattaggtaaaaagtcatttggcactgtacaaggtgtcaaaattcatctcaatctgcatgcatctaaaacagaggagggtcatgatattaaacaaattaggaggaaattttgaaattaactgctactaatttgattcctatttttaaatatagttagtccctattttgtaggttgattttcctatgtacatgtgtatcttttctgtagattatactatgtataaatagggttgtaaattttttaaattatcatcatgaatgagaattcagaaaatatttctctccatttctgcattcatggtatcagagccacccttactaggacagtaaattactttcttactgattctccattgaaattatcagcatttgtttgttctaatgtttctaccagaattgtagaagattattcttctagtctccatcgttttttttttttttttttgacgaattagttggctgtatccataatgtccagagtttctgaagatgaggtgtcaggtgactcttcaaagcaaacaaatacctagaattctcaggttccaccatcaggttcagtggacaatctttctttgcagattacaactcacagattgaatggacagaatgtcttaaggtggcctcagttggtaaaattgttcatcaaagggaagggggaaaattggctatttgactggcacaatgaaggctccaaaaggggatgatccaatgtactatacctgggatgtagagaacttgatgattatttcttggcttgtgccatggaactgggaacaaacacatatgtttctctccattgcaaaggaattatgggatatagtaagtgagacatacttagaattatgtaatttttttcttgtctatgaaatcaagacaaagatccatgagaataggcaaggaaatcagaatgttacaaagtgttataacattctcaaaaggttgtgacaagaacttgatcttttctatgagtttgaatgggcttgtgctactaatagtcccagatttaagaaggcaatagagaaggaccatgtatttgagtttttagctgaactcaatacagattcagatgaggtgagaggttgaatcttaggtaaagagccactgccctctactagagaagtcttctcaagggtaagaagagaagaaagccaaaggatagtgatgatgggaaagagccatggtaatgcctcaactgaaaattcagctctcaatgctgaagcaacagaaatagcagcagatgtaactaatcaaaaaacccagtggaagcttgaggagaaagggaaagtctggtgtgatttctgaaacaagcctttggcgcataggagagactttttggaaattgcacggaaaaccaccaaatttgaaagaaggcaaatttggagacaaaactgggtgaggaatgcaggcgtgacaaaaacacagattttgcgactcaaggcaatttcttttagcaaagaacagttggagcatttctataaattgttgaatcaagctaagccatctccaaacccaatcccatccttttcccctcagacaaaaaggtaaatctttaagtgttatcactgtctcgttgaattcaacacccagcatcattgattgggtgcatccaacctcaagaccagtctatcacaattattcttgttatatactttttgttcaggcaatttaaaaaattagcattgctggtgaaagtttgccacctatttcaggaaaaggttcgatagtcatcttagagaatctaactttaaattggttcttcatgtgcctaatctctcatctaaccttctatttttttagcaaaatcactaaggagtctaattgcattgctatattcttttattcttactatgaatttcatgacctacatttggggaggatgattaatagtgctagggaggtcaatggactttatgactttgatggtgatttcttggagagtagactagctcaagttgcaagtagtagtgctatttctcttcctgtctaaagtcaaataatgttatggcatcgtaggttaggtcatcctagttttctctatttaaagcaattgttcctttctttgtttaagaacttgaattcttttgttatttcattgtgaaagttgccaattgtcaaaacatcattgtgcttattttcctccagtcttgtccagagtctaagtcattttatttgataaatagcaatgtattgactccttcatgtgtaaccaatgtaacttgaactagatggctcattactttcattaatcgccataggtatacttattgaaagaaaaatctgaagttttgaaagtttttaaagagttccatgtcatgatcaaaacttaatttcaaacctaaattcaagtccttaagactgacaatgggaaagaattatttaactcaatagttagatatttcttcaaagttaaatgcatttttcatcaatccacatgttttacacccgttaacaaaacaatatttcttaaagaaaaagtgatacttactagaggtctaggacaataatgtttactatggagtttcctgaatatctttggagtgaagctgttgttatgacttcatgtttgactaatagaatgccaactcaaatcatgaagtttgaaactcaactgaatagtgtgagaaagttctttcctcatagccgaaatttcacttctttgtcacttaaagtattgtgtgttcctaggatattctctgggtaaaaagggtataagtgttataatccaatctcaaaaaaatttcttgtagtatggatattacattctttgaaagtcaaccatactttaccaaaaaatgctcttcaaagggagaataatgagagtgaaggccattcattgggaagtgttagcttctttgcctttgtctactatctcactaagttccatatccattccccctactgtttcacctacctctattaagttaagcattatagactgtgagaaacattgatagggaagaaccactactgaatcaaccttaaactaaacttcgtgtctagtatcaaaggaagaatcatcataatacaaagcatcaacctgctacactttgccaggaagcctcttaggataaagggaacatgaatgaaataggtaatcaacttgctacgctttgctaggaagcctctcaagataaagggaacatgaatgaaacaagtaatttagttcctaatcctcttttgattcttgggtttaatagcgaaaaggcttctcttgatcttgatatttctattgtacttaggaagggtactcgttcttgtggtatgatgcatcttattgcaaagtttgtatcataccataggctttcccccatttttagagctttcaccactgacctatctagtgttgctgttcctaggactataaaggaagccttgaaccatgctaagtggaaggcattaattttagaagagatgggagcacttgaaagaaagaaacattggggattgatgaattgccagaaggagaagatagtagggtgtaaatgggtgtttatggttaagtacaaggtagatgagaatatagagaggtacaagacaaggcttgttgttaaagacttgacatgaacgtatgggatagattacaaacaaacctttgccttggtggcaaagatgaataccatatgggttctcctatcacttattgcaaatttgaattggccatggttagatgtaaagaatacatccttgaatggcgaactggaagaagaagtatttatggacttgccacccagatttgaaagattttattgagctaagaaagtatgtagactaagatgatcaatctatggtttaaaaagtcacctaaaacattaaaggtcatgggtacttgtccaggtagcccagttggccagggcaaacactaggaagtgtggttccagtaagtggcacatggtcctgggtttaaatcctatcactgatgatatcttgaatttacccgatgttggttgttgagggctgttagcaccccaggtttgggtccctatgaagagtcctaagggcttggccatggaaggttcctcggttataaaaaaaataaaaaataaaattaagggtcatgggtatctccaaagtcagaccggtcacacaatgttctgtaaacacttaaatgatggaagaatagccattctcattgtgtatgtggatgatattatccttaccagagatcatgtgaatgaattggagaaactgaaggcctttcttgcaaaagagtttgaaaccaaagaccttggggtattgaaatactttcttgacatggagtttacaagatccaagaaagggatatttgttattcacaggaagtatgttttagacatgctctcaaagactggattacttggctgcaagccaatagagaccctaatggaactgaatttgaaactacaggcagtaagtgcataaaaggtggtgaaccgagaatggtactagagactagcagaaagcttatttacctctcacatactcagccacatataacctctgcagtatgtagtgggctaatttttgcactcacaaggagaagaatactttgtggcagtccaacagattcttaaataccttaatgcaaaaccctggaatttacagacgccaaattgactggtatcataatcgataggagatccactttagtacttcactttcattggaggcaaattggtaactaggagaagtaagaagaaaatggtgggtgctaggagtagtacagaattggaatttacagctgttggtcatgggatttgggaattgttgtagctaaaaaaaactacttaaagacctgaagattcccagttcaatgcctatgaaggtttattgtgataataaagtagctattaatgtatctcatataccaatcaaacatgctaagaccaagcacatggaggttgatcatcattttattaacaaaaatgtagggaggattgatcctcatgccctacatcccaactgaagaataattggcggatgttcttactaaggaactacaaataggacagtttgataatcttacaagcacgttggggatacaagatatttttgagctgatttgaaggggagtatggaaagatgtagttggatttggtgtatcagattaggagggaaattcaaaattatctcctagtaatctgatgcctatttttgaatgtagttagttcttattttgtaggttgattttcctattcacatatgtatttttttctgtagactatattgtgaaaagtcaggcttgtaaatttttgaattcattatcatgaatgagaattcaaaagtattctccctaattctgcattcaaaaacagaacaatttattttttatcttgattagtttagcatgctaagctgctcttaggctggttaatttgtgtttgtgtatggtgtacaatttgttattttatcttgattagtttagcgtgttaagctgctcttaggctgattgatttgtgtttgtgtatgtgtatggtgtaaaattgttatgttggatatcactgggaaaggaggctcttcacttcaccttaaagaaaccatgtcaatatttattagataggcatctagttagacacatatataggcacatatatatttacactggaaaacctattttaaagggtgactcatagcttaacatggtattaatgttatgtttcctaaaggtcttgggttcaaatatccttgtttccccatttattagcttcgcacaagggacaacgccggcttgataagcaatgttacccctaatagtttaatcttttaaagtcactggtagtttaattgacttttatttttttattttttttattatttttatttttttatggtggtggaggttttggtaatggtgttggattggatccttggatggtaccagtatttttatgaaacgaaagtgcaaatctagaggtgacattagaggataaacatattgatttactctcgttttaattaaagcagattgaaagaaaattgctgaagtgagtacacttgttaatgatctctcattcttgattcacaattttctgaatttatcttttttgggtgctttgtggacatctgaaataactagtgaacttcattgcaactattttattgtgactatagattagtaggttgaggttctaggacagatacattgtattttgatggtttcagaagctgcttttattgtatgattatataatggtgttgtttcttgttttttacttccctgatatgcaagagtatatcattggataaggggaaaaaaatagttgcatctgcctgaagagagcttcttttttgaacagcatcttgcatcagcaagaggatttgaagatattgt

SEQ ID NO: 13290 - DNA, 9156 bp, Vitis vinifera
  Intron number 7 from transcript GSVIVT01025589001 (locus G SVIVG01025589001) derived from phytozome v7.0 (chr-ID chr8 ; pos 13814956 to 13824111 reverse strand)
aatcatctcaagaatcaactgttgaaacaagagaggtgagcttgatttaatattggcatgaacatttgttgttaatatacatgtctgtgaagtctgataatagaattgaaggacacacttcatgcaggtgtgatgaaagcttaagtgggcatcaagttttccactcataaacattatcatagacaaaacactgttattctaacataataattttcattgcttgctttttatttttatttttgcaaagtttagtgtaggttatttttcaggatttcaactaaagtgtaggggtcattatttgacatgttcatgaaagtgagcctgcccactctttttcccagtgcagtaatttttctgtacctaacatattcctgcttacatgtctctagtagtagaggaaaagaaaaaacaagtagcatgaaatgaatgtactcttattagtggataaattgattaaaacttcaaggcttatttttcttgcattctagctttctagagccaagcatatttgttcccccttcaaacttcttgttctgtatttttcaagcctaatgttaatggaacctgtttatattcctgtatttcaaccacatgactcaaaggtctttgggcatttgggtttgttcaagcagagccaatattgttgtctgactagagtgtctgcttaggataggggactttctgttaattacatattaactttggctggtaaaggaactgataacttcctctaattttttatagtaagagttttgttgcatgataatgatatgagtttgttaaagtttagccaaacattattggcagaggtaaataatctttcatccttgaattattgccaatcatttatttctccctgcagtcctttgatagtcttcactgccggagggatgcctcatagccatttaagttactaaatattctaccaaaatatcgtaatttactgtcaatttttattccattttcttatgataaggcccttatacttctgtgaaaagagaatccacttttatgtgaactgaatatgaagatattgctagttagttctgttgaaataatgccaaagttaggactttaatttaggaataaaaaaggagagatcatttaggatatttccttatgatttagtttcctaattttaggagagaattaagctagattgatttttttcttattcagtcatttgtgtatatatatgtgtatggtgtgtaccgattaatatcaataaaggagttcagaaattcttcatggtatcagagccagttttctgaaaccctaatcccttctggccacctcttattcaggccatcactcattctggccaaatctctctggccatatctcaatccgatcatctctctctctctctctctctcactccggtcatcagtccctgttctcagagccaagggagaaaacgctttccagtcagtcgaatcgtcgtcagaaaacactcaccgccggcaacttttccggcgacggttttttctacaccgcaaggagtgcctggaggagatctccaatttgtcccaaagcaccggaaccagaaacccatccacgcgccgcccacgcgcgtttttccggccggcgactgcatctcacgcgccggcgcgtgagggcgcgtgagccactttccggcgacgcgcttcctcctccaggctcgcctgacgccgaccagccacccttcctacctgtttgtgcaatccgagccctgcacgtgcctcttttggggttctcttgctttcgcgggccctctgatcagattttccggcgtcctccgactattttttctcaactccagtccctgcacgtgccttgagaagtgttcttctacctttccggtccatgacaaaatacggaatggcatcatcacaagtatccagcgtcacgtcaccagaatcagggggcagatctgaaattccaaaccttggtggcaatgattcctctcctattctcatcacaggacacaaattaaatggccataactatttacagtggtcacaatctgtgttgctgttcatttgcggtaaaggaaaggatgagtacctcactggagaagcagtcatgccagaaactacggaaccgggtttcagaaagtggaagattgaaaacagcatgatcatgtcatggcttatcaattccatgaacaatgacataggcgaaaatttcttactgtttgggactgcaaaggacatatgggatgcaaccaaagaaacttactcaagttctgaaaatacttcagaactgtttcaggttgaatcagctctacatgacttccgccaaggagagcagtcagttactcagtattacaacacactcacaaggtattggcagcaacttgacttatttgagactcactcatggaaatgttcggatgatgcagcaacatacaggcaaattgtggaacaaaagagactgttcaagttcttcctaggactaaacagggaattggatgatgttagaggccgaatcatgggcattaaacccctgccaagtctcagggaggctttttcagaggttaggcgtgaagaaagtagaaagaaagtgatgatgggatcaaaagagcaacctgccccaacattggatgcctctgcccttgctgctcggtcatttaatagtagtggtggagatcgtcagaaacgggataggccttggtgtgattattgtaagaaaccaggccattataaggagacttgctggaagcttcatgacaaacctgcagattggaaaccaaagcgacggtttgacagagatggcagagcacacgtggctgccaactctgagagcacatctgttcccgagccgagtccattcaacaaagagcagatggagatgctacagaaattattaagccaagttggcagtggcagtactatcggtgtagccttcactgctaatcgaggaggaatgaggccgtggatagtagacacaggtgcttctgatcacatgacaggagatgctgccattcttcaaaattacaagccaagtaatggtcattcatccgtccatattgctgatggttcaaagtcaaaaattgtcgggacaggttctataaaacttactaaagacttatatcttgactctgtcctccatgttccaaacttggattgtaatcttttgtccattagcaaattggctcatgatctccaatgtgttactaaattctatccaaacttgtgtgtttttcaggacttgaaatcagggaagatgattggcagtgctgaactgtgttccgggctctacctcctttcatgtggccaattctcaaaccaagtctttcaagcaagttgcgtacagtctcagagtatgtcagattctttcaattctgtgtcaaattctaaggtcaataaagatagtgagattataatgttacactatcgccttggtcatcctagctttgtttaccttgcaaaattgtttcccaaattatttatcaataaaaatccagcatcttatcactgtgaaatttgtcagtttgcaaagcatactcgaacagtatatcctcaaatcccatacaaaccttcgactgttttctctctagtacatagtgatgtgtggggtccctcccggataaaaaatatttctggcactcgatggtttgtgacattcgttgatgatcatactcgggtaacatgggttttccttatgaaagaaaagtcagaggtcgggcacatttttcaaaccttcaatcttatggttcaaaatcaattcaattccaaaatacaagtcctcaagtcagataatgcaaaggaatactttactagtagtctcagtacttatcttcaaaatcatggcattatccacataagttcttgcgttgacaccccacaacaaaatggggtggccgaacgcaagaatagacatctcttggaggttgcccggtgccttatgttttcctctaatgttccaaactatttctggggggaagctattctcacagctacctatttgattaaccgtatgccatccagagtgcttacctttcaatccccatgtcaacttttcttaaaacagtttcctcacacccatgccgcctcttctgatttaccactcaaagtatttggttgtacggcattcgttcatgtgtatcctcaaaatcgtagcaaatttgctcctcgagcaaataagtgcatttttctagggtattctccaacccaaaaagggtacaaatgctattctccaaccaacaaaagattttacaccaccatggacgtctctttctttgaacatgtcttcttctatcccaaatctcatgttcagggggagagcatgaatgaacatcaagtttgggagtcttttcttgagggtgtaccttcttttcactcagagtcaccaaatccttcccaattcgcgcccactgagttgtccacacccatgccgccatcagttcagctagcccagcacacaaatgttccttctcccgtgaccatccagtctcccatgcctattcaacctatagccccacaacttgctaatgagaacttacaagtttacatcaggaggaggaaaagacaggaattagagcacggatcacagtcaacatgtggccaatatattgactccaattcaagtcttcctgaagagaacataggtgaggatagggctggagaggtgttaattcccagcattggtgattctactttgccaattgcattgaggaagggtgttaggagatgtacagatcatccaattgggaattatgttacgtatgaagggttatcaccatcttacagagcatttgctacttctcttgatgatactcaggttcccaacacaatacaagaggcattaaaaatttcagaatggaagaaggcagtacaagatgagattgatgcacttgagaagaatgggacgtggactatcacagatttgccggttgggaagaggcctgtggggtgcaagtggattttcaccataaaatacaaagcagatggatcagtcgaaagattcaaggctcgtttggtagctagagggtttacacaatcctatgggatagattatcaggagacttttgctcctgttgcaaaactgaacactatcaggatccttctctcattggctgtcaatcaagattggtgcttgcaacaactggacataaaaaatgcgtttctaaatggggacctagaagaggaagtttacatggaaataccacctggtttcgaagaaagtatggcaaagaatcaggtttgcaaactccaaaaatccttgtacggccttaaacaatctcctcgagcctggtttgatagattcacaaaagcagtcctgaagctgggctacaaacaaggtcaggctgatcatactctatttgtcaagaagtctcatgccgggaaattggccatattgatagtctatgtcgatgatattattctatctggaaatgatatgggggtgttacagaatttgaagaagtatttgtcagaagagtttgaagttaaagaccttggaaatttgaaatatttccttggtatggaagtggctagatcaagaaagggaatcgtagtctctcaaagaaaatacatactcgatcttcttaagaagaccggtatgcttggatgcaaaccaattgatactcctatggatagtcagaaaaaacttggtatcgagaaagaaagtacaccggtagacagggggagatatcagcggcttgtcgggcgcttgatttatctttcacacactcggccagatattggctttgcagtgagtgctgtaagtcaattcatgcacagcccccccactgaggaacacatggaagcagtctacaggatttttagatatttaaaaatgacaccagggaaaggcctattcttcagaaagacagagaaccgtgacactgaagtatactcagatgcggattgggcaggaaacatcattgacaggcggtccacttccggatattgttcttttgtctggggaaatcttgttacctggaggagtaagaagcaatcagttgtagctagaagtagtgcagaagctgagtacagagctcttgcacagggaatctgtgaagggatttggataaaaggggttcttagtgaactgggacaaatgagttcatctccaattctgatgatgtgtgataatcaggcagctataagcatagcaaagaaccccgtgcagcatgacaggaccaagcatgttgagattgacagacactttatcacagagaaggtgactagtgagacggtcaaattaaactatgttcctaccaagcaccaaaccgcagacatcctcaccaaagctttacctaggcctaacttcgaagacttaacttgcaagctgggattatatgatatatattctccagcttgagggggagtgttgaaataatgccaaagttaggactttaatttaggaataaaaaaggagagatcatttaggatatttccttatgatttagtttcctaattttaggagagaattaagctagattgatttttttcttattcagtcatttgtgtatatatatgtgtatggtgtgtaccgattaatatcaataaaggagttcagaaattcttcaagttcaaatttttacaatagttgaaacaattgtagttataaacttttctcatgcttccaacaatcagatagaacttggtcagccaatccttatttatgtatgaaggccaaaagagccatggtagaagctgtaaggacaaacttgacttccaagatttaatggaggatattggtctagatagacttgaatggaaaaagaaaatcatgtagctaatctcaagatgttggggattaagtttttgttgaatggagttgagtacacccagccattcagcccatgaccttttattttccttcagttctttcataactagtattatgtttcaaatttgagtttgacactcatgctcctatatcagaatccaatgggagttggtgactccatatgccattgctacaaactaatgattttttgaaatggaacattaattttgatgaaagggtaagtcgagatttgctaccatagatacaataatttgtacaaaattcaatttggccacaaaagaaaaggtctcaatgtagtcaaggctacaggtctaagtgaaccctttgaccaccaaacgagccttaaatttatcaactatatcattaggattattttttatggtacagaccagatgataaccaacaattagagcatgcttagaaacaagatctcagtaatgattccactataaagcatgcatttcctattccatcgctctcctctagccaaggtgagaaagagtttcattataagactcaagagtaacagcagaagagaggaaggtagagaagattttgaaagaaggggacaagtgatcataagagacaaaattagaaataggatgtttagtattgtgcgtgtagtgtctacctttaggaacaacaaaagggagtttagaagtagaatttggagacatcaagaggactgttggaggtgacaaagagtaccttgatgcttctagatcaggatgttgttatttgtgaatataaaacctcttataagaatggattttgagaactagagcaatacaaactagttctagaagaaaatactaagacagttcacttcctttagaataataaggtacatcctcaaaaggtaacatcaatataaacaaagtgttttcaaaaagtaaggctataacactgatatcctttttgggttcatgaataataagaaattagcattttttttggcttaaggatcaagcttgttgcaaatatggctcaaattatgtacaaaatagatacccttaaaaactttgggtggaagaaggaaatgttcttggtcatgaaacaacattgaaatgttccagggcattctcaattctaaaaattaaactaatatgcattttcaacataaaaaggctagaaaacatcaaatactttagttctattgatacaagtcatatataggacatgagataaggagcactatatgaaccaatgcttcttgctagatcctagacatgagtgtaccaactcaaatgaatgcaatgagggctcatccgggtaaagtttaaaagtagccttataatgtttatagagttcgcatatttcataattaaagtcagtaaaagaagaaggaattaatcaacatagattggcaaaggaaagatgaccaagatgattgtgctactagcataaggagatagtactatggagacctaggggcttgtgcaatggagtagtagaatccatccttttcaaatcccctacgaattgttctctttgtccatagattttgtaagacacaatgtaaaggagaaaatatgattgaacaattaagttgaaagacaagtttgtgaacaaacaataagttgaaaggaaaattaaggctgtataaaatagatgaaggtgtaaaatcagccttgctaactttccaaccccatgaataggcaatttagaactattagcactagtaacaaaggataaaaatgaaggctgagaaagattggaagaagtaagatttgaccggtcatatgagtagatgcaccataatcattaatccaaggaccaagtggttagggaatgaatacaagtattacctaaattacccaacatggcaatgattgatgatggaagatagttatgctcatacaattttatgccaaccataaaccatggaagagtgagatattgattggcatgttgttacctatgacgcacaaaaaaaaaaaaatcaagtttcaagatctgagtgagagatcaagtagcaagaaaaatatccaagagatgaaaagaaaaaaaaatggcaacaaaaaatgagcctttgcaatgacaacagacatttaggtatcaagaataaatggtgaaatcaagagaattcatctaattgtttttatctattccaaatgaagttataaggatatttatgagcccataatagtgaaagaaaaggaaataaattaataaataattccacaatctctcctacaaggtttcctatagtccctcctacaatttctcctataatcttgatatactctttggtccaaaccctaacattgatgaaatttttttaatgtttagtaaaggcttctgaaatcatcagacaacttctaatcaagtactttgatgaagatttaagtcactgaagctgattgtcttgttcttctggcaggctttaaaggaggcacttgcacagattctact

SEQ ID NO: 13291 - DNA, 9046 bp, Vitis vinifera
  Intron number 1 from transcript GSVIVT01017597001 (locus G SVIVG01017597001) derived from phytozome v7.0 (chr-ID chr9 ; pos 11126919 to 11135964)
ttgggaagagactttctcatttgaattctattccggtatgttccacacaattttgttagtatttttaattgttctgtatgtgcttcaacttatcattatgaaagttggtttccacttttcttggttttgtatgtttatttgtttttaaaaccttttgcaattgccatgattgatgtaggaattcaaaagcatgtataacacctacatggacctgagttaagattgatatatgatggtgtcactgtattaaagaaggtatattgaatattccctaaaaaggcaaattcaattgtggcaacatggaagaagaaaaggagaatatcaattttatttttttattgttcttaatatgcacaagtacacttagtggtgggattgacaatcatctctatcccatattttgtggcctatacagttttatccaattccacatcttcagggtccaaaatttgagaattattcatgtatcttagaccacattttcaccatggataactgctagttagaatagtacttgccatctacttggtgttttcatttcctttttgtccgttctagacattgaagtcatgaccaaatagggtaaacttcatcttgtagtatcatagcaggaccagtccattcagaggataaactgtaattcatctagaacatccaacttgcttctagctagttttgcaactaggtgtggttggttgggctccattctcaggtagacttggtgtagtccagatcacaaaacctagagactgaagttcagtagtgtgggtttcagttaggggcccttaatacttgattggcctcttaaccgaccatgcagttgtagcatcactcctctcttgttataattttgtcttcaaaactatattcttttactattttagaacaaaatatcatgtcatgaagcagccatagtgagtttaatttggattgcatgaatatggcatgaatgatagaaattggaagtttgtacatatcctgggagtgccagacacatgattctggtgtatcatatcaaacaatatggcttctcttcagaaatgtctgagctacatagttcaccagaatggacatctagtactattggcacttttcttcttgttatcggtctggtttttgtgggcttgcagccaatcggtcttagtaaaagcgcacaaatttaagccgcatggatatgcctatggtgaaattttgtaaggaaagtgtgcagtagaggcttataaaagttatcaaacacatgggccacttttagaaatagactaagtgaaattagtgtgggtttaaacagtattggaaagaagaaaaggtgaggatgtatctgtccatatatatatatttttttttgataagtaaagcaagatgtattaatgaagagacggaaagttacaaagtatacagggggtatacaaagcaactaaccccctctcaaagcaaaaaagaagaccaacaagactcaccaccccttagttggacgctaaccattccaagaaccctataagggacatacgctcctcaccaatatacaatctagcccagctccacaaactacaaacaaaagaattcttaagcttttgaatatctaacactccccccctaaaagttagtctattcctttccttccaaatcgtccaaaaaatacacaacggtatggatttccatatctttttcattttctttcccacaaaagggcctctccagctagttaagacctcctttacagtttttggaaagacctattgcacacctgataacccaagaacaatatcccatagaactctgaccactatacagtgaataagtatatgatttacagtttcttcttcacaaccacacagaaagcaacaattaggaagttgccatccttttttctggagtctatcaggagtgagcaccctcccccatgtagcctcccaagcatagaatgcaaccttggttgggactgaatccacccaaatgcatcttgatggaaaaacaatatcattgggtctggccaccaatctatatgcttctttaaccctaaactttccattctttcctcccttccagcagactgaatcttcctccatagagggcttgtaacccctcagagcatggagcaagtcccctatcatatccatctcccaatcgttaaagtccctcaaaaatcttagattccaccccccttgaccgaaattctgatcccacatctcctccaccgtagcattcctatgagaagccatagcaaataggtgagggaaattttgggacaaccttgtaccattacaccaaacatcagtccaaaaattgattttgcttcccttcccaactatgaaccccatgttatcatagcaccattcagtttccttcaagatttccttccacacccctactctgaacgccccataagccctctttgctctccaaccatgaccttcttgcccatatttcaccgttatcacttgcttccaaagattatctttatcataagcaaatctccagatccatttaccaagcaaagctttgttcaagagcactagcttccttaagcctagccatcccttgctcttatcctcacaaatcgcctcccacttgattagatgagctttcctttccacacttccccctccccaaaggaagtctctttgagctttttctaatctcctagccactgacttaggcatctggaacaaagacatatgatagattggcatgctagccaaggtgcttcttgtgagagtgattctcccccctttggagatatattgtcgtttccaccgtgctagtctcctcctcactttctcttccaccccatcccaaactgaaggggctttgttaggagcccctaatggcaagcccaagtattgagaaggcaacgagcccaccctacaccctaattccactgccatctcctcaatctcctccaccacaccaactgggataatttcacttttgtccaaattaatccttaggcctaaagctgcttcaaaccacaaaagaatccagcttaaatgtgttaggtgctctttatttgcctcacagaacacgattgtgtcatcagcaaagaaaagatgagagatttttagattgtgtctcctatcaccctgaatattgcaacctgagaggtagccccccgcaaccgccctcctaattagggcatctagaacttccattcccagaacaaagaggtaaggtgataagggatccccttgacgaagccctttagaactcgggaaaaatccagctggaaccccattaactagaactgaaaacttggctgaagatatacaactccacatccaacccaaccactttgagccaaatctcattttgtgtagtgtcttcaacaaaaactgccagttgatgctatcatacgctttctcaatatccaacttacaaatgagccctttctcttttcttttctgccacgagtctatcacctcattcacaattaaagaagcatcaaggatttgtcttcccatcacaaatgtattctgagttggggctaccactttgcttaacattctcttgagtctattagctaacactttagccatcaatttgtatagcccccacaagagactaatgggtctaaaatcccccagatcagccgttccccctttcttagaaatcagaaccaggaaagtattattgagacttttgagaaaggagctttgctcatgaaactccttaaacatctccaagatctcccctttcacaaaatcccaacaactttgccaaaactccatagtaaaaccgtccggcctaggggctttatccccattcatctccatcaagactgaatggatctcattttcagagaacagaatctcaagattctctgcttcttgctggctaatttgatctaattggatcctcccaatatccgccttccatcccaagtcttctgagagcatttgctgataagcattagcaatcccttcccttacttcctgttcctctaagagccaaaccccatcaattttaattctgtccaaggagttattgttacagtgggcattcgccatccgatgaaaaaatcccgtatttttatccccttccttaagctatatctcccttgagagttgtctccaatgactttctttcaagagaacccattttttatagctttcctttgcttccttttttaattctgtctcctccaaagacaatcttctttcactttccacacggtcccaataatccacttgctgcaaagctgcacttttattaccttccagatttccaaagacctctctattccaaacttttagtttctgtttgagctccttcatctttgcttccaatctataactagcagtgcctctgacctcaattcccctccaccaattccggataaggtctagaaaaccctcaacttttagccacatgttttcgaacctgaaaggagaaggacctctccttagcccgcctccttctagaagaagggggaagtggtcagaaacaagacgaggcaaccttctttgaatcaccccactgaactaatctagccaactaggagacaccaagaacctgtccaatctagcccaggactggttgttaaggcccccgctccatgtaaacactcccccttgcaacagaagatctaccagccctagatcatcaataatataagccaacctcctcatggtcggggttattcttccttgtcggcttctttctctttgaaaaagggtactattaaagtcgccgcctaagcaccaaggctcgtcccaaattcctcttacagccccaatctcatcccacaaacattctctttcctctttggtgaaaggaccatagactcccgtaaacacccaaacaaccccatcttccacattcttgaatctacacgatagggagtactagccctcctcccaatccacaatttccagcaaccttttatcccagcaaatcaacagacctcccgctaccccatccgcatccaaagccctccaatctaagaatcttgtcgagcctaaacttctcaccaccccctccgacattggctgaatttttgtctcctgaatacacagtaagtcaactttttgattccttatgaatgtcttgataattttcctcttggacctgtcatttgcctccctcacattccaacttaacaactttagcttcattaatctactgcaagctgatcccctttgtcttgtgaagggcctttttgcttataccccttctcataattaactgagcaccctagcctcttcaattccctttcaaattttgacttctccatcaattctttgttatgaattctctcccgtctctttcttattttgatcaaaaagttcaaaatttccttttccagcccttctgtcgaaaagcccaaaaagtgactaaacttggccaagctactttcctcccatctatcctctttctcatttctaatctcttgaggttctgtcatctctgaattccactccacccccctagccaaattacggtccttagtgaattctaccaagtcccagcatccattgccatccattccgaggccaacttcatttatttcccctagcactccagagtgatcgaaagactctccctccggagtctgatcaaaagaatacaggataagatgagaagacccataacccctttccccctctattcttagtccagaatcatacctcatggcttcctctgccaaagccttgtttgttgctgagagtatggctttcacccttttcttccttatttcctctatctcccagatgactaagtgctctccctctaaagaactcccgttgctagcaattctgcattccagaagacttcccttctctaggggtcttttacctttgttttgggccatggactcacctaatctgtcctcttctatctcagccgttgggcctctcccatcatgagcccatcttttgggctggctagcctctggtccagcagagatggccaccctttcctttaactttaggcccatcgctgcattcggctcacatggactcttctctacgccccttatcactggcgcctgggcctggtttgctattcctttccagcctaagttcctcttctgccagcccagccccttatttgaatgcgtcagcacctcgggccgttcgaagactaactcttgggccgtgggcttaattggtctagccccatccatcaaagagccatccccgtcaaaagcccagctcttggacggcctagcctctggccccgccccttctttcaccactccctttaactttaggcccgaaaaactcggcccacaagccctcctctcatatcccatgggcgctgatacttgggcccagtcaactatcccctcccggcccataaccctctcctgcctccccgtcccctcatctgacaacagcagctcctcgggcttttcaatggccgattccacctccatgtgcgagctggagcgtgagaggttgtcacccttgacctcccccctttttcgactgtcaaccctaatcttcttgactgacagcctaagctcccaccagagggcgagggtgtaagcttcctcctcaatcccaatctccagcgtactcggcttagcttcgttgtccatcttaaccagaatcctagcccattggagctcttccagcttcgccgtttgaggatcgatggcaacgaagccaccacattcatcccccacccttctcaacacagtcgtgttccacaacgatactggtagcccaaagattctaacccaaacttcattactttgttcctcctccttcctgcaaccaatccttggactccatttctcaaatctcagcctaagccctcccatcgttctctctcttgaaaggaaagcccgttgagcttcatccaaagattcaaattccaacaagattctgtttctctccaattttgccaaccttaaccttcctttcaatccccaagagctcgccagaaatttccccaatttctccaaatcttcttcatcgcctgacctagggttccaactcccaactacacaatattccaatttttccagatttctatggatttcctccctccataccttcaccttaactgaatttatatctctgcagatcggtctcttcaccacttccgcaaacgttctcttcacagccaggtttccaccgaccatttcttcttgcatattgtcctttctgccgattgacctttgcagtatctgtagattttccgccattgcagcctatcccttttttcctcctctaccttttgggatgtagatacagtactgttttcgttccgagtcggttacccctagccggaggaagcatcccgctttattcgcgcttcgcaccagagagtaggatctcccttgttccttccattcccttacccatctgtcttccttctcgtcccttatacagtggtttaggccctccattaggaaccctaaactctccactcccactctaacccaagacgagactccacccttactttcctctataaatatttggggttttcctcttctctctattagctccagctcgaacacctttgactctactgggaacctgctcccccttcgtcttcttcgaggcccctccttatcttcatctccctcgccggcgtaatctcgccttcttccttcatcacgttgtcgctgaccgctgtgttcacgctctctctctcgctctctctctcccattcaaagaaaagctaatatatgtaggatgtatctgtccatataatacatccatatatatctttaggtggtaagttgcttgatataaatgttgctttatttcctttaacatggtatcaaagctttgggtttttgaaattttggtgcatttattcccctgattttttaagccacatgtaaaaggaggtagcacatgaagcagagttaagtgataatttgcttgctatgattattccctaatggctaatggtgttgtatttattttttaaatggatgtatttttttcttctttatgcaccctatgtctagtttgatgttgcttgttaattagtcttagagccaacctatcgactttcataaatggttcttcaaaggtttgcaaaactcagttgttgacttttgagttctaccagaaagatggcataattagaagaagcaatttgctccattagccaatatgaagcttggtttgacaactgcctacaatgatggtgatccccattgcatgaacatgactcatcctttctttcaaccaaaattcatcttggtctccccttttgtcttaacagtggatgtttgggtaatttgccgaacccacacacacaaccacctctgcccaacctatggcacctatgtaataaattacatcctggagcccctgaaccataatgtggctcacaaatgttcccttaatgctgtgtagaaccctctaaggtcacggagctataatgggacccatgtaaagcttaatttgtgtgttcctcatggacttttatatcttgaaagtaatacaatttctttctttttttagcccataagaactatatcatgatgtataccaaataaaatagtaaaaaatagtgaagattatattatgccaactaagatgcattatcatcttcttttggacgctggtgttgctatatctgtatcaaaacatgatatgagagtgttattcagattaccttcttggatgctttcattgcctacacatgctaaattcatggatgcataaatgcacaccaggttgctttcatagtctcattcatacatccatgatgcatatatattcacactgtactcgcattgtgccatactttaactaggtatgttttttttgcattttatgccagtggaaagtacatttctattccttcatttactttgtgttctgtgcttgctttgatctcccttgtatgaatgtgtgcatgggtagaattctatcagaacttctgctttcttatatcgtttggaaatagtagtatatttcttttcccatattattgttaccagtgacatgtttaggttgacatgcacaaatagtattgttattttgactttttggctttcaggttacttctgggtaatacctggatatgtaagtactcattgatttattgtacttgcagcacactccacgagtta

SEQ ID NO: 13292 - DNA, 1933 bp, Vitis vinifera
  Intron number 6 from transcript GSVIVT01032086001 (locus G SVIVG01032086001) derived from phytozome v7.0 (chr-ID chr1 3; pos 22873774 to 22875706 reverse strand)
aaacactgtcaacttcaagtccactttgaaacagtaggcaggttttaagtgtttcatggtgtaaaatgaacttattggttctatttgttgcacaacccatacacacacgaccactttatcttgtgttgaggttccttattactatcacatggaacacctagaggatgacacgtggacaggatattccttgatatatgtctcattgacctattcgcaggcaattgctggtttctgaggcagcacaaaacaaatgcctaaccacatgggtacatgcctaagattcactcagatgcctattaataggaagtccaacttgtgtagctgcatgggaattctttgaggactcctcaaagctgcccaaggctgagtgccttgacattggggctacagtccaagacagaattggaacttctgcttctttgctgtgggattagccatccatgcctagtacttggaatggttcaagggtcctgcattgccagctaggctttaaagatttttgaggtggatgactagacctagttgcacatgatggatgtcaatcttacttcaggagttttgaatgggaagaggttttacccttattaataagccatgatccaagggttgagacagttaatcccaccatcattactctctatgtggcaatcacatatgctctgagattttgatccctagtgcctctgccattactccactccttgcttctctcaaactaatccttccttaataattagggcacttcaccatccattttgtttacctctgtcacctaataactgatcctaaacatgtagcaggcatggaataactgatgagagcaggaaatagatactgcttgacattgggatggtttcaattgtcattcaatgataattaatttaaatcataaattaagtgataaataaagttaaagtatgctaatagaagaaaaagagagggagagaagcatttttctccatagactaggggagatgttctcacatgatctataaattcttgatttgtggcttaaatggtctaaaaagatccatctagtcttcaagccttgccaattcagatgcagccttctgtatcttgtttgttctgctttcttatatagccttcatttctgataatatcgtcttaagatcccaggataataagaagaagggctgtgatagttgtagaaggaatggcagaagaggcttgtgaatatgtgtcacatcttgcagaagtttctaaaagttatctgcagaaaataatattcaatcatttgggatgtcttgaaacatatccgatattctgatgtcatacaaaagtggcttgagttctgtaatatttgataactataaaaaggattaatgtttagttggcattttctcatctcatacataatttgtttcttaccattaaataccagaatctttagcaaaaatttaaacctccatcaacattgtgaatggcatcctatattgcttctccagtttctttgtttttcttttgtgtttatggtttttagatttggtctatctaacagttgcaatagcagtgttcctgttgtttgctgttgcaagcttccccaaaagtctcccctggggcttatattgacaggaaatctatgttccacaaattggagcattctttgtcggttattccaagaaaacgtatcctattcttcttattttagtatatttcactttacatgtgttcttttctcatattaaacatgcttggcattataatgatttttttcttactgcacggttccttatattagtgaaaagcattttggtagagattacaatttttatggtttttagcattttccattttgtatacccatgtaagagtgcaattgcctgcttttgcattttatataatgttttcgattttttgttcaagtactatgatgacttccaaactgtgatgttcttaagtcttgtttcacttg

SEQ ID NO: 13293 - DNA, 4189 bp, Vitis vinifera
  Intron number 5 from transcript GSVIVT01001207001 (locus G SVIVG01001207001) derived from phytozome v7.0 (chr-ID chr7 ; pos 790424 to 794612 reverse strand)
aacctgatctggctcctgtgaagcttgatcctgttgagttcatagaagcatgaaatcatggattctttgtaatgctataaggagtgtgacagcagattttttttttttttttttcggttcgtctttgggaacaaagattcaaataaacgaaactgtgttgtattgctaatgacctctactattctcaagacccatcatttgtgttagactaagaatgggggattgggtgttccatattataagaacatcacatgtggattaggtcatttttgatagggtctcaatagatgatcattaattgtttccaattattatgtttgttttttctcttacatggcaatgcttaattgataataaaaatgcagtacaatgattcttggctttcagtactgtgatcaatacttttggaggtttcacttggcagtacactgccatccaactcagctaaagcaccattgattaattggaatttgcattattctagtacttggtatatatacctttgggagcaaataacatatgaaggcgtgtggaaagactatgtttgaggagtatttttggaaacggtttagaaaaataattttatcatattttgtaaatcaaaattttatttgaaaccttgaaatatttttaacttgttaattttctttgtttttaaatatgtttttaaaaataatttttatccataatactttatttttagttattctttatatttatataattatttttaaacaatcttaaaaaagaaaaaaaaaaaaaacttaaaacaattaaaatgtattattttaaaatattatattttctggttttagaaatagaaaattgttttatgtttttagaaataaaaaaattgtttcctgtttttttggttgttaaatatatttttttccttttttttttttttggagaaataggaaactattttaaaagatggttattaagtaggacctaatttgccgagcacaatggtcgtcaacattcatatggggctttcctttgttcattaattcctctagcttataaggctatgggccatcaaaatttatacactaaagttgtgtgttggtgaaaattgtcgttggtggggtaacgttggaaataggtttgctagttagatgactacaaacatccttcttcttttgttacaggagaggaatcgaggaagacgttcatgatatttgtccaaatattaacttcatttaatcattatatttgtcaaaattttaatttcaattcttttggaataaaattttattaatgtgatgaggtaaggttatgtaagataaggtttaaggggtattttaggcattttatattaaataaggtaattgagggtattttaaggattttcattaaattttcaatggcgacaattaacaatcacctatacgtcaatggtcatagttggtcaaaagcgtggtcttgctctaatcaggctgctcatcgggtgttggtataatttttcaaaaataatggactaaagtgtaattgtcgacaataatagtatgctaccatgtagaagtacaatcttatgctataatactatgagcttgttttattaacaatattttctatagatgagatgagaatttaccaaattaatgacataagtaaaaatttgtaaaagactaagaactatttttctttaggggggtaatgctctctattgatgagttatttgtagtcaaccaaataaactataacaatatgaaacctttgctccctatatgtacgattgaaacattacagtaaaaccttcataaattaataatttcatttaaataatgaattttttcgattccaacttggactagtatactaagttaataactcactaaatacataaaataataatattttcaaaaatatttgaaggccccaaaaaatataaattaataattgatgaaaaacataatatatatatatatattgagtaacttcatcatatagtcaaactaggaggattgacatttggccaagatgtgatttatctctttccttggttggagtggaactttggttttctttagtgaggaaccgtttcacttgatggatagtcaaatgatcaagacgaaatgctttaggatggtcgaagattaaggtagtctatgataaaagataacctgctcatgggcttaagaatatgtattaagtatttttttataacttttattttattaattaaatagatgaagatatgcattcattacattttaattatttgtcctagtctttagttgctagtgagctgcatgagatatgggtcattcatttacgtagttggtttgtttctattttagtggtcatttgtgtgagtatttttttgtatttaaacacttgctccatgaaaagtaagacatccatcaaacttatttatcatctcatctcagggttgtattgggaggtgctaacccctcgaagcttttaaacttgctcttactaaacctttccttatcgcattgtgagtctaagatcacttaaaattaaccattatttatgaatccaagatgattacttggatttagcacaaattttatgagagacaagaaaggttaattcttttgagaatgacacccaaatcctttgtgtccccttcaaggttaaccaatatataggtgctaaaatatctgaaagagaaatcagagaatgcaaatatgaaaggatcgatccatatcatccatacaatatgcttttgtctatacttattattattctttctgttcaaagaaagaaaaggacacacccattgaagatgaaacccaagatacttgtagtatgtggcttatattgagtgaaaaacatatagagaaaaaggggcaaatacccatgtagtatagttcaagagtatttttgaaattttaatacctgagggttagtataaatacccttttatgtaaccctaatttaaatatactgaaaatcttctttcctattcttgtagacgtaggcaatctatctaaccacgttaaatttgtgtctttttttttttccctctaattttttcactaggaattgttgcatgaagatcaataatactgtcctagctcattgcaaagtgcagccaaactgtctttattaaaatttgtcattcttggcttgggtcactttcctagttttgtttcggggtggggggaccatttcaaaggttaatctttaattgaaatatagatgctatgtttttaaaaataaagtttttttttttttttaaattttggggtggggaccatttcaaagattaatctttaattgaaacatagatgctatgtttttaaaaataaagtttaaggtgacattttagccaagaatattcccccaagttcatttagggtgtgtttagttcttaatagtacaaagcaaagaaaaaaaatacctatgaaaataatttttttatgtttagttttattatgaaaaaatatgaaataaattaaaatatatttaaaattaattaaaattttattcactttaaaattattttatgttcacgtagaagtggaaaagtaagttaaatgggtttaaagtaacacttaaaaaaaaatttatgactttaaatctacttttttaattttttttttaatacttttcatctttattttttttcttttacatttttcctcaaatttttcgccaaccaaacattagttaaatcataagagtttgagctaaaacctcaaacaaatataaatggagatggagataaaggtataagtataactaatggggttttgctgaatcccattaattatgcagattgaatgcagcacaaacactacatattttgcgtgttctaagttctacacttctgatagtttgaagctctattgcatatttcttcaaactcatgtcgcaaggttgcgtgtgaaggaaatatcgggtgattggagcttaaacatgtttttttattagaattaattggttaaaaggaatgaaataattctcatttgaatttgacattttctatgttattgtttgaagaataatctattttttatatgaatgctattagtatttagaatcagtatatttttgacaaaaccctttattatcaatcaacatattttttattatttagaatagaaaaatatggcactggatcaccatgtggggcgtgaacgccgatcctccacccattataggataagaccgcctgtgtgtttcaacatgccgagagagagggagagggagagca

SEQ ID NO: 13294 - DNA, 4570 bp, Vitis vinifera
  Intron number 27 from transcript GSVIVT01013865001 (locus GSVIVG01013865001) derived from phytozome v7.0 (chr-ID chr 16; pos 5567604 to 5572173 reverse strand)
atatcaggtgaaggtcttatgattaaatgctttatcacttgctgtccatttgcaatatggaatttgtttggcatcactttgtactgtgcaatgcagtatgcaagaaaactctttcttttcttcataaatataccgaggagctgtcattttctaacaccctgcctttatagatttaggctcaaggtcccttggtctgcccaaaaatttggtcctcaatctctagtctaacagaaacctgggttaataataacagcaaaagtgttgtgtattttacattaaacacaacaaaattagagtctgcaaaaaatggccgatgcaccaacccaggagttttctggtctagcaaggtcttctttgaaccatttggatcttggtccagacctcaacccacctatttatgatcagaccgtctggagaggcttcggtgactttagagtttatccatgcctcaccccaccccacccctcaaaatattcataaattaaaacactaattgttcttgcccaatgaaagacctgcattttgctgatttggagagaattttttctgtacatttacttcatagattgtacaatatttataatagagaagaaaaaaatatacaaggattaaaaagttatacaaggaagaaaataaaataaatccctacaatctattcttatcttgtggcaataataataattgaattcctataatcaatgagctaaatatgacagctgcaaatatgctccttgtttatggaaattaaaataatcaatttctaaaataaaggatcaactagaatcaaatatgaaatttagaaatcttcgaatatacttgtcaacaatcaacagtctccctcaagttggagcatagatgtctcgaatgcccaacttgtcaagtatcactttgaaagtcccttttgatactccttttgttaaaatacctacaagctaattcttggtctttacaaaaggagtacaaattaattcgtgtgtcaacttttccttgattaagtgtctatccaattagacatgtttagtgatcatgctggaccggattatgggcaatgctaatggcagctttgttatcacaaaaaagcttcattagaccctaaaaaataaaaccctactcctttaataaggactgcaaccataacatctcacatataccatgaatcatagctctaaattctgctttagcacttttagctacaatagattggtttttgctatgctatgtaactagattcccttccaaaaatgcttaatttcctgaagttgatcttctatccattatagatcctactcagtcaacatttgtatatccctctacttccaaatggccatgtttagaaaatagcaaacctttatgaggagcaaattttaaatgcctgagaatcctatgtgtagccaacatgtttgttttctcacaaggagcatgcataaaatgacttaccacactcaccacacaagctatatcagggcaagtatgagccaagtacattagcttccaaactaatctctagtatcgctctttgtctgctagtgtaccttttaaacttttgcttgagttgtggtttggttcactaggagtataaacaagcttacaagccaacaatccaatgatgtaagtccaaaatatatttccttagagaaataaagatcccccacttcaacctaccaacttcaatacctagaaaatatcgtagaatgtcaagatctttgatctcaaattttgccgccaagtatatttttagtttactcacctcctcgctatctttatgtgtcaccacaatatcatccacatacaagatcaagacagtaatctttcctttaagtgcatgtttgaaaaaaagggtgtgatcagattgcctatgatggtattcatacttttgcatagcctgagtaaatctaccaaaccaaactctaggtgattgctcaagtccatacaaggaattccttaatctatatacctttcccccttttattaggttaatgcgtctagatctccatgaagaagtcaaattgttgaagaggccaatctaggtttacaaccaaggataagaggacccaaatggtatttatctttgtcactgatgcaaaagtttcctaataatctacctcatatgcctgtgtacaacttttagccatcaatcttgcttgaacctctccacagaaccatctaccttatgtttcattgtgagtacccactttcaactgtcttctttccctctggtagcttaagtagttcccatgtatcattttttataatgctttcatttcctcaatcatggtagctttccattttgggttatcaggagcttcttgtaacttttattaggaataaacacaaaggataactggtttgaaacattttataagatggagataaacaatgtgaagacataatgagagataaggtacttaatagtacaacttgcaaaaccattaagagatggtggtttttgctctctaaaaggataatgagtcttgttctctagagttaattgagttgactcttcaatagaagtatcaatagagagttaggagaaggaattagttgttgtagaagcatttaattggtaattgggttgatcaagaggtggttaagtcttctcccttcttcaatataccaattttatggctcaagaaatccttttgaagtgggtgcaacagtttcgaatgatgatagcacatcctaagatttctcttctcccttaagagaagcatctagatctccccctgaattgtaagcctgatcatcaacaaaagtaacatccatggtaacaaacgtcttttctgaaggtgggtggtaacatttttatcccttttttgtggtagcgtaccttaaaaaaatgcacttgagcgcccttggatcaagcttattcctatgttatttgtgtatatgaacaaaacaagcacaaccaaacactgtaagggggatatggagacaagttgggataagatgtgctttggacaaggattgtagaggggctcgaaactgaaggacttttgaacgcatttcattcatgagatatgtagcagtaaggactgcatcatccaaaaggatttaggaacattcatagcaaagagtaagtatctagcaacctctaagagatgacgattcttacactcgaccacaccattctgttgggatgtgtcaacacacaaagtttgatgaacaatgccatgagattaaacccttattcaagtagtcccctccattatcaaatcataaaacttgtaatttattgttaaattaggtaagaatcatttgatgaaagacttaagaggacgaaaaagacataacttttctcttttgacagatagatccttgaaacatgagtccaatcatcaataaatgaaagaaaccacttaaggcttaaataattaataacacaagatggtccccacacatttatgaataattgagaaaggcatcgacgttttttttagaacttgaaggttaggaagtttgatgatgtttggcttacacaactatcataatgaaaattagatacttgaactatggaaaataaggatggaaacaatttgtgcaaatagctaaatgagagatgtcccaatcttcagtgccataaccaaatttgttcttctgatgttggcctgcccactatgtgatttgtgtgtctaatccaaatcctgccaattcatatccaactagtatagaccacctctctctctaccaagaccaatcttcactcttgtaaacaagatcctgaaaaaaaaattgatatacagagggggcattgtgatcctgatgttggaggtaatgatcatctcttccatctccagaggggccaaaccacatggattcttgcctgtctcttttatttcttcaggcttctgcagttagatctagtgttttgtttgacatgtttgaagttaataattacattttaggcagcatcatttgttctgcactccacacttatgggtgcaagggaaaacatgaatacaaggaggtttgattggtcaaaaattggatcccaaatatcactactcaaaatcttatgaacccataggtgctatattggatttgatattttatttcttatttaatattcttgtgcttacttggcatttgggcttgttttgtgttcaaggttttgagcccatttatggtgaggacacatcggtgttcagctgtcatttgggtgatttgcccaaactgttgacagcactggcaatattgttaatctggtcccaattgcttcttgaaacttggttaattcaaatggctcattgatgctctagtgtgacaatgatctcacttagttctaccctgtagatcagccatatggtttgactgttcaatctggcagtcacatcttaggtttctcataatccaagatggaccatttgcgatgtactgatatttaatgagatgacaattttcatctttatatctgaatttcatgttccacatggcaccaaatacagcagtcaagcgtgtatgttttttctggatctataaaagctggaaaaaattttgaaaaccagatagtatatgggattaataaggatggtgatactaactctttcttaacttgtggtgctcatgattcagt

SEQ ID NO: 13295 - DNA, 11710 bp, Vitis vinifera
  Intron number 28 from transcript GSVIVT01029557001 (locus GSVIVG01029557001) derived from phytozome v7.0 (chr-ID chr 9; pos 21587178 to 21598887 reverse strand)
ctgaccaaacaggtgaaatgaactgctatgattttgagaagtttttggcttcttatggtcatctttgggttatagtcaacagtaggcttatgagcattgatattactgactcagatatctctgttgagaatttacaattttgaaccttcaattcgaatatccaaaggtgttgataggctcccaagcccacaccactaaccccaaaatgccacaccaacaaaagattatgctacttaaaaaattggctctaaaatggttaaatgtattctcattgtaacctcagttcctttatttactcaattgggagcaaataaatatctatcagatatttacttttggctgttttagtaattctgtaaatttaattcagaatttggatgcaaatttaaaaattttgtcaaactttggctaaatggtcagaagaaatttaaagaaatggtttgtccatgttggcaatgcattcagtgatgtagatgagtgcaaattacaaaaaaactttcccttgatagtttgtacaattacatgttcccaaaatgttttaattggtgaactttttttttttgataggtaaagatgggtatgtatgaattagtaatagaaaaatgtacactagagtacacaggatgtatacaaggagtacctaaaggaaggccttgaaagatagtacacaaaaaacaccctgacacgcaacaagaccccacccactctacaaaatcaaacaaaggcattaagcctttgcttatgtacatgctaacccaagctgaaagattacaaaggaacaagagttttatcctttggtcattctattccttatagtcaaaagctctttgattatgttcccaccaaattgtccaaaaaattcgaaggggggtagctttccacaactctttccttttcttccctacaaggagccatgccaacttaaaatggtatcttttattgaagaagggatcacctaatctacactatataaggaaaacattaggtgccatagaatcctagctttggagtggtgaagaagaatgtgatcaatagattctccccccctccccccaccccagtttacaaagataacatctattcactagtggtcaccctctcttttagagattatctaaagtcaaaacttttcctcaattggctttccatgaaaaaaagctcacttggatgggacccatgtgtctagataatgtttgttggaagatggaccaccctccccacctccaaggctgcatagaaagatgttagttgttgtccagttcttgcctttcattatttcactcatttttgggtttagtgtgcattaaagatgctttaggtatcgttcatttattaaattaatggtcctcttcattagcttatggtgtatgttcaactatgtagcctaaacacttcagaaggatggttgcgactccttgtatgcctaaattattttagattaattttttccatttatggatgcgctagaatatgattttttcactttactaaagaaaagactgtagttaaaaaaaaactatgtaaaactctttcattgttcaaaggtgtgcatttcttaatttgatggacctttttgttaacatatggtgtttctgaatgttttcctctataccatgaacttttgaaggggaattgtgacttcttacacaactgtatatatgaagaatttttggattaatgcacatggctacacaaatgaaacactgtccagacatgcttgaatatgattatttttttcaataaaaaaaataatgtagctttaacacaaaactgtcataataaggaagtagtttgagtaggacatgatataattgtgcacagtgtttcttcctctccaagctatgtaattttagtatatttatcgacctgattagttaaacgtatgtacttgttatatatagtttcatataaacttctaattacttattgtcaatgttttaaatggccaaaggcggtcttgaggtgaggtataacccttgaggcaaaacaatgcataagcctcaatttaaacaaataaataacgaaaaaattattaaataattagaaaaaatactcataaagtctcaagaaaattcaatagtaataaaggcataaacttcattacaataaaactaattatttgtcattgttaatagtttcttgaatggggagcagtgaatgtgagggaggcagcaggggaaattgtggttttttgggataatagagctcttgagctagtgggaatggaggttggggttacttgatttcatgctggttcaagaactatgaagatggctttgtgtggattttctctaaggtgtatggccctacctgtgggattgttagagaagatttttgggcggagttgggggcaataaggggtttgtggaatgacccttggtgcattgggggtgactttaatgctgtaagatttccagaggagcgattgggtgttaacattagactgtttatgacaatgagaagattttatgaggttattgaagacttgtagttgagagaccttccgttgctagggcatccctttacttggaggggggattgaatattcagacccaggcgaggttagatatatttcgggtgtcagatgggtgggaaggtcttttcagtggtgtgatatagtgtctactgaccagaccagtatcagaccattcaccgattctgttggatgggagggagagtgcgaagatgaccatccccttgaaaatatgtggctcaaggatgagggattcaaagtgttgagagagagagaagaaaaccttaattctcattcatattattcactacttacaattgagaagtatatatatatatatacaagcctaggagaactaactaccatacatgtaacctatattaaaaaaaggaaagactgtacactatatatacattatattcaacactcccccttaagttggagcatatatgtcatatgcaccaagcttgttacaaatgtatttaatcctaagacctctgagagatttagtgaagatgtctgctagttgatcatttgaattaacaaaacttgtagcaacacatcctgatgcgatcttctctctaatgaagtgacagtcaacttcaatatgctttgtcctttcatgaaagactggattggatgcaatatgtaatgcggcctggttatcacagatgagtttcatttgttcatcctttccaaatctcaactcttgaagaagatgtctcaaccatatgagttcacatgttgccagagccatagcttgatactcggcttcagcgctagatctggccactacatcttgtttcttactcttccaagatattagattacctctaataaaaacacagtaccctgaagtggaacgtctatctgtgggtgagccagcccaatctgcatctgtgtaaccaacaacctgagtatgacctctgttctcgtacaacacaccttggcctggtgtgcttttgatatatcgaagaatgcggattacggcatcccaatgcctatcacatggtgactgtaggaattgactaacaacacttacaggaaaagaaatgtctggacgagtaatggtgagatagttcaatttacctgcgagttgtcgatatctcctagggtctcctaaaggctccccctgtcctggtacaagtttgacattcggatccataggtgtgtctaccggtttacagtctaatatatcggtttcttccaggatgtctaaagcatacttcctttggaaaaggaccacactggaactggattgagctatctcaattcccaagaaatacttgagtttccccaagtctttagtctgaaagtgggtaaaaagatgttgctttagtttctgaataccatcctggtcactacctgtaatgacgatgtcgtccacataaacaaccagataaatacattgccccaaggagttatgatgatagaaaaccgaatggtctgctgtactacgaaacatgccaaactcttgaacaacagagctaaaacggccaaaccatgctcgaggagattgtttcaagccatatagagaacgacgtaacctgcacactaaaccagactccccctgagcaataaaaccaggaggttgctccatataaacttccttggcaagatcaccatgaaggaagacattttaatatccaactgataaagaggccaagaatacatagcagccatggagagaagcagacggacagaagcaatcttggcaacaggggagaatgtgtcaccataatcagaaccataaacctgagtatagcctttagcaactaagcatgccttaaggcgatcaacctgaccatcaggaccaaccttaactgcgtagacccaacgacagccaacggtagatttaccagagggtaaaacaacaagatcccaagtgccattagagtgcagagcagccatttcatccaccattgcctgtcaccagcctggatgggaaagaacttcatgggtgctctttggaagagaaacagaggatataacagaaacaaaagcagaataaggtgaagataatcgatgataactcaaaaaattgtaaataggatgaggattacgagtagaacgagtacctttccgaacagcaataggtaagtcattaggagaaggcagagccggggcaggtgaagccgaagggataggaagtgagtcagcaggtgcctcagcaaaagagagaggagcaacgacacgagggcgacgatgataaacctgaagtggtcgaggaggcatagcatcaggtggggagacaatgggaatgggcaagacttcagaaacaggaagagactcagaagtggtggaaaagaatggtgagtcctcaaagaaggtgacatcagcggagataaagtatcgatgagtctcaagggaataacaacgataacccttctgaagtctggaatatcccaaaaagaggcacttcatggctttggcggaaagcttgtcctgtctaggagtgagaatatgaacaaagcaagtacaaccaaagacacgaggaggaaggaaataaagtggttggtcagggaagagaagagagtaaggaatctgatcatgtaagacagaggaggcatacgattaatcaaataacaagcggtaagaacagcgtccccccaaaaacgaaaaggaacattactatggaggaggatagtacgagctgtctcaacaagatgtcgattcttgcgttcaactaccccattttgttgaggagtatgagcacaagaagactgatgaagaatcccatgatgagacataaacgaagtaaatgaggctgaaaaatattccctgacattgtcactgcgtaacacataaatagaaatattgaactgggtttggatttcagcataaaatttctggaaaatagagaataattcaactcgatttttcattaaaaataaccaagtacatcgagaatagtcatcaatgaaagtgacaaaatactgaaatcgtaaagtagacgcagttcaacaaggaccccaaacatcagtgtggacaagctgtcaagctcaaaaggagactttgcccgattatcaaacgctttgggaacgagacacgagtatgtttcccaagctgacatgactcacacggaagcgacgacaaagtggaaaaacgagggaccatcttctggaacttggagagactaggatgacctagacgattgtgaatgaggagaggagcatcagtggaaatgcaaactgcaggagatgaatccgaggtgaggtgatagaggccttgagactcacgtcctatgccaatcgtcttccccgtactccggtcctgcaaggtcacaaatttatcagaaaaggtaatagagcaattaagagtacgggtgattttgctgatggaaataagattaaaaggacattcgggagtataaaggacagaagtgagaggtagagaaggcagaggaagggccaaaccaatacctttagccacagtttgagaaccattagctaaggtaacaataggtaaagcagaggtagtagtaatagaggagaaaagatccttattaccaaataggtgatcagaagctccagaatctagaatccagggtccaagagaagatgtgtgggtaaggcaggcagaggcattaccaggttgggcaacagaggtaatagaagcctgagatgtctgagatgcggaggagctcggaggctgaggcagtggagaatcagaggattgggccatatgggcagtgcgaggaggccgtccatgtaactgatagcaacgatcgcgagtgtggccaagtttattgcaataggtgcaatgaggacgttggcctctacctcgggtactactgcgtcctcctcgagaggtagtttgagaaactaacacagaagaatctgaagtgctattagatgacaaagtttgagtggacaagatacggaggaggcgagcaaacacatcatccaaggacggaactgatgaactaccaagaatctgatcacggataggctcaagatccggacggaggccaataagagtaaggaccatgaagaacttgtcaagctgtgtttgttgagccccaacatcaggagtaagaggcatcacagtcaagaactcctccttaagagagccaatctgaccaatataagtagatagatccaagtcctgttggctgatatggacaatagcagaagccaccttataaagacgctggatatcattcgtgtataatcctttggcctgagtccaaaatttaaaacaagttttgtaggcccgaagatgaagaagaatccttggatcaaccgattaccataatacactacataactgtgcatctatcttcctccactgtacgcggtcaacctcagggatatctgcctcctgggtaaccaagtgatcctcatatccttgacccataaaccaaagttcaacagaggcagaccaggaaagataattttcactgccaaccaatttctccgaagtaatcataggagatccagatatgacacaggaaaaaatggaagttttagtagccatatccacttatctggagaatgaagtatgtttggatcgaagagagccctaatacggcttcagattgaggtgtggcaccaccgaaaaagggagacgacctcagatcgcagcgtggtaccaccagaaaggtagaagaacacttcccaaggcacgtgcagggattggggtggagaaaaagtagccggagcttcgctggaaagactgtttggagggccgacggagacaaaaatccccaaaagaggtacgtgcagggctcggatgggagaaccagggatgtagggaggctagtcggcatcaggcgaagctggaggaggaggcgcgtcgccggcaaagtcctcacgcgccctcacgcgccggtgcgtgagattcagtcgccggccgtaaaagtgcgcgtggccggcgcgtggattgttttctggctccggtgctttgggaaaagttggagatctcctccaggcgctcctcttggtgtggtcggtgtcggaaaaatatggcgccagaaaagttgccagtggtgagtgttttctgatgactattcgactaatcggaaagttttgggagatggggaaggtgaccggaatgaaacacggtcactggaaggtttcccggatgacacggggaaactggaaagaattaggttttctcccttggctctgataccatgttgagagagagagaaaaaaaccttaattctcattcatattattcactacttacaattgagaagtatatatatatatacaagcctaggagaactaactaccatacatgtaacctatattaaaaaaaggaaaaactgtacactatatatatattatattcaacacaaagatttagtgaagtcttggtggatgggcttcagtttcagggggtcccctagcttcattttggcagaaaagttgaaaagcctaaaaagctttttgaagaggtgggacattgatatcggcaatgtggtagttaagaaaagattggccttatcacagttggatttttgggattcaaaagaacttaaggggtaattatattttgaggaggggtttgctagggaggcttcaagggcagaataccataaatggggtcttatggaggaaacaagctagagacaaaatctagggaggtttggttgaaggagggtgacagaaatactagctttttccaaaatggaaaatgcacatagaatgaggaatactatggcaaaggtgaagattaatgcggttaccctcattgaggagattgatattaagttaagggttgctcaggctttccattctctattgacggaaccatctagggagtgtttcgatggttgatagtcatgatgcaacaaagttggaggacgagaaggggaggcgttcaatgctttgtcagaatttaagggggataaagtgccggggtcgggattcactatggtcttctggcaatgttgctgggattttgtaaaggaagaggttttggtttctttatggaatttcatgcatagggttgttttgtgaagagccttaatgctatgtttatggtgttggtgccaaataaaggaggagctgaagatttgaaggactatagaccgttaagtttggtgggtagcctctactagctaaagtgttggccaattggttaaaaaaaatggtgagcaaagtggtcttcaaattctagaatgcatttgtggaaagtagacaaattcttgatgtggtgcttgtagcaaatgaagctattgacttgatgatgggaagtaatagttcgggggtgttgtgcaagcttaatattgagaaggcatatgaccatatcagttggaattttttacttgaggtgttagaaaaaatgggctttgggcgaaggtggattagttggtgtatctcaagaccaaggttgtcagtgttagtgaatggcactccatcggggtttttcaaagctctagggttctaaggcaaggggatccgttctctccatatttgtttgttctagccatggaggtgctcagttgccttcttagaagggcaaaggaagggggttatttgtcaggtttcaaagtgcttagtagaaatgaagagggtttggagctttcccaacttttgttcgttgacaatactttggttttttgtgaggcctcttctaaccaaatgacttacttgagttggttgctgatgtggtttgagactattttgggtttgaaaattaacttagcaaaaaatgagctcattctagttggaagagtgttgaatgtggaggagttgactttcgaagttggttgcaaagtgggtgctctcctaaccacttattgggggctcccattaagagccactcataattctgtggtagtctgggaagaggttgaagaaaggttttgaaagagattgacaatgtggaaaagacaatatatttccaaaaggggaaggttaacgttggtgaagagtatgctagctagcttgccaatctactttatgtctttactctagatgccaaggagagtttgtttaagattagagaaaattcaaagggatttcctttggaggggggggggggggggcgtctttagagagtaagcctcatttagtgaagtgggctattgtgtgttcagacaagatcaatgagggtcttagagttagatgcttttattatctaaataaagccctcctttgcaagtggaattggcactttgccaccgaaagggatgtcttttggagagattatttgtgacaagcatggggaaatggaagggggttggtgctttaaggaagtgaagagtagccacggtgttgggttttgggagactaaaaggaacttgtgggagttagtttctagtcggatttctttctcggtgggcaatgggagaaggattaagttatggaaagacaaatggtgtggagatgagcctttgtgtgattcgttcctctccttatttgccttatctaattgcaaagaggcttaggtggcggacttgtggatgcactctaaaggaaagggctcttggtttcttatttttctctagatccctcaatgactaggaggttgagactgtggagtgctttttgtcaagcctccaatataaggcaatggttgtagaaagtgaggacaagttgtaggtagtaacaaagggtggatccttctttgctaagtccctctattctattcttgaggcaggaaaggtagaaaatttcccttctaatttcgtatggaatgtgtgggtttctcctaaggtaagcttctttacgtcggaggcatcgtgggggaaagttttgactttagaccaactacaaaggaggggatgagttttggccaatagatgttccctttgtaatgctcatgaggagtcgattgattatatcctcttgcattgtgggaaggcgagggtgttgtgggagatgttgttctctctttttgaggtgcattagttgatctacgctatagttagagagacccttttagggtgacatgactcctttgttggtagaaagtggaaaaaagtttggagagcagtgcctttatgccttttctggacattatggaaagagagaaatagaagatatttcgaaaatgtggagctttcagttcaaagggtgaaattcttgtttttgtgtaacttattatctgggtttaatttatttatagaaaattcaactatgtctttagtcaattttattgattggttggggttagattgagggagggagtatttttgttttccctatactttttggcactgtttggcggctattgtatacaccgtgtgtaccatggtgcgccccttttagcactttcattaatgctataaccatttacctataaaaaaaaaaaaaaaattcctttttctttcttctaaaatttaactctcatggttttgtcaaataattttcaatattactatcactattacagtaggatcctcctaggaatatagtcatatccaatggctatattatcctccccattagtcttaatatccactcattcttcttcttctttgtccattaattgcagtgatatttttcttatctatcaataataagataatgattatatatgagattagccattaagatagtcaacagttcccccattctttcttctcaatctctttttttcccttccatttaaaaggttaattgaaagcactgagtccttatttcgtaagaagttaaccaagtcaggacccaacacaatactcatgaattctatgtcaaaagctcacaaaagcatagatgataataaaagccattaaaattcactcaatattgagactaaagcctcttataaaatatattccaaaagcccacaaaggatgaaaacccttcggatatttgaggcttaggcctcaatagccttgaggctatagtgtgaaagctataagccttgacagggtgagatgtaagcctcaattacactacctaaggctatagcctcaattaccctacctaaggctatagcctcaaggctaattcacagagtcttgccttaaggcataagcctcaatagcctttaaaataacacagatttttgtgttttttctatagcagtgttctacataatctggatttattgtgttggtgtttttgtgtctgttgggtcttgtcatatgcgtttcctgtgtctgtttttctgttagatgtcatttgctcagtttgtgttcaccttatgttttaccccattttatgttgctttattccttttaaatttttgtagaggctattctctggaagttctacttcactccagatgctttaatacttacaacttacaggttgttttaccatttggcagtatagg

SEQ ID NO: 13296 - DNA, 3042 bp, Vitis vinifera
  Intron number 4 from transcript GSVIVT01028392001 (locus G SVIVG01028392001) derived from phytozome v7.0 (chr-ID chr7 ; pos 7047921 to 7050962 reverse strand)
aaaagcctcggtacttcatatttcacaaccagcttgggagttgggagtttcctcagtagttttcttctatcaacagtttctgatataactaagaagcatggccaagggtggattgagaataatctaaacgtttctcatttggactatttttatgcattctatgccatcttgagcttcgtcaacttcctcttcttcctcgtggtcgcaaagttctatgtttataatgtggatgtggacatgacggaatccaaaagagaactacagaaagccatggaaacttcaccaagtgaagctagatctcaagttaacgaagtccttttgaagggactaggctgattaaacttgtattttgttagaagataatcttttaccttctttcatacttgaaattaatacaccatcactgtaaaactcatggtgatggcatccggatcgtccttgtttttgcttgtttttggtggtcacaaagatgtcatacaaagcttattgagactgtgatgaaagaaatttgtacttccatggaggttctctaattcaagaccgtctctcaagattctgaacttttcgttcatttttaagaacgcagcaaccaaatcacagcctggttaatctgaaatagaaaaaactacacactcccaatcaattacatgcacccctggattctcaagaagtatatctcctcattggtgcttaccaactgaggctaaaactaatgattgttgaatcttggttgatcacttcgcttcatctatttcaaaatgcaaatattttgatttgaatttacttaatcattgtttggtgtttagtttagtttcaaggggatgaatcaagtcaatatgatttttatgaagtgcaccaacactcaataattcacctattaaaagaaatgatggattataatagtaaaacgctcgaaaaacttttttcaattacggtcacactctaaaaaaaattgggttaaatatacaatagatacaaattcatcattcattacataaaaaaataaaaaaaaataaaaaaaaaattctccaagaggaaacccccaagctaattgagtagcttgattcttgtgagctcaagggggaactcgacccccaacatctcgtgcaaaacgtaataaaattgattcaggtttcacaatgtaatactatgtagtagctttaatacatcagtcacccttaattagtactgctttgaaatatatattttctattgtgccattcaatcactccacaagagtacacaagtggtttttctttatttttatacttgttcttttttgcactaccaatcctcgtttcattactcagattccccaaaaaatataactttgtgtccaactacacttaagtaagtggatttaatacccctaatcatgaaggaatattttgttaatttggggggattaaaaaagtttaatccaaataactgtctaggctgcaactttgtctccttaaaagtgcaaaccactagtcagtctaagcatatccccttgatagctgaagatcttaattaattatctgcagacccaagctactagaaagattccccatctatgtcatgattaaggagagtaagttcaagtttcctaggttgtcaaggatgaaaatatcccataggactttgccataaaagacgagttcataatttttgtgatcttttgaaaaaacatgagtagtataaaaaataattaaattaatcttttcaaaaagacgattttaatgtaaaaacaataaaaacaataaaaaaaatattgaatttgcctttttaaaagaaaaattcatgtcaaattttatttttttcttttatatatatatatatatatattttaaaaaaagagttcaatggtcacattgttattacatgcaatttgtctttacaaaccatattattttattcatacttttttttaaataatcatttttttttctaaaaaaaattctatcattggttaatgattaaattttgccttcccaactgtattctattctatgccgtctatatatgcctttttcatcatataggacaagagttgctagaagttgatctagtttgcgccaaagcattatacatgcttttatgttgattgatctcaacgtagaatatgagatttcatacctactttagaagaactaaataccacattttcatttctaaattataatcaagatgttgattgacggagaaagaattaacttttattatttaaaaagaaatattttgaatattctattgccattatcaataaacaaatcctattcacacaaatttgtggcctcgattatttataggcaaaggacaagaggcaaagaatataacacagacaaattatagagaagcatatgcttgttaattgataattaaaaagttgcggggaaaaagcaaaagtgaaaggagaaaatagtggtgaagagttgaaacaagtgaaaaaggcttacaatttgggaggttggaaagggtcctgaattcacctgtcccaaaactttatattaaaaaaaaagccctttagagtcacatgatttccaagaatactctaagcctatctttctttgcccaaaatttggacaccaaccatttggacaaacaaaggtacgcaacagatcaagagaaaggtggtgcagattggagagaggagtaggcagaagatgggactgtggatctcaagggtagacccattaattctaagatcacagactcggagatgaagaacttcgctcattcattgtaggtaagttaattaccatatgttttaggggctcccaaccctctaattaactgagtctcacaagtccctttaagtaaggtcatgtgagaatgaaggagagtggcagatgcacgtaggtaagttactttacctttgctgacctctcatgagatctcacactttgtttgtaatgttcagctgttatatatgcctagttccatttggattaatctcccacaagatctctttgttcttgttattgttggtataactcttgttttgcatcccaaatcaaacttctctcttgttcttttttagtctcagaagagctagctgga

SEQ ID NO: 13297 - DNA, 4353 bp, Vitis vinifera
  Intron number 2 from transcript GSVIVT01021186001 (locus G SVIVG01021186001) derived from phytozome v7.0 (chr-ID chr1 0; pos 2378323 to 2382675)
agataagctgctatctctttgccccacattttcaagtaagagaatttcttcctcctttttttttttgaaaaatatttttctcttattacgaagggtttggaagatgataattcttttcaaatacgtggtggaggacatggacaatcatgactggacacgtgcattagcgtggctgtggtttttctcgggagaattgtgttttgggcccaaaaattgataaaagatcctcataaatttcatatttaaatccaacacctaaagaaagtctacaaattgaaaagaaggatatgaaacatttaattttccgaaaatgccctttattgtcaaaaagaaaaagaaaacaactaacttctcactctctttcattccttttttttctctctctttcatcattgaccttatctttttctctcacatgtgggacatgtaaattaattattttctagaaaggtgttactattttcatcaattatttttctcccaaaaaccatgcctaataaattaaatattggtaatcaatggttgaaaaggattattactatatttttaaagtaaaatttttttaaatacctcataaaatattttttttaaacttataaataatttttaaacaccttaaaaaatattattattcttttttatccaatatatatataaatatctttaaggttgtagacaattatttgaatattttctctattttttggacaatacattgatattgttttaatatattattttgtaacatgatcatcttttaactaatggtgataattaatttttaattgaataatgtattataacttaataatttgaaaaatattcaaatgcctttttaaatctaaaatagatgtggacttgacatgatttaaattattaaagtatgatgtcattaagtcaagcaaatgtatcatattaagagatgtgtatgtaaattatatcataattttctctttttttatcttttttcctcgtacatgatatcttttgtataaagttttgtagatgaaaaataataaaatcttttgttatgtaaagaggtataacaacacattaaaattgaaaagagaatataatggaatacaaattagatgaaaatcactttaaataaggatataatagaaaacatataaatgtaaaaaaaaacaagtttagatgaaatttaaaataaaaaatcaaagaaaataaattaaaagtaataatataaaaatcgtagaatctttaaaactataattacaacaaaaaaattattttaaattaacttgataatttaaattaatgattttttatataaaaaaaaattacaaatgttacaaagataattttttatcctttttaattctatttaaatacgatttttttaatatctgctaacattatgtttataaaggtaaaatagtaaaaatatatatttcattcggtttacttgtaataaacactttaaatgcgattaattttaattttatttcctatgttttaattttggtagagaagatctaaatgacatagtttggtaaaaaaaaatattcataatttttcctcaacagttattatatgttgtttatattgtcttaatttatttgaaacaatgacattaatgtgttatccatttatattattttgatttcacaaaaaaaaaaaaaaaaaggtaatacctaaatattatggttaattttcctttatataggatgtaaatgttgtaagaaaaaatattgttaaaactacttaaatgaaatatgcaattacaaattttggatgatgaaatttaaaatttcaaattaaaacaatttttaggtgaatgaatgtgtgggggaaaagtgttcaatccttaggtgacaagaaaaaaaaaagttcagaattgattaaaatcttgcataaaagataaccttatacacccttgtataattagtacatttaccccatacagttagtacattgccttacacagtgagtggaatactcttttatagttagtgtaacacccttatataatagtgcaaatttcataaacaatttatgggtaccaaaaaaaataaagaaatgattcaaaatcaactaaaatctttcacaaatggtagccttgtacacccttgtacacttaatacatttcccttgtacagttagtgtaacatcattgtacaatggtgcaatatatccctcttaagttgtgtgtccacgtagatatattaatcttatttctaatggtttggctaacaaaatggtggatgaattacgattaaattttttttccccaaacattattactaagaaaagtatcgaaattttcatgtgaaagttaaataaattgcatgacgtaggtatgcaatctatgggtgacaaggaaaatgaaaaagtgattcaaaatcgattaaatttttttatagatggtagtcttgtacacccttgtacacttagtacattttccttgtatacttagtacatttcccttgtacaattagtgtaataccattatacaatatatctatcctaagtaatatgtccatgtaggtgtgttaaccatatttctaatagtttaactaataaaaggatggatgaattagggttagtttttttttttcctaaacatcattattggggaaagtatcggaattttcatatgggagttaaataaagtgtatgacatgagtatgcaatttgtgggtgacaaagaaaataaaggagtggttcaaaatagattgaaatcttttataaatggtaatcttatacactgtttgtacacttagtatatttctcttatacagttagtaaatactcttgtatagtgacacaaatttcatattcccgtagtgcatatatgcctatatttgtattaaacatgattctagtagtttgattaaaaaaatgatgaaaaacttcaatccaatttttttatgaacatattacatttttgtggaaaaaatatacaattgaccaattcctttatttaattgtgaacatattatattttaaaaataaaaaagaataattaataaatgaaatttaattctttttattatcttagtattaaacaaggtcttcaattttcatttttaaaaatatttttcatttttttaattaaatgtattttcaaaaagagacaatatagaaaattaaaataatttttaaaaataaaaaaataataaaaactagaaaaaatattttaaaaccaaactcaaacataatctatataattttcaactacttgtttttatttaaaatgagtaaacatatcatttaacccttttgtataagaaaaaaatcaatctctactatactatgtattgatataatccatttctaaatacgaaaacattttagttggatatttaaaataaaaactcttcatctatcctctttctctctttttcttttttctcatttcaataaattttcaattaattcaaatcattaaaaaaattccttaataaacaaatttggaacattcatataacttattacaaaagtctatgttcaaaaaattattaaactatggaaataaaaaaattaaaaaaaaaaaactttaaacttttcattttataataataaaaaaataaactttaaaatactttttagtataaaataaaaaaaatagtaaatatatttattttaaatagtgttttaataattaaattatttacttgtaaaatgtaaaaaataatttttattcatttaaattaatattttttttaaaagtatgttccaaaataatttttgaatcattaatataatttttatttatttataatttaaaaatagaaaataatgttgatttttcaattatttttaaaggagtttaaaaaataataaaaaataaaaaaatgcttaaataaaggagaattttatgaatgaggcatgtaaagagtggtggtataaagacaaaatgataggtgtaagtaaaaaggggtatttttgtctattccaaccttatatccttacaatcaattataggtgtttggaggatcttttattaatttttgggcctagccggacccaaaacacaattctccctttttcaactctatgttgtgggccatcgaataatgttgatggatatatgctttcctaatcataatcatctatctttaatttttttttttccttttgatttttttcttggggacaatcatatttgaaggttagatgggagatatttttaggtggtgatggtggtttgttggagggattagagcgagtacaaagggttccataccattttgttgttgaaagaaaaaaaaaatttatgtttttaattaatgacaaaaccctgaacaccgaaacacaaaaatcataaatttatgtggttcctgctgatgatagcttctttgtcaatccaatggtgaatcacagattgca

SEQ ID NO: 13298 - DNA, 1210 bp, Vitis vinifera
  Intron number 5 from transcript GSVIVT01017187001 (locus G SVIVG01017187001) derived from phytozome v7.0 (chr-ID chr9 ; pos 5162143 to 5163352 reverse strand)
caattttactagctgtaactttgaggacaatctcagtagctatatgaaatcgttctcatcccatgtcttactgacaatgtttttctaagacttgttcgatcttcaatttagtaagttcttctctactctctattatcattaccttttcatagcattagcattgtgtgaatatatatatatatatatatatatatagttggtaggatagggttctatatgaaaaatgtttttttgaaaacaatttttaaaaataatttttgaaaattgttatttgattttttataaaacaaaagtctatttaaaaatctaaaatatttttaacctattttctatatttttaaatatggtttaaaataatttttacatgtagtgttttatttttaatcatttggttaattttttttagtaatccttaaaaaaagtgaaaacaattaaaggattgaaaaaacaatgtcttttttttataaaaaaaaacaataaaatgttttttgttttctattatcaaacttgtttcattgtttttttattctggagaataaaaattgtttttaaaaacaattatcaatagagcctataatacttcatttgagtgatagttattgttttaattaatttttatgctcattattgctttaataatttattttttaataagcaaagcaaaaacagatggacaaaaaagttttcaccaagttacataggttgtatgctcatcgttactttaataatccatatatattagttattcaccgttcataatttttaatatatgatattatcaattatgaatatcgattattagactaatatgtttttttttttaaataaagtatggttatattactaaaaaatgtattccatttattgaagcataaatgtgtttatgttttcgcaaatgcttttattgaaaaataatgtcggttaacaataatataaacttactcaaaatcaagttgattattaattttaattaggatagacatggaatcctaataaaaagagttgctttaagatggaagtcatttttcaaattatctttttagtttatcatttttaaaagaaaattttgtcttaataacaaaagtttttattttattttattttatttagttttatcttaaattttaaagcaactagctttaagatttaagtttaaaaaacaaataacctcttagatttcaagcaatttcgaataggttaaacctactta

SEQ ID NO: 13299 - DNA, 3692 bp, Vitis vinifera
  Intron number 4 from transcript GSVIVT01029613001 (locus G SVIVG01029613001) derived from phytozome v7.0 (chr-ID chr9 ; pos 20758914 to 20762605 reverse strand)
ctatccacccgtgagtatttcatttcagaggtcacctttggcatcaatgttcttgtctttgttatatttacattgacttcaccattcagcatatggatcaaactttatctagatcatagttgttaaaaacttaggatacatgatacgaggcgtttagcaacccctatcttattttaagtgtatcttatgaaacatatacgatacatcatccaatgcttgataaaatgatatttacacttttagctatttttcataatttttagcaaaagtattttgttaaaggaaatatatacaaaacggttagaaattgatcatattaggagaaagagtaaagataatcctacatgaaagctatattcatgttgtcaaaggccaaagtggaagttaaataaatttattcttataatgaatatcggagaatttccatttcgatggttttgatattgacaatgaaaatgatggtaattagtgaataaaaaaattttaattaatttattagggtttttttaggcgaggaagagataatgacgaacatgaaaagttggaactttggagatgccacaaagagacatttatatcaacaacacatataagtacttatgccttggtagaatttggaactaaaacttaaatgtaaaaatctaagaagtttgtttttatggattttgtgatgaaattttatattaaacttatattttgttaaattggacttattaaaaaacttgaaatttaagttttatgattttgaaatttgtggatttattttatatgtattgattccacttttatattgttggtgtgggttttgagttatcatttcatgggaaagttttagatctaaatttttttgaaaaaaagagagaaaatagataaaaacaaaatttattttagtcatattaaatttttgagaatgataatttcattaatttatggtaaattcattttttttatttaaattgtactacatgaaggtagtttaactagtttctaaaacaagagttaattaaaatttccaaaaatatatttagttcaattttctatgaaaaattggatttgagtatttgaagtttaggattgaaaataaaattgaggattttcctttcttgttatgggttgtggccaattttgatcacagcataattttttaggaatttttatataatatttttggatatcttcataaaatctaactaccaatattttgtaaattttttatatttttattcttgctttgtacaattcttctcagaaaaattgcttattactaaagaaattaaatattaaaagcagcaaaactttgaaaatatatttatcaaacttgaaaataaacctttaaaattggatatatatatatattccaaatatttattcaatatttcttcttattatttttttaaagttagtgataaggaaaaaattactttattgaaaacttttgtaagtttttattgattaccatttcaacacctctattccctttttacatttagagctataaaataaatctccaaatttatttatctcttttataaaatggaaagaagactttgaaaattttgaaatattttatggtattttccattatattttattatttttcttcacatttttcatgaaaaaatcaatttaaaattttaaatttatttctcaacttttatttttcctagcattttcttttaatccaaacggggctagcaaatttctatccaattcaatgattttgaacttgcttaaaaaaaaaaaaaatcaataatcatactgtggaccccgcatttcatgctcaatgcgtttcccactcgaatggccagcttgattttttattttgaaaaaaaaatgattttttattaattaaaaaaaaaactgacttagattcgccacttatttttgttttattttaaagggtaaacaaaataagaaagaaaaccttaagtacaactcctgatttttggaaaaggtggtctgtgaaaaaccagattgggttcgggggtcaagttacttatcgggaaggtacggtataaaccgtagcacccctctaagtccctagagtcgggtctctactaatagattgaagttaacgtggcaatcaatgagaaaattagtggatactcaaatcaaacttgcacatatgaaaatcagaataggtatagagagtgcatacttgggccacgagctgtaatgcattatcaaaagcggggttagtgaatgaacacagaatgattatatgtatatcaaggaacagaataaatcaatcacacatgacagataaatcaatcaaacagtcaattagtcatgaaaactcatatgtggggcctccaccatagtccgattcatttttgcatgaattaattccataaattcctttgcttagaattacggaattttattcttgcttattttaaaacattttaaaatcagggaagtcttgaaagttgcatgccgaagagaggtggcagcaaaaatttatttgaaaatgagactttgaaatctaaagagtccctaaagatgaagaggaaaagagttgaaatttatttgaaaattgaaatgtgaaaaattatttataaaatgggatttaaaaaaaataaataaattgtttggaggaatgagagtgctagaaattatgtttagaatagatgaagtgaagacacataggaaaagctcgtggccaaagtagcatgtccaaaaggtggccatgcaatacctgccctagaggtgcggtttgaagctgtataggtcaccaaatcagaccatgatgttgtggaccctactagcccttgggatcccatattttgtagccatgcccttttgtctccttgtaggaacctccatagtgacccacgtcttcacccagcatgcatactcgggaatccttgtccatttactcgtctaagtccacttgaaggacttcaaatattggaagctcatgctcaggtttagatgcagttgaggtcacggaagcatctacctccgctgcaactgcactagtaatatagtgttgagcgtcgcggctccacagagaagaaccaagcgacgacctctcatccttgtgacaatccagtggagtgctccgaacacatccatttgaccaacccaccatgttccattctttgaggaactttggcacaaatccttccatacatgtacattttcggggatggttaatgttgcagctgccatatgcaccacacagaacatgactgtcatagtcgtccttctgtgcaaatgaataaatgatccacccacgtgttcgatcaatccatatgaaacaccgcacacatccatgtggatttaaaaccagcctcaaagtaacagagctattaacaagctcgtaagtataatacatctcttcttcattcataacaaaagcatatttataaactgggtttgacctctccacatcgtagaactcgtcctcggtgtatattattcagtaaagaggatctgggttgcaataatgtaaggtgcggctgcaagcattctcaagtgcatgctctacagaatattcccttataaaaaaaaaccgataatgatgtcttccgcatgtaaggattgtgaagagagcagcgcgctatatgcaaacagcagtggaactatcgggaattcattctggggggattcagcatccggaacttccttgtaggcaccataatttatctcacttggcaggtatcttaaaagcagagagctcaccaaga

SEQ ID NO: 13300 - DNA, 3563 bp, Vitis vinifera
  Intron number 1 from transcript GSVIVT01031483001 (locus G SVIVG01031483001) derived from phytozome v7.0 (chr-ID chr6 ; pos 18080696 to 18084258 reverse strand)
tggagagcacacggtattctttagtaaaaggcgaaagaatagttcgctttgtgcccaccacgtggctgcgtggttagaaagattgggttagaacatgttatataggaatatgataatggagtgaattctactaatgttcgatgtgggattctcctttctcttaagagccacaggccagaagaaatgctattgggcctacatgaccaagcccattttatgtttgctttcaaataattgagatcgatatgagattgaagctaagggccagtcatctatcaaaggcactctccaaatcaggattcctcacctactttatcaagtgtcacattcaaatatatcattgggacggtgtttgtgggttcttttggctttaaatttacattaaattccaaagccaatacattgaatttgtggaaattgtagcaatctggctttcatggggcctatacccaattcaatgttgatttgcttttccaaggaaacacaccttgtttaacgtctaaaatcagctcaattgaatgttgaagggtttctgagtcagccatgaaagcttctttcaaaacttaattaatgacgtgaataatcgggcttgatgcgaacatgacgccaaacctaaaaataattaagattactgatcccgattttgagtattggtttattttccaattataaaataattcacttccaatattgttaaaagagtttaaaatcttaattctgttatttttaaaataaaatatgtttcaataaatcaatattcagctaatatcaataaattaggttatgtttaggaaatgtttttaaaactagtattaattttcgagaaaaaaaatctgaaaacattttttattatcaattgtttgtaaaacaggtttttgaaaattgttatgaaaatataatgttgtatgagagtattttttaaaacttttttaatcatttttattttttttaagaagttgttttaaaaataattatataaaaaaatgataaaaaaataaaaaataaaacactataaataaaagttatttctaataaacatttgaaaaaaaaaaaccaagttaaaaatatttccaatttacaaatcttcttttgttttagaaacattagagaaacgttttctaaaattattttcaaaaacatttccaaatagaatccgtgactgtccagaactggtatcaagcctcaattcttgaaagcattcggccatcagtgacccaagcaaaatttctaatggaatgggtccatgtagaaatagacgttaaaaaatgtgttacccagtgggtccatatggatgggctgggcttggatgggccatcggcgcacataagcaaaacacatttttaccaattgataaatgggaagaacacttgaaaaaagagtagaataagtctgacttcaacaagaaaaatgatttcttttttaaaaataaaattctttggaaatttaatatttttcttttttttttttctttttatatatatttaaatatattttttttcctttacttactttctatatttataatattttcttatcctatatcacggttgaaccattcttgattcaaataaaagttaaaaataaaataaaataaaatatttcatagtttttttacctctttgttctttcccataaaactatcatccaaatacacgcccattgtactttttatcatggcatatcttcttcaacttttcattagcgaattttttttttttaatatttacactatttccacgaaagttttaacatggagatctaataatttaaatgagagtacacgaagttttgacatgattcaactagcgatacttatatttacgaatgagaaaaaatcattatactattaatttcctaaatcattctatattttttcacttcttgtatctacatttcactgatctataatatttataaatatatttttaatacttttatattttgtattctctttgacatttttagaaatttttatccttacctttaataccaatttaccttcaactaaaattcattttgtctaaactttattctcttttaactcttctagaaatcgtcatccatagtttttaataccaatttcttattttaacggaaactttaatacaaacaatattaattcaagaacataagaataaaacaattcacataaaaagtacatgagattttgagtgatttggtcaatcattgagtcaatcgttatttcttacatctctatacacctcgtgtaatctttatatacaatattttttgtaatactaatcaataatttgatacactttcccaccatgtatttattattttttttaacaacttttatttctgttttgtgaaatgattaaagaaaagtgacgtaaatttggtaattttgagatttaatgaaatatttactattttatattaaaatatacacttagttaattttttataaaaccaaaacatctaccgatttaaaattaaaatgtatgattgttctatattatgttatttaagttataatttatttaatattagctcagtgtgattgatattgtgtcactcattcacgcaatactaacatagacatttttcacaaaagatatttttttttttttgtaaaattaaaaattgatattgtgtttgtaattcacgaaatactaacatagatatttttttcattgaagatattattgctttttttatatcttttaattttaattaattatcaaataatttatgcttaattataataataaaacaagcctataatatgaatgaattaaagacttaaatattaagatactaaaaaagtgtgtttgatagtaattttatgacgtgtttctaatatttttaacacttaaaaatttttatctttcaagtattaaaaatattagaaacactttctagaatcactgtttataacgtgtttgacaatgattttagaaaatgtttttagatattttaagacttaaaaaattttagcttataagtattaaaaaaattagaaacacttcctaaaatcactaccaaacgttatcgaatatgtgtttgacagtgattttgaaaagtatttttaacctttttaatactttaaaatatttatttttcaatcattgaaaatggtataaacacttccaaaatcactaaaaacacactcaaattatcaagtttaccctatattttataaattgtatcatatacatgtattaaagataaaaattataaagtttatcctatattttattaattgtgtcatgtacttgtattaaaaataataactgttatccttaatacggtggagtctattttaattctcaaaatttgctaatggcatggtgatttaatgaaaaattaaggactaatgatacattaaatcatggtgatttaatgaaaaataaaggactaatgatacaatattaatgtagtaaatattcatataatttctgctaaaaagggggccaaaataaaaattttataattgcattgtagagccctcaagattagaagagggctcttaaaaaattagcgtatgccacttagtgtggagagcacacggtattctttagtaaaaggcgaaagaatag

SEQ ID NO: 13301 - DNA, 5114 bp, Vitis vinifera
  Intron number 1 from transcript GSVIVT01021290001 (locus G SVIVG01021290001) derived from phytozome v7.0 (chr-ID chr1 0; pos 3545411 to 3550524)
gtagtatattttaggaaaccacatattctgtctaggcataactttaaggtctatgacaacctatatatttacaaaatcactaccatttaggatagaatacacaccagaaaagatggaaaattatagagaatgaatttttctaagattaagtagcatttcaacacttcccctcaaacaaatgcaaagatatttcgcataccaagcttgcccaatgcttgatagacccttagtgaaaaggtcagtcagtttcttagttgaagcaacataaggagtatagatttgccctctgtccattttttctttgattaagtgtttgtcaatttctacgtgtttggttttatcatgatgcatgggattatgtgctatgtttatggcagttttgttgccacaatataccagcataggcacctaagtcttgaaattaatatctgtaagcactatcttaatccaaattaaatcacaaatcccttaggccatttccttgaattcaacctttgcactcagccaagccaccactaactacttcttactcctgcaagtgacaagactacctccaagtagagtacaataccctgtagttaaggatcttgactggtttacatcaatataggcctctaaacaaagatttccattattctagtacaaaattctcttacccaaagaagaattgagatatttgagaattctatacacaacttccaagtgagattttagtggagaatggatgaattggctcaccacactaaatgcatatgcaattcatatttggtgtgtgagagataaatgagtttccccaccattctctaaaagtttcctcagttaaatcctcatttatgtccctaatgttacgattggccttaattggtgtttctactgacttacaccctagtaatcctttttttttttagtaaatcactcacacatttttgttgggatataaaaataccctcttttgaacttgttaccttcctaggaagtatctaagacttcctagatctttaattttaaatttagttgccaaataagatttcagttttccaatctcaattaaatcatttccaataaccacattatcatctatgtatacaattaaggcaaatacctttccacgagtagaatgtttgataaataatgtgtgatcaccttgactttgtttggagccttttctcaccatggacatggtaatccttccaaactaggcacttgatgattgtttaagcccatatagagatcctttaacctgctcattttattaccctatcttcttggagaaaaaccaagggtaacatccatatttaagtgatgttggaattttgaataaattcattggaagagaaaagaattatgtaagaaaatgggcctttggaatcattttgatttaacatagaggagtcaaaggaaggttcaagttcaagatcccaccacctatcttccatatcatctttctccccttgaagatagatgtttccataaaagaattggttttccacaaaagttacatcccttgtaacatatataaatattttgtggttggatggtaatgtttgtaaccttcttgtgtggatgagtagccttaaaaaatgcaacgaactactcaagagtcaagtgtcgagtttctctctttaatggttatgaacatagacataggagacatttgactatctttggaggcaatttaccaaatccctaaaaattaggaaacaaaaagtggagtttttctatggggatttgaaattgagggtcctagtaggcatcctatttatcaagtaggtggctatcaaaatgacttctccccaatgtgtttttggtttatttcaaaaagtagagtacaggcaacttctaataaatgtttatttttccctttgttaaccccattttgttgggatgtgtcaacacatgatgagtggtgattataccctcattttgaagataatcaatcaatttttggttcaaatactccctcccattatctatattgagagtatggtttttaactccaaattggttctagataaaattatgaaaagatgcaaaaaaatagatgatatttcagattttgatttcataagatataccctagtagaatgagcataatcattataaatgtaacaaaccattgtgacccaaaaatattgatgagatgagatggaccatagaaatcagaatgtatcaaaaaaatgaggaaaattatttgaagcatttatttgaaaaggtatgcaacgatgtttcgcaagttcacaactttcacaatgcaaatccttgacatcaatattgcaaaggaaagagttttttttgaactaaaaaggaggaatgaactatgcatctaaggattgagaacatgtaagataggttgggaacatgtaagacaggtttcaaaactaaggattgagttatttggattgttcctttaacaacaatgggggaaaatgactgattactactcaaaaagtgttattttatagcttgtaattaactcttttaaacacttttgagtagtagttattaccttttgactcaattggcatgttaaggacccttgcaatagtttctaatcaaattgtgttaagttttggtgtttttgatagctttttgatcaccaaagcaatttaagatgggggagagctttatataatcaatggcaaagcaaatgaaagctcatttacatgaagaatccaagctttggagcttcgtagttctttgccaaagccaatcaaggatgcaaggaggaaaaacagaggagtctaacatgaagaattcaagaggacagcaactgttggacacatttcgagtacttcctagagtccatttcatgcatactatatgtcgtttcgaagctcgggaagtcagaagtccaacacttcaaacggtgcgcgaattggagttgaaacgaagaagttatggccatttgaagacaaccgcttcaagctgtgcgaaaatttcgcaactgcaaaattagctgcaaaatcaacctttcgttgcgaaaatttcgcaaggtgtttcgcagctgcaaaaccacctgcaagcgcacgtgtgccactttgcaagttgaaactccatcttcgcagctacgaaccatgttgcgaaatccacctgtgtaatctcagatatttgccaccgactaagttagattttttctcaagatattttgtgtaaatttctattttctccttgtaataagctaaagatattattgggatatttattagaaaatatcttctatatatatctttgaaccaatgtaaagaaaatatgatagatccaatatatgtaatccgacgagaggaggataaaagtaagaaatatatctacaaagcacttgctctgcttttcctttatatttttgttttctcgttatttttatttctagcaaatcaaactctgaggatgtttcctcagaggatgtgtggctaggttttttgtctcttggagtgaagaaagccaggtaagtttccacatgcaaaaattggaagttttgttgttttagcttttaatgaagagaaagtgtgactcgttaatggtttttatctttttagttaacttaaaacgccttgaaatcacctgggccaacacttggtaaggcaagtggtctctatccattgagatacactagtttatctcttgcgagcctttaagagatggtttaaaggtaggattttctagaatagccaacacttggtaagcttttggactctaaggagacatccattagttatctcttgcgagcttttgaagggtaatcccaggttaaggattaccttgaatggcaaatgttaggtgagaggcatgagtcattgcaagatgcatcagtgagagggaattagtgtttgaacccattaaggggaagcatctgtaccacaccggttcgggaaataactatatgttaaatccctaatgcgaggaaaagattcaagtgaccagaactccctttttgtataaggaacctaagcctagtgatctgaaattccaagaaacacttttctttgtaattaaaattagttactattttttgttagcttaaaaccaacattttcaaacatctttatgttttcttttaaagctaaccttgaaatgaaaaagtaccaattcatatttgaattaatatcaattgtgaagtgaaagcccatcccagtgaaggattctaaagtcactatgctatgctagttgaggctatcctagtacatggtgatataggttataaattttgttgattactcccgtctgaggaccaaactcaaggtacactagttgattaagcaccaatcaacaggacatacaccagctgggcatgaatcaatgacccatttgcaactttaattttttgttttttagaacaagtggtatatacaaaaaacaaattagagaaactggttatatgatcagaggcacctaaatcaatgatccaggtatgagaacaattcattttagaggcatttaaggcaaagatactacttgtttgggccaagaacaagaacccatggttatgttttgattctcaaactgcattacaaagtttcttgagtctatcaatgtcatttttgttaaataaggccttttgggattcctgaatgaaattcctttgatgagcctaccctgatttggccccagttttgtttccagttccttgctaagcaaatttggctttaggttgtggtcgtccatgaagtttctagcacatttccctaatatgttgaggcttgttgctatagtcacactaaagcttgtcattgtctccatgtttcctccatatggagttggttttggaaactgccaatatagaattctcaaaggttgaaatcaaattttctggtttcctaagcacaactcccttttgacctttttcttcttgaacataagcaaaagcctcacttatggatgtaagaggatccttgcccaaaattctagggtcattgacaacctatgtttacaagatcactaccatttaggatagagtacatacaaggagagacaaaaagtcatagagaatgagatttcctgagattaggaaaatttattaagatttttaggaatttcatatggtagaatttcagcatttcattggtatgcctcagaggatgtactctagaaaactacatcttctgtctaggcataattct

SEQ ID NO: 13302 - DNA, 7791 bp, Vitis vinifera
  Intron number 5 from transcript GSVIVT01027931001 (locus G SVIVG01027931001) derived from phytozome v7.0 (chr-ID chr5 ; pos 9642188 to 9649978)
cagacagtataccaagagctggctgcccagtcgtattagattatcttctttgtttattttgatggattgatctgtattcaaataattttgtgcatcattaaaaaaaattgaacttctcaagtttttttttcccaagtttcatctatgattacaacttggttggtgtgaaccaaagccaattggacttttgggtgcaagggtggagtgaggaatttaatctagaggcaacattctgttgttttaccaaaaaaaaaaaaaaaaaatgatttagtaaaaaatagaagacctagaattttgattcgtaatactttattacaactttagtccaagttgacttgagattctttgttgatttattgtctaaccacttaattttttgggcaaattggtagcttaacatggtattaaatgtgcattagcaattagtcacctcttatcccattacttatagctcctaatgctgggtggggagccttttgaccttgctcttcctctagttgaataaggaaaagtgcttcttatcctaaaatatttggtcttttgtttgttggctgaactctcttttcttgagattggaacattgactagttctctctctttgcttttgtgcatgcatgtgtttttggaatacttcaattgctgaactcttttagtaattatcatatccttgttgcgtatgccaagagttgttagattgaggcttgagaaaatccaaagggatttccttggggtgggggagcgttggagaagaggccccatcttgtaaagtgggctgttgtttgttctcataaaaagaagggcggtttggggattagaaatctttctattctcaatagggcccttttgtgcaaatggagttggcgctttgcggttgaaaaggagtccttttggaagcttattattagtaggaagtttggggaagaaggtggagggtggagttcctgtgaggttagggagggctatggggtggggttttggaaggaaattagaaaggaaggttctctgttgcttaaaaatgtttccttcgctatgggggatgtagaagggtgagattttggaaggacatttggcgcgggaatatccccctttgtgaggcttttccatctttgtttgccttagcggtctctcaagatgcatgggtagtggattgttgggattttgtggggggttggattccctgtttctctagatctcttaatgattgagaggtggaggcggtagagaggctcctttcaacccttcaaggaaagaggctagctgctggtttggaggatagagtgttgtggaaagcatcgaagaatgggatttttttttttttttttgtaaaatccctttacaatactcttgaatctagttgtgcaatcccgtttccgtgaagcatcatttggagcccttgtgtgcctacaaaggtgggttttttttgcttgggaagcttcttgggggaaggttctaacccaagatcaactcaagaggaggggttggattttagcaaacaggtgcttcttgtgttgtgctgaagaggagacgataaatcacatccttgttcactgccccaaggcgagggttttgtgggatcttgtgttctctttgtttggtgttaattgggttctcccgtttacgattagagacactctctcaggatggtccccttcctttgtagacaagaagcatggaaagactttgcgggctgctcctttctgtttattttggacagtttggaaggaaagaaacatgatagtttttgataatgaggttttgttgattcaaagaatgaaaaattcttttgtttgtaatctcttctcttaggctaagtcttgtttagatggaggaccccgttctttaattaactttgttgattggttgagttctagttgagggctggtgagtgtttgcctttttgttttttgtcttttggtatctcgtgtatactccctgtatgcttcaggttgccttttaagctccctttttctaataaagcttctgtgggtttatctatatatatataaaaaaaattatctcactccagggctcaggtcccctatggctattcccctaagtttgaggcaaggataaaaagtatcggttttgatggatatattggtaactcaattttatagatatatcaggatatattgggaaatattggtggatattttgacaaaatatcaatagagcaaaaattgatcaaaacttatgcaaatgttgggaaaaactctaaaataatgctataagaagtaataatggacattttaaagttgttttattgaagaaattcatatatatatatatatgtgtgtgtgtgtgtgtgtgtgtgtgtgtgatatagtttgtcatattcgacaatagtatcatgtgcgccgataagaaatacgaaatttgcaagtgtacattcattattaaactacattaaatattattaatatttgattataatatgtctaactgtaaaatatatttaatactaaaattatgatctatttaatttaattgcattcaatgatataaaataaatgatgatatatatatataatttttttttttaaatttatattttttatattaaattaatatataatgatataaaaaaagatgatctattaaaaaaatgattatggtagtttttgtatttttggtgatcaattaaatgaaatttaaaaataaaataattagaattaatttatttattaaaatattcttttttcatgatagactctaatatatataggttatgtgctctcatattgttgagggcaatttagccttatggtcgcctagggttcaatgtaaatattgggaatttctcaaaaaattagaaaaaaatcgatatatcctgaaatatagccaaacaaacaaaaaaaaaaatctaaaaagtgactgaaaaatcagtggatcaacattactccaccatttatcactttagtggcggcaaccaaaacccaaaattttgacgaaatatcgtcgatatttcgtgattttttaatccttggtttgaagtgtgcttatcctactgtaggatcttgggaaagctttggttccctagccatccactactgcttcgtcccccctattccatccctttcccctcacaggctttgcctttgtgttagggacttgcactttatttcaattagctaactatgaggtataataaatatattaataacttcaatcactcaactcctttcttaagaggttatggattcaaacctcaccgcttatttatttatgagtacaaattggattctagtgcttatttcctttatttattgggtatatgtgcaagtcagagaaagttggttacatgagaaaaggttgcatgtgagatgtggtgtgagggctttagtataggtcagctattgagcgcatgtgcaagcaaaagaaggctgcatgtgagataggcattggagttttagtccaaattggttattgagcttgcgtacaagcaagtgaggttgtctatgaggtagggtgttaaggctttaggtgtagtcataatgaaatatgttattaggtatctatggatcttgcattcaattgcattaattgattttaagaacaaagtaaattgactaataaattttgtggggaattaaaaaatataaccaagttgtcatgccccaaagttctaaatcatggttcaacctatacttaatgtccaacttatcattctaaactttagagtgtgattaagaagaaatattagtgtttatgttaattagactccaatctatcccacatattcttgtagacttcctaccacctagagggcatttaaagccacaattgaaaccttaatcacgtccattacacaaattatgactcaacttggagagagtaaaagatttgagacctcgtcctagtgaaaatagacttgtcttagcactaagaaaatttgtatatcgttatgaccttagtaaaaatttaaagaacaataattggtaagacatttcatgccccccctttttttttatgataagtaaagaagagtatatattatattaaaaagaggcgccaaaatagcaacccatgatatacaagataactacaaccaccctcacacagcttaaacaaaaaatagttgccaaaatgggggtacacaaaacatccccatcctcaacgagagcccaaccaatcaatgaaaccaattagccttgaaagatcatccttcacaaacatgttagtttccgaccaaagaaaacaaacaaaagatccttttggcccttggatggaaagcacattgtcttcaaaggcaattttattccttgccttccaaattgttcaagaaatgcagaaggggcttgctttccaaagtttcttatgctttttgcccacaaaagtcccatttcaacccaaaagtgttgccctaaccgaaaaaggaagcacccatgataccccaaaaagagtaaataacatctcccataaagcccttgtctttacacaatggagaaggatgtgatctatagattctttatgcatttggcaaagataacatctatttgctaaagactatccccttttctgaatttggtctaagattaaagcttttctccatgttgccttccaagcaaagaaactcactttgggttgcacctacaaattccaaatgattttcattggaaaagaaactgaaaagcctggctctaaggctttgtagagagatttaatagagaacttgccgctcttcgtctttgtccaaagcattttatccttctcatccctatgcactctcttcccatgcagacataacaagaaaatctctacttcatccacctcccaatcagtaaatggtttagagaagagaaggctccaactctcccccctcacccactaagaaattccggacatccttcacccaagtctccttgaagacggctaaagcaaataaagaagggaaggaatcacataaaggagcccccccactacatatccttccaaaatttatccatcacaaaggaaagtctactgttgacaatgtgtcaatccttcctaattgctttgcacaaccctacaccataccctttcctcgcttctcgagaacaccgccccccttgttactacccttacttccccttgatcacttaattccaaaaggcccctctctcattcacaaaacgccaactccatttgcaaataagtgccttattgagagtagaaggacacttaacccccaatccccttttcttttatctaagcaaatggtcacccaccttactagatgaggtttttgctctaaagccacacctgtccatagaaaatccctcttaatatgctctaaccttaatctgaccatccttggcatggagagtgtaaacatgaaataaatgggcaagttagacaaagtgcttcgtatcaaggtgattctccctcctttagaaatgtactgtttcttccacatagccaatctcttgcaaaacctcacttctactccatcccaagctgccacggacttaaaaggagcagccaatggcatccccatgtaagtggaagaaaggcttctgaccttacaaccaagctctgaagccagatcctctacataaataacagtgtatttcatacttctttttatataagagtatttaccctaagtattgaaaggtaggtttcttgagtatgatggagatatgtttcttttactttgaaaaacataatgagatgtacgatggagatatgtttcttgagtgggattcatcaaaattactgaagattaaataatttatattttttttgttacaaataattaaaaattcaccaactaaaataaagcttggtggtaaaggcttgcaatcctacatctcctgggcagtatcatcaaatccaatctattggtcaggtttccctggttaggtcatttaagagaggatggatgttttgacattgaaaattattcatcatacgcatctctctgaaaaggttctttgaagctgaggtgcaaggagtgatgttaatttcacaacttcagaaatttggagaccctcagcctggttttcttcatcttggcactaatgttggaaaacgtcctgatattgatgagttgatgtgtcataatgtatcttgaccaacaggggttgcatgtgtaaatcaaataaggagtcagaaaatcacctctgaatccactgtctagtagccttaaaaatctgggtgatgttcttttcactgtccatagtccttcagttgttccccaggataccaagaaaggtgctttctagttggcatggcaagttcatgtagtggaatagaaaagcaatggagagtggccctttttcctctgggttgatgcctatggaaagagtgcaatgagagaattttagagggaattataatttcaggacaaaaaaactataaaagaggttgtgttgcatttatcatctatttgaaccaaagagaaagtggaggataggaggcactattttatggacttcatttattgccggggttctttgccaaatttcatttttaatggggtcagacattctatctacttggataacttaagttacaaggtaaatagatctgagttgagctcaagttggttgcctcgagtagagttaagtttcaggaaaatgtttgattctttgaattatctttattgaccctctaggcttacctaacttgtcatagttgcatccctagtttcaatagaaaagacactatcaagattgacattcctctaagtcaagcctgtatgccattttcatttctggtattgatcttgcatgtctatgattttcttgtaaaggatttctggtccagtttgaaggttgagagaatggttcatcttgagggttggataaagtatgatgcaataagagattataggtttgttttttctttttttttttgagggatgtgttgtcttccttctttagggccttttgcataccccctctgttcatagggtgtgcccccttttgttaggtgctttttatatgaatttctgttttcctatataaaaaaaagtaaaaataaaaaaaggagtgtgatgtaataagaaggattttaagaaaaatatgcattttctttatgttgttgcctccatagttgcaagggtagtttttgtaattatctcttctttttgtaaatataaattgctaaaattagaggggcctctttcctgcattcttttttattcttcctttttcttctcttgttccctccttttctattctttgatttgttcttcctctatgcatattcacagttatttcatccttgataggaaacagaatgagattgttcagaaaaaaaaaaaatatttttttttgtccacagcattggtgcacagtggtttccttcatcttgtttcccatttttatttttttatccattctttctgaaatgacccttctcattagttggttaacagtaagaatcttttctcatatggtttcccataaaaatggctcaccttgagcagattattgaatccccacaacactgctgacagaaaaaggagaaaaagccctcacagaaagcaatgaatgaaaagatttaccaagtaacaacttgtactcaacactttgccctcctagccattcccccaattaggacggaatagagttaaagaagcaagccaagaaatatccctttttcagagctttccacatctacaaatcctccaatcagggcaaaatacagtaagagatgcaatccaagaaacattacactaactcaagctcccaggcatcaaataatcatgtatcgtgtgcattcaatttatgctcttcaacagaaaataccttgttgtgttctgatttaatccttcttttgtccagaatctacgacaaactttgg

SEQ ID NO: 13303 - DNA, 8247 bp, Vitis vinifera
  Intron number 3 from transcript GSVIVT01007715001 (locus G SVIVG01007715001) derived from phytozome v7.0 (chr-ID chr1 7; pos 9991040 to 9999286)
gtgcttccagaagctacgtttccggtctctctctcaaccactcatcttcatcacagttttttattttccattttctttttggtatttattttagtgattcttgtgcttgtgtgatttcttgcattaaatttttacctctgaagtaggtcttacatgatcgcatataaaaagcatgatctattggcgcacgttaaggtcaaaccagcgcacgttagcagggaaaaaactcacatgaagaatagttgttgctttcataggtcaagttctctgattggttctgaactaaacctgcaccttcaaaaaccatcgattcacctgttttcagatatggtattcacatacaaaccaagaacgccctggctttaaaatgaaagagaccctaatattgcaaaggacagtgtgattacttcagtaccagaagagaacaagtgggaatgttttatttatttataggaagaaatgtttgtggacttctatctcatcttcttgccgttgcttttgtttctacaaggaatagtaaacgttttataataatcaatactaaacctccaagtcatataacctggtacagcgtctctgcagtattagggtactgaagcttttctttactttctcagttcttggttgtttccagtcatattagcccttttatgtcaggaaaagtttgggactagagagaaaactcttatcacatttccagtgatttggacgtttcagagcttcagtcatggcacgaccaatagtatctttacaatgtgagcaccacagtgcggttttcaaaaacctgtgatttttttttttttttttttttctggtaggtttttccaaaataaaattggaatagaagctttttaaatgaatagatttgatgggggccactggatgctattagctcaagtgaaggttttatcacatatttcattctatggactctcatcttttaagctgctataaggaataaaaataaaaaaattgaaataaaagtctgctattcttgatcctgacttaataggatattacattcttgaaattgtcttctggcttgtaatctacatgataatatgttggttgttggtccctgagaagattatcattagaaaaatgaaaagccttgtttgatgggagtgttcttgctgcttcaaaagttaagttttgagaggtagcttagggattgtagcttcagttcttaaataggcttcatcaatattttgagcaagcaacagttgatggttaaatcctagttctagaatgtttgtagaaagtcatgggtcttgaaaggttcattatcaagttgagttttaccttggcgtaattctttgggaacttaagtttttaatattatgatcatatttccaatgcatgcattgcattttctaattcccagtgacagctgggaacttattttcttggatttgtttgggaatgttaacttaatacatatttattttcttttttatcattggatgttcctcttaaatgttcatttacatggttaagaacatactggattggttttcattttatatatattagtgatatgtaattgtggaattcatttgccttaagggatgtgcttttgtagtttaatgatcctttatgaaataacacaaaaaagagttgttcaatgtggcatggaaaattctgtagagaaattggtgtacgtggggattttaaattaataaacagatgaagttgtaggcttgactagtcactttgtatattttaatgcattaaatactttttcattttatggtgcaaactgcacaaagaaaaaaatattcatccttactactgctggttgctcttaaccaacttggtataagggattatattattttatggcaataattgcaatcctctgcaatgatgcatgtctggtttgggtggctgcaaaaaattctctagtttcaatagagtgcgagttattgtgcatgcagtgggtgggagagaaaaaatatactttgtgaaaggtcttagggctggattaattctgccagccaaacagggataaaggaaagtgtgaaaaatgttcctttgtccagaaaaagatattggaaattgttgcatacagtgaaaaacaaaaaataaaaaatgaactgaatgcaagtcccttttatccttcatcctcatcttcaaggacaatagattcctcaatagatttcataatgaacatgtgatattgtagcagaggcaagtaccaagaattaggtttccaagatattgtgtttgcttgtgctggtgtgctgatttctttctcgatgtccagtttggtccctttaattgctgttggtctactatatacttttaaggttgtgtgtacaataaaataagttgaatccttaggcttttgtacgaagtacagatggatttgttacaaaaattgttactttatcaataaattttatggtcaaggtctctggattacagatatagcatggccttgagctattttaagagtcactttgaaagaaagctgcttttctgtgtgctgtttctggttgcacgttgtggtctgtggaagttatgtaactggtatggaaaaaacagtctcagatgtgagaagataattataattaaaaacctggttagtgacgcattaaagtagaagtttgattactttaataaaagtacgtcaagcgaagacattaatcagtttagttgttgaaggccagctattatttttattgtcatatgattagagatgagtcttcagttttccctccaaaactaaacaacaaagataaaatacagaaagagcttttttgtgttccatctgttagtttttgtagggtcttgtcccttttaattaattaattagatgctttgaactctcattgtggcaatagggtactgtagatgcaccaccaaaaacaaaactttctttgggttggctactggaatatctacaattgtttagttggtgttttgtttaagtactttgttttttttttctttgattatctgcttgtccagattaatgttcagctgctatttgagaccgtttctttgttattgtgttacccctgtttgtttgctgaaggaggcatatgtaccacatattagtagctctgttgatcaccatttttattgctctggcacctgaatgtgaacatgaagtaatttgtttgattcaatgtgatagaatccatatattacggatgcatatcatcaccatgtgaggtgtgtaaatgtttaaacattttctgcaatatatttcacagaattgaggatggccttgatggtactatgaatataggctttgatagttttacatatttcatgttttttccatcaattgatatactttagatctgggtccatgagatgacatgttatggtatgttttcctactcttctgaagatatataagcctggataatgtttttgtgtctattccttttacacaatcatctcagcttggtatgtaatccaataatagaataaagtataatttgaatattttgtcccattattgggcttgcatttcattattgagtggttgctggggtgtaatttagttttaagtgaggtctgtcatatcagaagtagagatttccaaactagttggcatcttctatagagtgcttaagtccattgtaccaaatcttgtgcctggataaattgaagaatttaggacaacatggaccttgataactgagagtgcagcatttccatcagaaataacggtttttcaagctctctctgctgcctaagtttgaaacctcccccacgtgtatgcatgtgagagaggtaatgcattagaacaagaatgaattttacctgtcagcttgttagatccttatccactaaatggctttagcatccactacaggaggtgtatatttatgttcttatgtagttgtatctgctggccgcacaggtttctttgtcctgtttaccttaatttctttagatctgaatgcagtaagaacattagagtcattttctcagaatacgattttgtgctagaggaagcatacttctcaatcttaagttggagagtccatatgtatttatgtattaattgacatcataatattgagaattgctttaatttgtctgtcctggtaatgaactcactattttgtaaggtattttgacacagtggttgagtcttgttgcagttttttaaacatgggaatctgccttttttcttttccaaattttgacaaacatttgtgaagggtacaggattttctttgggctgttcgcttgcacctttttaaccttttttcccctctttttgattctgggatggagaagaaccttcttacacaggttttagatttaggacttgaacatgccaaaacactaatcagctgaacaggagcttgtaggccaatttttaatttcaagtctcacatttattatatctgttatttcctggattgttctttgtcaacttgcatgacctttcctattccatgccaatctccttgtcttacaatgaaacgctcgcctgagtgtgcatgcacatgaaaactctgtttaacgtcacaaactctatttaacttcaatctctatctactatatgtaatttttcatccttgtcatgattagctgtatacttttccatccaaggtttcttttccggttagtgtgagatctgaagtttcaaccaagatccaggaagaagaagaaaaaaaaaaaaaaaaaaaaaagaaacatatctttttgaaaattcctcacttgcatcatgcatgtatgtccttcttgcatgactgcccttttcactatgatttccagccaagtacttaaattactgaaaaaaaagaaagattccattgttgattttctgtgagtatttgccctgattttctttttcataaagatgtttttcattgaggtaggccctgagatttaacataatttcctattcttgctgtccaacttccctaggttgcaatgtaacttttatgacgaaatcaatgcaactcctgccttggattgggtggggtagttgtaaatattctgaggctgcattgaacagtatcttccatttgattccaaggtctcaattgatagactacatatatgatcagtatggatgactacatgtagagtacatatataatcagtatgaatgattacactgatagccctgtcgtcaaatttaatgatatctgcgctctatgcccttttaagctagctattaggttgacaaccatagtagtagcttggaccaaatagctgtgagtgttggagtcgcaaatggcaatttccgaccttcacctgctttgttcttgactaagcgcttgttcttgactaagcgcaggattagcagcaagctgtggcaccaattatttgagaagaaccttacaggatatagaatatcatacccaattttatgaaggagatgagaaacccactgaagattagacgcagcagtataatgagctttatatttagcctcagtacaacgctttttaattgaacaagaaatagagcaacacaaagaaaaactcaattacgcattatgtagttccttgtatgttcatggacatctagttgaatctgcatctgcccaacaagataaagggaacaaaattgaggaaagcacaagctacaatgtaggggcttttttagatcacgagaaaggcaccatggcttgtctatattgaatgtagtcactgagaaaagtgcctttgtagagtcaaaagtttcagcatataggaactagctagactataacaaagtttgcaatctagcatttctataggtgataggtagagagacaaaagggcgaagtaggttcagtttcatggaaataatgcattggaccaagagtctccatggcaacgtgaaagtagaggaagagtgatgatcacctatcacttggtagtcgaggaagtttgcctttaactgtagttattgtggaacctttttattttgtaactgctggcagttcccagttattatgatcactgattgaattgcaggcaatgtgtccactatcattcctttgtgcttcatttctagcttaagatatcctgtgcatgggcttctcatatttcatccatatcttcttccaattcttttactttgagaatccatttttagcttcttttaacccttgcaactgttaacagggcatcctggggacgtaataaacctagaaagggcattagggccaaaaccaattagagcggaaggaaaccacatggaccccccgcggttgccgctgagagccagcttttttaagcaccagacatagatgcccatttttccaccgcaaccgctataatatgatcggttctggaacgtttatttattgtgagcggtgcccattggagtctctctcctcaccctactccctaggcatgttcttttgttagtgactagacttatgtgagtggacttaaacccacatcacatgaaatgacctcacctgtgtgctgttccatctgtatggtacttttatcttgtggggaaaatgttaccaagggttgtaaatggatcctatggcacccaatcctttattttagtgtggaattttttccacgcaatgatgagaggattaaaaatttgtctatgttctactggatcgcattaaacggcaccgtttcatcctgccagccttggcaaaatcttttccattccccaacgttttgggtggagagacgtgcgaggtactgagctcactgttgagggtgttgcgtgaaaaagccacgagtcatcggaagttggagcggatgtgatgtggagcagagatgcgtgcgtgccttgcgggttacctgatcctcctctgccatattttgatgttgactcggcggtactcataacaaagccaacaccaccagtcgtccaccaccactgccactggatgggaaacgacataacgaacccttcagaatcttttttgcctctgggtaatattgggcctacacctcctgtcaatgggcgcttctactctgttcctcactctatatttattaattatatatttgctaagtgggtcacccattccaccccttttccttgatacatcacatccatccccatggattggcggacactgtttgttggtttggtctttgatcactgtttaccaaaaggttagtagggtttggtttggattttcctcttcctattggctaatagtcacccagtggattccattgtacaataaaattctgacacgaaatataagcttcagttgataatcatgattttttttttcttacttttgaatttatggatgaagtttgaaatgccaaaattcaagctttagaaattagaaatactttaattttatgtatttagatttttttttcatttatactggatttattcttcactttcaagttcagaattaattgtaaaaaaaaaaaattcacttcttggaccccatcttacacttaaagaattattaatattgtagattatgtaattcattattgttattttttagtaattcttatggaagtcttaagttttgtgttgggtccatgcctgagcaaacaccacaagattagaaaaattagcttacctatgtgccgacaaacttcaggagcacaaagtctattgcatgctagggtggagctgcctagcacatccaagcacttaggtgagactttggcaacacttgtagcaagctagcattcaatgttgatggtgctgatgcttgatctatattgtaggaacatcttatagcaagttaggctttagaaacacttattggcgctgaaatccattataaaatagtgcttattatttgggtttcagtattgaaagaaaggctctcatttactgttttcattctagaaatcttagcatggagttgcctaagatatttaaatgggataaccatagttatctgtgtcaagtttttcttattgttggaatacaattggagtgggtggtaggtttgattggcgaattgaggttatgcaatgcttactttttttgatcccttatacctgtcaaatggagtgagtaaacctgttctggtttttgttgatatttgtcacacaaagtggttttgacaattaaccttatggcatatgatatgtacggcatcttaacaatgtctgatatattgcctgtatgtagaccagcatacgccaaatctgttacttgttggacccttgatgatatgcatacatgattttgtttgatgtttagatgtgtttattgtattgaatctggaagagttgaaatcaaattcttagggatcaagttctttgcatgcttatttccactgtcttgccagacgaagcagctgggtcatcagaggaggacttaagt

SEQ ID NO: 13304 - DNA, 2692 bp, Vitis vinifera
  Intron number 8 from transcript GSVIVT01017573001 (locus G SVIVG01017573001) derived from phytozome v7.0 (chr-ID chr9 ; pos 10809187 to 10811878 reverse strand)
atttttgggacaaggatagtaaacagagacttaaggtgcctcccaaatactttcagtttttgaatatttttcccgttctgttatttctgtgttttagttgtcacttcatacatgaactatcgttcctggtttcatcatatattagtttgggttttctctttttgttttagaggatgtgttttctcataattgtcatatgtctatgttttgttcaaacttctcacaaatataggatacattttttcaatttgtttgttacatttgagagcatgagaatctttggagtatttgtaggaatccattttattttactagtcattcaaaagctaaatactcctaaaagaatgggctattaccaaacaaagtgagaattcatccttagggttagtggaaatgacaaatacgatatggtatgtgacatttcttgaaagactctaatcgtctatggacctatacactctttctttttggttgcaaacaaatataggaaaaaacgttgatcattagcttttcattatttcagacctgaaaaagtagtacattcaagtcaactgaacccattgcttctatttggttttgttgtggtaggttctacactatttagaaaatcagaacataaagttatgtttggttcccggaaaatttgagtgaaaatacaaggaaaagaaaataaagagaaaaaatagaaggaaaaaaatgtgaaggaaaataaaaaatagatttaaagttcaattatttttatatgctaattcaaattcattttacttattttaactctttgatagaaagattaaataattttaaaatatataagtttctaactagcattaattatgttttatttatatatatatatatattttcataatacaaccaaacacgagaaaatcattttctttaactttttttttttttttcttttcttagtactttccaagagccaaacataacctaaaagtataagaggcaggcttttgtgtatttctctccctcagttttctcagcaaacaaaccagagtcatgtaaaagtcaccttaaaaaggttggaaagttgttgtgaactcacagcaaagatgaaatatggtgttagtaaatggaacatcatagttatgtgagcatgtatccaaatcctaatcagttgatcttaccaacaatcttccagtagatgttgttgaattttgattgatgaattattctattgagattatgatcatattaaggtctgatattattcccttccttaattaagatctttatcaaatttatataaaccatctaagttcattctatcaagttcatattgatcaaagatcttttttcatttttcttattttccaacttcatactgagctttaggcctatgtgtccttcaaccttccgttgactgacaacatgctgctctcagacatctgcattgcttattttatttatcttgttaatttttatctttgcatttctgtttttggttgtcacctgcatggcacctacattgttttctccattaatctcactattttatgtctggatttatttctgttttggctgttgtcaatcacagtgatgttgacagccacaggttccaaaatgttggaagtgatttttctttgttctctcttttcattttctttgcctgattaaggatccatttggatggaaactaccagggaaaagtggaaaaataagaaggaatcttaaaatctcttgattgatttgtcatggacaataccaagaaaaataaatttaatgagaattattaaaaaaattatacatttttaaattctttattttctagataaaataggaatgacattcaactagcattaggaaaaaattgttgaatgtaaatatatttttttattttcctttattttgtttccttccatttttcttcttgcttggtgctggatccatcattgatttgtttttccccttgtgcccataggggaaaaaaatagcatctccaaagatgatgatcaagttagcaaatccatgctttatcttctctttgctgtttgaaagaaatagagaagctcttatttctagtgctttcttagggaaagatcaaaagaaaatgtgagttgagctgtttggttgttcctgttggagaaaaaatgagagaccggagagacagaaatgaaaggacgtaaaatgatataatttggtgtttgaaaggaaggaataatttgggagtttgtgggcccaccaaaactcccccaaatagggaacataaaaaggaccataactatgggcctactggcagtggatgaggataggattagtccattcctcccttttcatacgcataagatgccaattgactagaggcctagccatgcctgataaactgatttatcaaaataatctaatcttctattaaaccagtccttaacaatcccaaactgaagaggtcctaaaagggggttgcaatggcagaccaaataggtgattggcaatcttctcactctgcaaacaagcaatgaaaccaaagaattcatatggaccagattttctattaggctgagcttgcttttcattgtttttggttctttagctgttctttacgtgaggctttcctaacctatattaaaatgctgtatatgtgtttgtccttttgtgttatattgatttgacatattacagtggtgtttctaggtaatgtatattcaagttatttaactttggttttcaggcg

SEQ ID NO: 13305 - DNA, 5033 bp, Vitis vinifera
  Intron number 4 from transcript GSVIVT01018681001 (locus G SVIVG01018681001) derived from phytozome v7.0 (chr-ID chr1 6; pos 11211471 to 11216503 reverse strand)
aagaagaagcttaagtaagtttaaattccacaaacatgctttgcttatgtttccatgttattctaattaatgagatgagtacaagttctcatgaagactaacaaaacaattaatgagatgcttttttttaagtaaaatatttttggcaatagggttatgggtatattgttaagctatttaggctcaaaccttaaaaacttagtctcatgggtagccttctttatgctgatacatgaactaaataaatgggagaagtaaacaatatagatgtttgaacttgtgaaccatgttttaaaaggctattgagtcttataccttgaggttatagcctcaattaaggtaattaaggcttaagcctcaccttgccgaggtttattgctttgaggctatagcctcaaggttcatgaggcctaagcctcaaatatcccaagggtttttcagcctttatggacttttggggtatatattttataagaggctcaagtctcaatatttaatgagttttaatgggttctatcatctgtgcttttgtggacttctgacatagaattcatgaattttgtattggtccctacttggttaaaccttttataaaattagggtttacttgactttcaattaatttttaaaatgaataggaaaaagagaggctggaggatcctagtgatagtaacaataatgttaaaaattatttggtagaaccatgagagagagctaaaatatatgagagaaaaaggaactgaattagaactattaacaatgaaaaataaactattagagagagctaattttatgagaaaaaagaactaaattagaactattaacaatgaaaaaataattaattttattattatgaagtttatatcttttttatttttcaattttattgtgattttatgagtttgctttttttcatttttttaattttttgataattttatattatttaggtgttcaagttgaggcttatgccttccctcatttaggcaaaacgcctcaagaccgcctttagccttttaaaacattgctcatgaactttggtgagctaaagctctaatactatgttaagctatcaaatgacttaaaagcttaagatattagataatgagccaacaatgttatatttagttgattgggctaaagttaaccatgtatgttacattcgttgggctaaaaagccctaacaatttatctttgtaatttagacttaaaagcttggatttgtatttacattatgattcttttttatcatgattaataatagcaaaagttcattgcttgcatgtgtgcttgggaggtttgaggatgtgttaagatcaagttggtcagtattttggaattcaagtattggagatttagaaacaaacaaactaaagtaatggatattgaggtttaactaagttgtgttgctagtattaaggttcctaattagctttttgtttttcctttaatttttgaattttacattcttatagaagtatttgcataggaaaagaaatttaacttgaaaatgaggacttggtgacaagtctataaccacaattcttaccatctaatcttggattaggtttggaattacaccagttaaataggagatgttgaacctttaagtacaacatgcagtatctaattgggacaacactttttgtggattatgatgtacaaaaggcatgtttatatttctaatttataaaactgagcaattgattgtaatttagtaatttttttaatatatatatattttttattattattattttttattttttatttttatttttattttttacttttgatagaagagaaagtactttatgaattaaaacttcaatatatgtttaccttatttttggaccaccggaggctagctcgcctaatttaatatttttacaatattcttatgtaataacatttattctatttgtttttaaatttttttaaggaaaaatatcagattgtaattatatgatttactatttgacttttctagaaagatctatgcataaatttattttttgttttttattatcttaaaatgttatcttattcattatttaaattttgatctaaatatacaaaaagaagttctaaaaaacattgtaagtaggttcaccctaacttattcttacccaaaccaaattttgatccatagattaattaaattgaccacccatttctaacctgaccaccccaagccttattagagctttaaccatgtttggaaaaatgaagttaggttgagcttggattggattggacttaaattacattttttttaattcagatgaggcttgggttggctactaacccgacccaacccaaccctcttgagttgccgtcataaactagatttgatgtaggtcatgaaaggagggttaggttttggcatgacttaagttgtgatgattctactttgagtgccgtgtctcttgcttttactccattgcctattataaggatgcttgggtagcgaaaatataggaggtgggaagtgttggacattggaattgttgttttctcaacaattttcaggattgggaattaggaatgatggagataccccttaaggcagattcaaggcataagaaggtttggagagggactccattgtgcattttttgaatagtatggagaaaaaatgaccgaaggtcttttgatgatgaggagcaatcagatcgtactctgaaaagttcttttctgggtaatctttttatgtagttgaaattgttcataagatggaggttctatgtttttgatcgactttggagattggttaggctcttgttaagggagggaagttgttttttgtgtcctctcttttttggatgtgtcttttggcatgccattgtataaatcttgtgtgccttagaacatcattttttttgcacttttctttttgtatagttttatcatttgcctataaaaaaaaggcacattaatttgaagagattgcgaggacagattggtttgctgattgggtgttgtctgtgcaagagcagtttagagttggccaatcatatcttgcttcattttggagtagctcatagcctatgacacctattattcttgctttaaatgtgtcatgaatgctgccttgaatggtgaaagaggtgttgtaaggttggcatggggaatttgttgggtaaaattgaaggaaagcttgaaggttagcttgatggtgcttgttcttgattatttggaaggagagaaactgaagtgccttccaaggcttggggtggtcaattcaaccattaaaggattattttattcagacactctttctttggttaaggattttaagtaggactggttgctcatctgtgctagaagttgtggattaggtgggatagcactagtatgttcactttatctggttcttgcccattggtgccattgtatacctcatggacttggggtctgcccctttttgattgatgttttttttaactaaatgttcttttgcctttggtggttcatgcttagattgatggttaggcaatgaaagcatgtggtcgttcatcctgtcagagatggagccattaattgtgttctcagtataactacatcaagaattctgtaatatcgaacattaaatcaaacttaaacttgtacacctcctgtaatggcagagaaggtggagatacctctatttgatttgtataagaagtgacaatggcagttatctttgtaatggcagtaataaggcatgctgatatagttctattgcaaagaaaaattcacttgtgggtccaccaaatgccaaatgaaaagagtgttgccacaaatcgaaggggaataagttctgtaagtgaagagattcctctgcctactctgctactatgtagaaaagtcaatggactcaattttgttgataaggctaaggtgttgggggttttaataatctaccaaacacatttttcatagaggattaatcaaattaaaagaaatattatttcttttgcaccttttgaaacttctatgaagttgcttctgatctctctgagttatatggttgagagttcttttgataggtaaaaatatatatttttttctacttttttttcgtcatcactgggactggaatctggaaccttccacaacttgacccaccccttactactaaagctaggcgtcaagggtttctatggctaaaggcttatgtcatgtatgaggaccaagtacttaaaagtttgactgaagatgtggataccatggactttgtttgactttgatagagctccataaaattcccttccatctcccacagtcaaaaccattaaaagcttatgtggatctcatttcatggcttttgcttcttttgtaacttgcatagaatccagtgaattatactttcatttcactctctgtaagatttgatttgatcaagttgaaaaatgttagctgccttttaacaaatcggtcttcttctttgagcttcccaaacaatccttgaaatcttattagtaatatagtcgtgtcttggaggcatcatctgttgtttttcctggatttatccatagaggtccataaggccttaagaggagtgttcttgtccatgccatggtcccgattatgtgcttaaagattttactgtcttcttcaattgactattttatttttgtttttgcttttgataagggcaaagaattgtattgtcaatagaatttcccttaataatgtttatatatggaacatcatgttctcaacttgaataagagacaattgccatagttataaatttgtataatttagctaatataaaattgtgatggggctatgctgacgataatttggtgcatctaatgtcatttaactagagccttattggttctttttctatgttgctaccttttctgaattgatgctttgcaaattcctttggtgatgatactccagtttattttcatgctggtccatgatttgtttgtcttgagttgacattttttcataaaagctaaaaaagcattgatgtcaatatctatgcgctattctttgcagtgttctgagtgtccatctgacaagttcaaaatctc

SEQ ID NO: 13306 - DNA, 5570 bp, Vitis vinifera
  Intron number 1 from transcript GSVIVT01009036001 (locus G SVIVG01009036001) derived from phytozome v7.0 (chr-ID chr1 8; pos 4445592 to 4451161)
gtccttaaatttacccaaaagaataaacagtgtgtgtagatgaagagagtatgcttctggttgtgaatagatgagatttgatgattcatagttcacctatgaaaagaacatgtgtggtatgggatgaaaatcttacattcagctaagtcctatgagaaaacggataaaaataatttattaaatttaaatctttttttaattctattttctttcttctttttttttccctgacaatttcctttaaaattttcaaaaaccaaacattttggtcttgtgccaactggatataggtccatctagcttcactagagtgagacggacttcttccctgcacaaaaggatgtccaaacaggtggtccgagtacgtcccttcgaagcttaagtcagaatctaacaagagtaaatccaattattttgaatatcaatgcgcacattccttttttcatgcttttcgagaggtttttatatgacatatgacatcatcgtcacagcattgattatgcattcatacctttctttgtgctaatgatcaacgttgtgacggattttaagccttaataaagtggtcaactccatcatcttaacgtggattaggcaatcataccaaacaagagttgctaattagtgtcatttgttggttgttgtgtaagaattttgaaccatatcgttaattgtgtatttacgtttgtcaatgttgttgattgcctataacgacttattgacattgatttttaggtgtaaatgttgtttaaattgtcacccaggcattgggtgtgatttatcatctatcaaatgcctagaattctcaattgggtcggtttgtttacttggaaatcttagtcgacttgatttgttcatttcgtctagcatttgggaagaaagaaatccacatttcttattacacaagacgaagctttatcttggtccaaacaaattatctgtttaccttggacgatcaaacagtcttgaactttgaaatgacatatggaataaagattcccacaaaacatagtcttagaatttaggtcattattaaagtgtcaaaaaatgtttttttttttatctcattaaattataaataatcacatgattgagagaataatatttgcttatattttatatataaatctcaattatttttttactttgatttcaattttttatacttttaactaagttttttttatctttattcaataaacaagataagcaagatttttagttggattccgtattcaatacaaaaagaagactaccacgtcaccaattccagtggcagaaattgagtaccttaattccaactccaaccgaaaacccacgtgtggcaatatacggtatacccagtagaacatcgaaggtagacggtaattatagtcaataaaagcaaaaccctagccgctcgaccatacacatgaaatttagggtttagggctcacttgttcggtgcatatatatatatatacatgatgaaccagcgagcagccaacattttatcatcgcagagtttggcttcttttattttggtttgtcatatggtggtaggattatgatacttgtcttgtgatacttgcctctcctttcggcttcaagggcttagagatctgatgatcgatttcttgatggctttgttctagaggcatatatttatttccattcaaagtttttgttttccagagtttgccttctttggttctctggatgcgctttgtttggtacatttcgtttcttaatatcttgacccagttcattttcatttttgttttaataattttatatgctccactgggctgtgcttagagggctgaaagcctgaaacataccggggaagcttttgaatcttagatccctttttgaatcttggatcttagatctcttttctgggcattggtggtgactctgtgttccgatgcctgttttgataccaccattggtttgcataaatttgatttcaaaatttcttttgctaatactaaccaatggtgttctcaggacatgccttatgttcacaacagaatcgcatgctaagcttcatttgggaggttttgatcaggatgattattttttaaccattccaattggacactctcttccaaagtcggtagagagtaatgtaatttgacccatatgttagttccatcccactccttgaatcaatcaaaaccaatggaccaatataatccaaactcccataatggaagagttacctaaataccatttgtctccgatgttattgtactgctatttgccttatctgactatcttattgggtggacttagggttaacaagcatatctttatgaatcttatgatcttccttttaagaaaacagatctcatggtcagcaacatgaaatgtttttagttgctaacatagtatgatgttatgtcatgaattgtaacttctcatttttgggaatcaaactaggagggaaaaaaattgtataaaaagggttatatgctcttactaattttgctgaacaaatgtggaggaaaatagttggaatataagttatataaaatatatttggttcttggaacgctttgctgttaatattaaaactttgtttggtttctggaaaatctaagataaaacaggggaataggataagataagaagacatggagaaaaattaatatcaactagaattcatttaatttattttaactcttttacagtttgaaaaggtctgcttttaattgtattatatattttactatttttttagtaaaacaaaatgcagagaatcatttttttagtatatttattccttttatggtattttcctagaactaaacatatcataaaggtatggatctgcctactggtgattcagtgtttctaacaattaggttgttgcaattggttaagcaattttggaaaatcagatatttgtaactctgcaacaatttcaaaggcttaagtttcttgctttgccatgggaggaaaatgagagaatagtagtatggaagtatgggtagaaggttggtaggttgtctatggcctgatccattcttcttgaatgctgattagagatcaaagccccaggcagaggaacaaagagcgatgcagcttgcagtcaaggaggaagatcgacaacccaaatgaaagagcatatcacaaagacaggtgcactgcaattaccccccaattgagtagattgaatatctattagaagtatgaacaattgcaatgcggtcaattgaagtgctttttaggtctttttgttgtatcagctccactacaatgccatgaagatgctgtgcttgattgaaactttataaacaaaatattagatatattgaaggatctgcatagtgacaatccaactcacttcctttaaagacatcataatctatttcaccttagacatttgttatctatatggatggtataagcgctcaagcaagaattatttgcatgaaatccgaactaaacaatcggtgatatactagataagatggagtgtgaataagtaaacaacatcaaagattcttcatgcaaacggaagtttgaaatattttaaatacattcaaaatatttttaatatcaaattctagttgatttcaattaattttaagatcaaattaaacttaaggtgtaatgtaaactcaaattaattgggttttgggttcgaaataaacacaaattataattggattgaggattaaaaaaaggttactaagttggatcaaaactaatccataaaaactaaaccaaattaaccttaaaagacttggtttgattcaattttttattctaaatatagttgttttggtttctatcacgtataaacagactatatcggctcagtccatggcatcctcctctttttggattcaagagcagtcttctaggcactaggaagtagccgaatcttctccttctgatctttcatctccctgggactctcagccctctaactaactagtctaatgttcacaacatattcctatgaagagtaataccattaccgagaaactgggggtagcatccccattttatatattgtattgtacatgcaaattcccacaaaaaaaaaaaaaaaaattcactatcacttacatctactagagaaagcgacaacaaaatcgaagagtctgttcatgcaccaattatttccctaccaaaggatttggatgacttattttttagttgtaatcttgattgcagctgtggaattcgttttagtatattaaataggtcgatcagatcatctgttctatcgtattttccttaatgttacttcgcatcgacagattacatagtatccttcagcactttcgagcaattcttgttcgccaaagaaagtatcatattcgtctaacccatgcctattggactactaaaggcatggtgaataggttgtatctttgattttttaaaataaaaatatacaaaattgggcactcgcccaatcgatcacttcttcttgtcctcgtggtaggccactgctgcctaccacctaatatgcccaatgcccactgcctacgcgccactgctcactctaatgcgtaataagtaggcagatgcttaggtgcagctcaaaggggtgcacaccccgcgttaattgcaccttttaaataaacatttattactgctattgaaggagggagaagaaacgtaaatgtaaaacacattgccctacatgtccacatgggccaaggcttatttgaaatacaattcaatgcgatgaaatcatgaaaccaccggtccaccaccgacttcatttcatatgctttccattccccatgtttccaaatccatcttatctaatccacctaaccaaatcacataacacccaaaatgattaaagagggtagatgaatcaatcaagtagaacgtggcatatttccatcactgaccccattggatgagctggctgggtcattctccaatttttattagttgaataaagggcagctccaagatttggtactggcagactggcagactggcagtggacatctaagtcgatttattcaagttattggtcccggaatgcttcctattgtcttggatggaaatgagtgcttattatcaaggcacatgagtttgtatttgtattaaagttgttcattctctctacctagaagtataccttcaagtatgattcgtgcatatgaaagagatgtttttgtaattaaggagaacgaaagaggctaatacggtgggaggtttgccctgaagtgatccagcctcataaaatctcttatcttcaatgccacaacagatgaacatgtgcttccacctaattggtggatggccatcctgctcaaccataagtccatattccatatcggtattaatacgtgtggctattgttttttccaattcttgaacggcgtcaaaattaaatagacagagtaaacaaaaaattttggtttaaaaaaaaagtttgtgatttttgactgggaaaaagatgcccaaaaaaaacacagaatctatatcgagaggttatgaacacgtgatccgaatgttatggtcgtggcgtcggctttgacgtttcctttctggcttctagagttttttagtctctgctttcctacgctgtctgcaacctaagtattaca

SEQ ID NO: 13307 - DNA, 5528 bp, Vitis vinifera
  Intron number 4 from transcript GSVIVT01016291001 (locus G SVIVG01016291001) derived from phytozome v7.0 (chr-ID chr1 3; pos 5483235 to 5488762)
atatccctattttgggtgtttgtcttggacaccaggtacttcacgtatgtttgaaagctgttgatgaactttgtatttctcatccaattcatagctcccacatgcaaacatacgtagacacaggcatagacacattttcatgtatctattcagatgtcttttgtagatccggtctagcatgctctggtatgtttgccttaagttatagctgttgatctacgatctatcctttttctttatttttcacttttttttatttttttatttttatttttccatacctgtatatgaaattcatgaagctaacctcatagatatgagatccagaagtataacatttgggctgtaagagagacaatgaagaaaggaactcagccttatgacctgctcaatcagctattaaaactgggcttatctctaattacataaattattcaacaaacaaaacagcttggaaacgtcccaatggaatattactagtagtaagacgtaaacaacagcaacaataataataatgtcttattggtccttggcatgaagtaagatttgagagctaaacgtctagtgttgataaagaaacttcctaaatcatcctcaatggcccttctcctgcacactgaggctcattgaaaagccctcctttcaaaaccctcacaagttccacctttgcattcagacctaagccccaatcctgaaaaggaaaacttgccctttgagctaaaagggccttcttggtaaatgagaaactcaatttagtagtctagaggggagccttgggaatattggatttatcttgagtaaaaatcatgctttagatctcttgccttgctcttttcaccatgatgaagaggcaaaaagccattcttaataagttctttcaattttgataaaatgttctcaatttttgcattacatataaaatataaaaattagaacttttgctatatgaatatttgattgaagtttgtgattagaatgtattttattaataatttacatgacatattattgtgatgattattaatgtcagagagcatgatatacattgtaagtccaaatcttacaagcttaaacttttatgaaaattaatagtttaacatggtatcaaagtctcatatgatgatgatgactaatgttggggagcatgatatacattataagtccaaatcttataagcttaagtttttatgaaaattggtagtccaacatggtcttagagcctcgtttaacaggaggtcatgtgtttgaacttcaccacatttctttccccaatttattgaggccatgtgtaggcctaaaagaggttgtttgtaatttgtttgtcgacaagcctgtttgaagaacataatacccattctagacccaaatcttacaaatctaagcttttaggaaaatcagtagtccaacaattaatttgatataatagattgatatattaaaggaattgaagtaattagcaaccaaataaataaaaaacctaaatctagttactaaattttttaaaaatattagatttctaaccgaaggaagaagcaaaagattatttatctattaagctcattacaaggattggttacttaaaagtttttgaaggaaaaaatgcaatctaaaaattatactcttggaaatcattattttgttctgaaataggcctatcaaaacctgattaattaatagatgaactggttttaagaagaattcagacttaagtggtagcctactatggttattaaatgtgccacacaagtgggactcagtgaacttacttattttcccactttttagtgctgattattgtgtatgaaacccatccctctaagtcttactttgaaaactcctttttaagaaaaaaaaggggttcaaaatcatgtaagtgtgtaaacctaaggaggaaggtgatttgagtttaggagtatttttgagaggaacactagccttgaagtgaaaaggggttaaaaatctcttaagtgtgtaaacctaaggtggaaggtggttcgagtttcaagagtatttctgtaaggaaccttaatagggaagtggctttgaaggttttctaaagaaagaactgctctttggcattgtcagattgagtacctatgggacacgcccaatagttaggatgccaacattctagctaggttgttgcatcgttgttcttggaaagccattgctcaggttttctaggaattttccaatcataccttgttaaagtggaaaatggggcaaaaaatttgtttttgaaaagacttgcgatgggaagatcaacctcttctcaatttcgaaatctgtttagagttgtcacaattagaaatgcttctacttcatctattcttggttttcttcctctttttcttggaactttcattttcatggaaacctcactggtcttgaaatagaggatcttgaaagactcatatcatctcttgctagtgcgatctttacatcataatttccaaacatgagaatttgatctatattgctttaggcttgttcaaagtgaaatatttcttcttagccccatccaagcaatcaaatccagtattttttatttttttattttttataattctccaacaaaaatcatatggaaatctaaagcccgtcaaaatttaaagcttttgcctagttagtggtcaataagaaggttaatagcaatgatttgctctatgtgagaagacctttcaaagcccttggcccagattgttgcaccatgtgcatgggtagtggaaaatctattgatcatttcttttatattgtttgatgactttgtggtaatgacatagactattcagattaaccaagctagggtgagtttcccttagaagtataagtaatgagatgcctatttcttttagagggttggggggctttattagagacaaagttctatgacaaagtgcttgtctcacgctaatttggatagtgtgataggaaagaaatgcaagatttttgagaataagtagaggatgtcaaaggctatatgagacctaatttatttctattcccctttttgggcttcccctactaaagctttcaagggcactctcctcaatgttattcaacttgattgggcaatgttatctagtccaaaaggttaaaataacaaagggacggacattgcttagggtccattgtgttagggtatggattaactcttgagtggtaattaaatgatatatggttcctgtatgttggcgaaggtttctcctcttcttttgatcaacgtttgtacattttgggaaggagtcgtgatccttcaattgtacttttaattcatataaataaacatttgttattgataaaaaaaaaaaaggaaaacaagaaaaggggtctaaaagtattagattttgaagtgtaagctctaagtaagaaatatatctgaaaatattagtttttattttgaataaagtttccacaaaatcataaaattaattccttaagcaacttctaggaatagtgtgtttcaaaactatcttattccacaaaatcttttaatttaaaatagaaatgttgaaagtcaaaattttccacaaaataaaaaattttaaatgttgtcaccctaacaaaatgaaaaaagaaaaaatattacagcctatttgggaaccatttttaaaaacaattttctattcttaagaataaaaaattgttttttaggctcaaaaacacatttgtttattttttgacaaaaaacaggttttttaaagaatttgttatgattcttatgaaaatagtgttttttgagaatatattttaattgttttcactttttttttgcatgttgttttaaaattgttttcacttattttctggaggctgttttaaagaacgattatataaatatgaagaatgattgaaaatgaagaaatatggataaaaattatttttaagaaatatttggaaacacataaatcaagttgaaacattttaagttcccaaacatactttgctctatcaaacatcaaataactgtctttgaaaactgttctcaaaaactattttctgaaaattgtttttgataacgttcccaaacaagccataagttttcataaaatagtaactttttgaatcttcttgagaaaccaatttaagaattattattattgtttttttgaaaataatttgcaactcatttatttaaattgacttccctaaaaagcaatttggaaactaaacattttcacattgattattttttgattgtgtggaaattgaccaatcttgaactcttttatatttatttatttatttttgataagcaaataatgcctgtatattaaaaagtgccaaaaggacggtaatatatacaagaaccacttaacaaaatcaaataaagatagaacctatatccatgtacatctctgcccatgaagacaaatatctaagaaaggtgttttttaaagcttgatctaaatctcttcattatcaaatcacctccaattccttatttccatatagtctagaagatgcacaatggagctcctcttcaaaccttcttacgtcttttactcataaaggaatcatgccaccccaagagtctctttaatggtagcaacttgcacccattgaataccacataatgcaaaaagcaattgctaaagaacccttaccttaggacaaaggagaaggatgtgatctacggattcttttttaacttcacaaataaaatatctattgaccaacagccaccctctcttttgaagttggtctagcgttaagacctttccctacctagcctcccaaatgaaaaaacgaactttagaaggcacctaagaattccaaataatgtttgttagaaaggaaatcgattcccttggatccaaggtgacgtaaagagacataattgagaactttttgtttttcttaagttcatccacaccaccttgtcttccccctcactatctattgccacttcatgtcgccttgaaaataaatctgtctaattctcaatcatttaaaggtttagagaaacaagggttctaaatactcctctctctggtatgatcccataaatccgcaacgtaggctcttttgaaatggcaaaggcatataataaagaagggaagaaaacatacaacagttcattcccataccacttatccttccaaaacttcaccctccttctattacctaccatgaatgaagatctactataaaagttgtttcaatccttcctgatgaattttcaaagcctgaccccataaccatctctcatttcatgggattgccatcctccctcctccaccccacatttttcattgatggccagactccagttcacttagggattcataagagcagttcacttttattatagttatttcaactcacatattattattttttgaattctcacatatatgttttgttgcttatcaaattagcttttgctatttttaaaagagagcatgaggctaatctttccattgtatgtttatgtcaagtgctaatgtttctgctgacttctttcttttgcattcttgtaaaaaagagttgagctgaattatttgtgatttgacaggctttgggat

SEQ ID NO: 13308 - DNA, 1630 bp, Vitis vinifera
  Intron number 14 from transcript GSVIVT01019707001 (locus GSVIVG01019707001) derived from phytozome v7.0 (chr-ID chr 2; pos 2603951 to 2605580 reverse strand)
cccaacaatcagttttgaggctctccaggtaatatcatgacagagctagaaatctttgataggtgtagatttcattttgaagaattatgataataattgatgtgtgtggatttgatttcaaaaaattatgattgaaagtgaagctagtggtgtatacatggtctttctttctttctctcgggttttttttttccctctcttttccctgatgtataagaagcatagaatataaattaaataacatcaaagggatgcactgaatacatctgctgtaagctgtaatttcttttaatcacttaaaagttttccctgatgctgaataaatgcgataaggcttatttgttctggttatttatgctcctttttcgagatgccatttttttctttacctttgggatgaattccaagtgaggcaatttcaaatggccttttgtgagcttattatttatctttaaactttatttatttgctttatttttaatttttgcttgaatttctttacttttcttttgataaaaccatgattgtttttaaagctgtcttcatgtttctctcttttggttattattaatttttttgatcagaaacaaagattgtatatcgataaatagatcaaggggatgatgagagatcttccccacaaaatacaagatctgatcaaaatatgactcaaaactcctccactataacacctatacaaaaattaatccaattatgactataattctcttgctgcttgtatttatatttctttatgttttttctttcttttaaatccagcttttctcaaaccttttgcttgtttcttctctctgcgtatgtctgcatgtgttgtgttgaataaactaaacttgtttgtagcttttccttcttttctttgaatttttaattgatgaatcttcaagtggcatttcaagctttagcattgatctttgtgattcttccttttattgtttccatcaatgcaaacacaattacctaatttaagatgataagaaattccatttgatcttccatttgcctcttttgctttttattttttatttttgaaactattttcatttgtatacctttttttttttttttttttaaattttcctttactttcttggatgaagttcttaagatgcaaacccttttttgaagttgtctttcatttcttttgcttcttgtactcagctttctaactccttgtttatttatccttttttttttttaaaaaaaaaaaatctagtttttctttgtattttctgttcaaaacttacaatttagtatccacttttaagtttttttgcggaataccaggctgattcaaggaagtgtgaaatggcccctgaatttggattcaaagctaggccttttaatggtggtgaatcactatcatgatctgagaacaacttagcaatggaacgtaggatcccatttggaattttgttttcaccatccatctctattttctcaggagaaaccaactgcatagtgaatctattcttaatgctttggtgatgtatcattttatatgttgtttttgtgctttctgcaattcaattttgtgtattaaacctgttgcttttcattgttatttgaaaatataggcccttagagctgtgtcgcacaactacccaaacat

SEQ ID NO: 13309 - DNA, 5658 bp, Vitis vinifera
  Intron number 11 from transcript GSVIVT01015222001 (locus GSVIVG01015222001) derived from phytozome v7.0 (chr-ID chr 11; pos 1929884 to 1935541)
acggtcaggttacagttggcactcttattctgcaggtatatattttcttttccatgatcccatatttatgtgacgaaaagttctattctgctattatctagagagaagttgtgtcaatgttggggtggggatggtgtgtacccaaaaggagagtgggggcctaggtattcggaaaattgatcttttgaataaggctctgttggggaaatggatttggcgtttcgccattgaggaagattttttctggagaaaggtggttggggtgaagtatggccggttgggttttggatggagaacaaaggaggcccgcggatcgtttggggtgggggtttggagggatatcttgaaggagtcggcttggtgttgggataatattgagttcagagtaggaaaggggactaaggtgagtttctggactgaccattggtgcggaaatgaggtgttgtcccaagcttttccccagttgtttgcattggcggtccaaaggaacgcctcggtaaatgagatgtgggattctagccttggtctaggaggttggaatataagactctctagaaatcttaatgattgggagttggacgctctaggagagttgttgcatttgttgagggatttgaggatttctcttgaagaggacgcagtgatttggaaaggagagggacacggccgctttcggattagagatgcttacaagatgctgtcagggcctaatgtcattaccttcccgaaaaagagcatttgggtggacaaggtcccaaccaaagttgctttttttgcttgggaggcttcttgggagaaagttctaactttggacaagcttcaaagacggggatgacagcttcctaacaggtgttttttgtgtgattgtgaagaggaaaatgtaaatcatattcttttacactgtacagttgtaagggctctctgggagattgtcttggccttgtttggggctaattgggtgttctcagagaaagtcaaagagatgttagtcagttggaggggcccttttgtggggagaaagaggaaaaggatttggacttccattccgttgtgtattttttggacggtctggaaggagagaaatagattagctttcagggggggctctctagctattcagaagcttaagaattcttttgtttgtaacttgtggagttgggctagggtgtatatgggagaggagtcctcttcgcttttaggttttttggaatggctcgccgttccctaaggggtggtgagtgttgacttttgtattggctactatgtatacgtcctgtatgctttgtagctttttgcctcgtttaatatatttgagctcacttatcaaaaaaatgttggggtggggatggggtttaaaagaagagtaatattatattaccatgaaataagtaaatacaaataaggatgaggaattcttcctccaaacacaaccactatataactctaatcaaaaacaaccaaaactatttactttgatcaaaagtaagaaaatctatttacttcagatatcaatagagatgcacatctaaaagttaactttacactgtgctggtaacatgtttcctcctacagttttacacacttgtgaagcattcctatatgaaagaacaagcacttgagaatactctgttgcatattcttttggtctatttggaaggagaggaatgacaagagttttttaagggaaagagcttcttgtgttgtagcttaaagtttctgccttaaattgtgatttcatggtcttccaattctttaagggaagggagcctgcctctccttgattcgtggatagggtgagagtgagctgatttttgcctatgcgcatcttggtgtgctttcttgtaatttttttttttttttaactttctagtcctgcttaagtagtgccttctacatgtcccatgtactgagttggcctctatttggtccattaattgttttttttgatagataaaaggcaaaatatattaaaaaagtgctttgaaaaagcgcatcaagtacacatggagtatacaaaaagtgctgaaagggaagaaaagcaaaaaaaaaaacaaacactgcccaatatagaaccacaccctaaagaacaagaaaaacaaagggcacccaagctaccaaccaacaagtagccaaaccaaaattgctaacccctgacttaatagagctagtcctgacccaaccttcgagccattcttcccaactctagcttgaaccctcagaaaccactttccacccactttttcggttccttctctctttgctgcttgattgggagtagttacccgagctttccaacttccaaagctctctatcaaaacgagacattgacaagggtctctcctcttaatacccgatgcttcccccttatacgaccctttctgccttctaatttcctcaaaagggaggtaacttccttctacccatccataggcaatcccaaatacttattgaaggagacaaaattcgtgaagaaagaaagattcccaactcctagcaagtccttactagtgttgtcctttcttggagcccctttctcactacacaaatcatatacaacacacccgtcatcattgaaaggaacttttagaacatccgttataaaatccacatttgaaaacatccgcaaaggctcagcctccttcctcgctttccaaagaaacccttggcttgagttgtgtgcttaggtacattcactggcctccctcacctttgaaaaaaaaagaagaaagagaagacccacctttcaacgacaaaacagaagatgagggcttacttgtgaaaccttttgcttcacataagagagcaaagtctacataaggtcctctttcatcaaagaaatgagttcttaactagaagcaaagatcttggggaagcttctggatcaagcttccttccctagatagcatatcagggctcttaaaagagcttttaggttggcccacgacacaaacatcctcaaaagtaggctcgacatgaggtgatgggctggtctatgctagcaggtcaagagcaaggcccaaagcccttaaggccttccaactcgtgaactgacccaacacgagataaagaaaaaggcccaaaagccatcctctcagcttgtcccccagccttcgaagcactgctgcacatagaaaattctgcaccaacttgcgcagcatgcaaaggcaccttgtgttgctcccacctttttgcattcttcccaaccttagcccccacgctccactttgcacatggcttcccctcattgtcatccctaaactccaacaccctacaaccctcctttgggacaactaccaacacccatggtaggatctcccaccataactgaacgacgaaaactaacgatcctaccaccacacgcaagatccaagggaccccccttatgttggatctaactagaattctagtccattgtaattggtgtctctatgtagtatccacatccacatccacatccacaaccataaaacctccacaggcatcacttaccctcttaaaaaagtcctttccccacaagtgcaaaggtagttcgaccaatctcacccaacaatcttttgcacaccattctctgtagcaactagctttagggctccaccacttcaaatgcaagctctttcctttaaaaaggcaaacacccagacgccacaccctttcggcttcaaaagcattttcaaaatcaaacaaaaagagggcgtctcctaataacaccacactaagattgccattcaatctctaagtaattctagcccgggatttcaatcaacctaactttgggaccttcactactggaactctcaacctacccaccaagcagtgcttcaaaagcatatcattcatatgtatttcctccttctgaccctggatccaaactgcctcacccacctctcctttgcctctagaaaccacacccgtgtaagaaacaccttttctaggggactcaacctcgctctcccttagcaaatagccatctcctccctgaggttgctttataggcctggcctctagagtaacaccaatactccttaatttgcttgctagggtcttccaaacccctggaacacccctttcctctggaaagattagggagaatctctcttcttcaaccgtcaaagcatagcacaatgagaaccagcccgcatcgttgctacaaagctatagcttaaaagttctccccttttctttccactccatcctgagagacttccggggtgaaataccacaacaatgttcaatcccctccaacagcaaagcaaagtctctctcaccaatttgatccatgaggaaaggcctcaactcttttccatgatcagaccaaaatccttacctttaaccgtctcctttgatatctcaaaggattttgaatccaccctgaaccagcatttaccccccataactccaggataatctagctccatcaatggttcactgcattttgcatacacaagcacttgcaaaaacacatattcatgatgcaaatcctagatttccaagtattaaactcgctcaaatattctggcctgttaattcaatttaccctttacttatccaaattaatctaaaatgcacctgtaggcaaagctatcaatcaaaatattttcacaatcaatatgcttatgaactgtttgtttgtgttgtcagggtgatccacggataatggaaggctatcttttctagattttattgatgtatcaatttgctctcttttcgagattttattgatttatcaatatgcttaaggtgtaaggagtccttttttctcacattagttctatttttgttaatccatatacaccttccccgtacctgggtttcacctgcttgcatttccatatttacataataaacaaaaaatcatgagcaaaagggactataggatcagctaatagattagctttcctaaacatatgcctacagatgaagtaatactagcaggaactttcataattcttttaaatgtatttataattatcttgagatctcattctaccacaatctcttcaagtcaggccaaataaccaggactagtccattttcaaaccttcacattctgcaacaacaataaaatcgttacttataacttttgctctagcaacacatatgttgaatgtaactacaattttaaaattattttctcgagattatactctgctgtgttcatacatgctgtagacatgttagtacaagctggcttggtattctcactgaaaaataacattattatggagaagagatatataataagggagtggtggtagcccatagatatattctgtatcttttcaacgtaaaatctcctctaccactatcccatccctgccacttgagctaggcctcaagggcatcttctaagtcttaccattgttaggggcatcttccaagtcaaaccattgttgtaatgaaatgaataagttcatatgatcatcacactgtatgcacacagacaagtaaaaatgcacattcacatgcttacatacgtgtgtgtttttggtgttgtattgtgttctcactgtgcttgtgtcctgctttcacaaaatctaccatattggtttatccaagctgcacagacgaatactaaaaatgtgttttgtttatggtatttctcttgtttattgttgcctatcaggattgtgctgtgggcttgctatttgctcttcttcc

SEQ ID NO: 13310 - DNA, 2123 bp, Vitis vinifera
  Intron number 2 from transcript GSVIVT01013655001 (locus G SVIVG01013655001) derived from phytozome v7.0 (chr-ID chr1 8_random; pos 2018128 to 2020250)
ttggtgcaacacatctctgttccaatccggtctttcactcgcgcatgaaacatgttgccctcgactatcactttatctgagaacaagttcaaaatggtttgctacgagtgtcacacatctctgcctctgatcaactcgccgatgctcttaccaaacctcttgctcgtcctcagtttgactcactcaaggccaagattggacttgctccacggccgtccatcttgcggggccatgataaggatatacaatcaagttgagaaagtcaagggagaaaatcaagggatttccatgttttgaatatttgtagttataccatttatttgtatagttactcaatttgttttgtttcctatttctttgtaattagtttcctattttcgtgctcatgcaatctgtatatatgctaaccacatcaatgagaatggtatgaaaaataattcttcaatttctctcttccaaaaatcctttaacaacagcctgtcatggcccacgttccgccacctgcagggtgaaaggacaagaatgaagtgacggcaagtcacttcctatgatcacttcccacgatctctatcagccacccgtagagtgatgatggccctgccaccacctagtgtcatcatgacaacacaaaatatctccctaccattaaagagggaaacaaagcttctaatactatatatatatgaaccttcacacaaagaggaaggtaagcttactatacctggtaaaaggtcaactgatttatctctgtctctctaaccatggctgacaaaacaatcggagggtgcgtctagacgccctgtccggacgccttttgcaggtagtacgattgaatcaagaatctatattggttgagatcgtgcgtccatctatttggcaactacttggatcaccagggacacgagacctcaacacttaatagtattaaatattaggttgtttgtttttgtagtattttatttttattaagtattaaaaagtaaaaaaaaactaatattttattttttctatttagaaaaaattacatattttgattttttctatttagtaaaaagtttataataaatcatgaaaaagtagaaaaacaaacaacctaaattctaaaaacaaattactttaagcaaaaaattaaaaaaacaaacatcacctaagtctattgtagaaaacaaaaagccctgatattaatagttattgaccattgcggggtaaacatgaacaatcatttggtacaataaattgagcaatatcgctgtagtaactacttgctaattaaagaatgcgaacattggctaccaaattgctactagttaaacgaagtacactcccatgtagattatagtattttttttattattgaaaagtctcccaaatatcccaatttccccttcttgttatgatgttttgcatcaaatcgtcaggaattttcttttgcagtctcacaccttttggtgattaggcagaccagctaaacttcatgctatcattttcattctgcatttagttttgatattgtttctcaaaaaagtaagtagagcaatgacatgagcttcccattattctttgggttttcatattcctgttcagttttcatgctctttttttttttttttttcagttttatgatgtactctccaatataaggtgaagacgtatatttaatcatactttaggactacttattgtttccatggtattttcatcgacatcttacccaaactcacggatagagctccactgaaacgaatactctctatcatggcaagcagccaataaatctcgccgtatttcataaagaatatcagaaatcccaagtagaaaatcaattttttttttttaaattcgcttgcttggatgaggttggtctgtttaatttgcattgcgataagattgaaaaatgaactttgtctttgccttgtaaatgtattgtcccctttagctattgatgaaataattgacatttaagagctagaagcatggtatgcatgctttactacaacaactctccatgtccttattatcttgtctataacatgatggctgtttggagaagaatatttcccatagattgacctcttcttggtcccacaggtgcaatcctgctttacatttttggctgattctga

SEQ ID NO: 13311 - DNA, 1561 bp, Vitis vinifera
  Intron number 7 from transcript GSVIVT01017873001 (locus G SVIVG01017873001) derived from phytozome v7.0 (chr-ID chr5 ; pos 4207543 to 4209103 reverse strand)
tatccaaggtattgttatttgaaacttttaattgttaatttttaacccaacttctgggccaattactgtattgaacatctttttaatgttcatgacctcacctgatgcttttggtgaatattattgtcatccctagtcagctagtcatgcacttgcattgatgttgttgggaagcattttatatcttaattgtttcattgttaaaagaacttcattcaccataggaagcttttgactgtagatgatcagatctagaatggctaatatgattactaaccatattcaaccatgtggacttaacaattggaattctgattgttgttccaatgtatttaaatgagcatcttttagaaaaagcagtggtcctgtccttaaggtgtggctctatgttcatcctgccataactctcttccttctccagtctcttgacttgatgcatgaagtggtaaaatgcatctaaattactgtttcagcatagaatgcatgttgtgttaagggggacagtttataggatcattaaaaggtctactatgcctttaggtagagaaggttggctagttgagggagcaacatttaaacaaattttagagctgaataaggataataaggatggctgaggagaaggtggcactaagttgtcctttttatattgatagttttggcactaagttgtctgtgatcatacagtcttatttaacgaggaaaaatggattgctaatactgttgaataattttcaatttgaaggtgcccaaaaaacaaggtcaaagaaaacatgtgccaagccagtgagaaaatagctatgattgttaaggatttattgtaggatatgtttctagatagagctgaatagcaaaagaacatttcttttcaaagcaaaaaaaaaaaaaaaaaactgctaagaggtttcatgtggctgatccacactagatgggatttaagattttgtcgagtttttggctcttttggttgaaatatgtggtctaaatctcatcttgtgatattgtgctgttggtagtctctttttacaaccatcattagttgatcagaatcatagtgtttgttgttctactttaaatagatttaaatgaaagaggctgatacctaatatcagtaaccctgaattctattgttgttcatacttgaacccaaacatacagttgtttcttacatgactcgatctcagaagctatgagttggttttgattagatacttagatgctaaacaaggaaaggctaatatcatggtcagtttctgaaagcttacaccataagctgctaaactcaagcatgcattgcgtagaattatggatgtgtaatgatattggataaatggattgtaccccttggcagcaatcttttaaggcacctctgaggattgaaaatttgtagatggtattagatgcatcataattcgagtactctaaaattgttttctttattattattattatgttctgtagtatttggaagtttgaacaattttcctgtgatgaactaatttatgaatattttcctctctttttagtgctgttgaccagttcaagaagcaattcgcttacc

SEQ ID NO: 13312 - DNA, 2162 bp, Vitis vinifera
  Intron number 7 from transcript GSVIVT01013761001 (locus G SVIVG01013761001) derived from phytozome v7.0 (chr-ID chr1 ; pos 7865893 to 7868054)
gactattcgaaggtatatatttttgatatattttatcatatcttgcttgatgtgtagctaattaaggtaaaacgtgggattatgatttatattagataaagatgctgtataaggtccttgatgatcagtggattttttccgaatttatagtttgtgataacttctaaaatttcatggactttatagggaaaaaaaaaattacttaacaaaacacctgtttgactccttccaagttaatcctctaggttagtaattcttgtgttgattgacaaagttgattgtttaagaatttgttctctttttctttctttctagagatgcaattattgctattcatttcagtagggcttcctgtttgctgtttaacaacaattcatttctgtattatcacttgtagatgtgacatgtgagcttgaagattttttaccttctcttaaaagatcttagctgtattaaattcaaaagtgcaacatttttttatggtcatcaagatctattctttggataaaaagatgagcacttgtttatttccagacactttagtgagtaggacctgaaaaccagttcatttgatggctcctatgagtgacagcttgtgagaagagcaaaagctattgatgtggttaatgcacaaaagacagaggtgtagttccatgaagtgtcccaaaacgtgaaatttccctaatctcctttgatgtacagtgtgggaccttttatatccagacaagctcactgcttgtgtttccttcaaggaatcgtaatcctaatggatatgacaatgaaaaactactactgtatattacactctcctctttagggtggtcctagggctatgattggcttgagactgaatgagttgtatcctatgagaaaagtggttctcaatattttggaattatctaggtgggggtgaattggtaacatctattaaaaattagacttattgacttgtttaataattaatcaaattaattcaaagtgatcccaaaatacagaacatgaatattggaacaccttatttatatggaaatcctcagagggcagaaaaccacgaacttcttcaatctgtagttttgccaagtagccctcctttcaatctgtagtttagtgagcacaccttgaacttcttcaaggcacactctttaaaccaccttgagctcttttaagggacacaacattcctccaaagattgctaatgctaatattgattgattgttgaagctcaagagaattggggtcttcagtttttaggacataattaatgtgaatgtgatgttagctttgaagacaataaaaaaggagcaaaaataatatcaataattccaaaagctctctaaagaagaaattttaagatatatatttttgaaaaacagatcctaacacttcaactttgccaaatattttttctactttaaatgaagtttcccaaaatcataaaattgcttcatggaaatttttttaaaaataagttatttaaaaactttcctattccaaaaaggcttttaaaaaaatagggaacttggcaagtaagaatttttaaatatattaaaaaaaatttgtaccttcttaaacaacaattagaaaatacaggtagaggctctatgccttttgttgattttatagaatggttgagtctttgttgagggacggagtattttttttgtttcccctctctttttttagctttttggtgctcattgtatatgatcaatgcactcctgtgcgctagttgcgctatttaatacattttcttgtttataaaaaaaaaacaattagaaaatattattttcttttcaaaaacaaaagagacttttccaaaaaaaagggaaaaaaagatctaatattcaaactattattttttaagaactttaaatgtaaaaaaaccaatttttattcaattttaaatactatagaaaactgcccaatctcagccctacatatattatgttcatatgcagacaacttgaaggaacatgtaagtattggagtctgacacgtgtatattatttttgttcaaatgtcaatatgtatcatagtgttgatactggatggtgagacataccattttgtatttacaatttttccatcccttaatggcttagcacactcttttttaaatgataacagtttggtcttgcatcaacaaccattgcttctagctt

SEQ ID NO: 13313 - DNA, 3919 bp, Vitis vinifera
  Intron number 5 from transcript GSVIVT01004779001 (locus G SVIVG01004779001) derived from phytozome v7.0 (chr-ID chrU n; pos 16043734 to 16047652 reverse strand)
ctgctggtgctatactggttcaggtagtgttctttagcgttaaaatatttataatatttagtagaaacatattttgggaaatattttgtgtattgataataaatatatgttggaatctactattctagttaagggtggtgtgcttctttttttgtgtgtatgcatatgtgcatatgattgtctgttctactgggaattttccaggttgtctacatcttgataggtttcgtcataaatattgtcactaagggcattataaagtttattaataccttccatcaacttctaggatcctttactatgaactctaccataaggcttcctcatagaaatttagtagctgaacagaaggttttggtacatgtttgtttcttcttagtggagagtattttactattttaaacttctttacatttacatactaatggaagtttatcttgatggacaaaaccaaatagttattgtcctcatttataatagaaggaagctcattccacgtatgagaaacatcagtacaagattaggcaataccaaggctaaaattggtctccttcctaaggaaatggccctcaaacttcaaaggttcatatttgaatagcctcactatatgtgtacatctatgatgccaatttcacattgacttgtaatgaagctgagagttactaaagtttttaactttttattactttttcatgattaatctagtgtgtgttatggtgatgatgatatagttcttaataatgtttgtggcatctttcatgttcttgtggtgtttatcatgctttgttaagtatccttttttctttccagtaattctcatgtttcttctcaggcttcccattgcctgatatttctttccttttttgtgtttattttcttctttgttaccccttcttatcctgtttatttgttgtttttctttctgcttgtttccttggtcattgaaggaactgcattattctgtttaatttggtgtcaattgttatgaagtttttttataccatgctatcaaagtgtttgtatgatatgggatgaatcatcttgcgtggccaatttatttccaaaatggaagccccggccacacaaccaaacgcccaggaattaataaataaatagagcatgagatttctttcattttgaagtacaaaggcctaatagcacatagaaatggccatagccagatagacaaatctcccccatgcaatttgattaagcatgatatcatggttgtgtctagtgtccacatcacaaatgagatcatcatatatcaaaattagtgggtgaaaagaaaaaaacttggatggctctcatctgtgatgccagggtgacaaatatagtctgaaagctatctggacctacttttctttgataccaaacttggtcccacagaattattagagcaatctaaaacactgtttcttgaaaaaatgctagcaatatatatatatatatatatatattaatcttgtttttaaaaaaaccctcaaaatggaaaacataatttgtgaaatccataggtttcacctggagtgaaatagtttgctcctcgggacctgatggggctttcagtgattttttgaggaattgggaaagaggaaattttagtgatatttgtggtggttgggctagaatgaaattctaggggttcaaagagcagaagcttaaatgtggaagaaaatgagataggtttagggattggggtggggatgtgggagattcagtactgagttccatcaggggaaaaatttggaaaaagaaaaaaagaaaagaagaattacctatcagaagaactgggatagggcttttggttttttttgataggtaagaactgggatagggtttcattcctcttagccttgtgaagttctatcactaaagaatttaagggagtccccttaacatcttgttatgggtgattagatattaataatgctcttcccatcaaccatgggattcttagaacttgttgtgaaggcccaatccagaagggagagaagcttaaatttgatggatcttctcttgcaaacccaggttcattgaggaattagtggttcattctggatgcacatgtccattttctccccttttaggccttccgtagttggatttggttattaaagcaaaatccttgatggtgttggaagggctgaaggaagtgtcctacttggggtttaagagattccattatggaaggggatgctttggacttgttgaatggaccagtcaaagtagttttggctccttggaatctcagccaattgttgtggaagcctagagatctcatagcagccttgagtgtcaatacaagtttgggtatatagaaaggctaatcaggagggggagcatcttggctgaaagggaagccaccacatttgaagagttggagatggaaacgttaccttccttgatttgagttgataactatagtggggttttctttgttgttttttcctcttccattaggagttgccattgaggaggccttaggttggaaggactatttgtccttcctttctgattttattgttaacagtaaaatcctgtatctgttttttcataaaacaagagggaaaactccaggaaaggcctttaaatgtaggatacatctagttcaatggaaaaaaaagatcaggaaatctctgtccaaaagaaagaaaaagaaaaaaagtaaaggaaatgagctgaagctgttgaacttgattgcctaatcatatgttttgatgccatcttaatgaataaattgcatatcagctaaataaggtcaatttttttgagtgtattgactgatgaaagacaccccaaatataaaaggggtagctacttctcagcttgtctaagaagcttaaattgttaggtcatatgactctgctctggcaacaatgaggagccagatttctgatacctctctgtggatctatcctcctgaaatgccaaatggatccataattccaaattctccttatttcttgttccaacattatggtaataactccagttactagatgttattataatgtggtttagttctgcaagatgaaatgtaaggggtgttccatacatcaaacctgctttctttgtatctgcaggcaaaccaagaggtttaaaagaggataagcactggaaactcaaacaaaaatcatgaaaggatgtgagtcaaagctatggaattaggattatatgatgatgattgcaaatgcttgaagccatgttcatcatatattcatcctatttttgggcagtggtatccaatatgggttagccactttccagcctttctaaaaagtctggaattgtgtttatccaagtgctgatgatattgcctggctgcaagaataatagtggggattttccattatggagccatagactccccatacatttcctgctacaaaaatataaattgtacaatttaacaaatatgtgtgttgtgatcttgttcccttcctcaaggtgaaggtccatctatgttctttatgacctcagcagcaatcaacccacacaggacctgtccattccttctatcttggggcaaacaaagggtcagaaagaggataaacaccccaaactttgagttctttttcttgttcttccttgggaattgtctcttagccctatctatatttttatggaacaaaaactcaacaacagatttcctagatcttttcctttgtgacaacctataatttgtcatctttgttgctctttttttttttcatcaatcaaaatatcaagtaccagttcatgcttagcaccaaatctgatctgcattctttgtaagggaatatgacttggttgtttcttaaatgcaatccttatctgtttctcttccaaaataagagatttatagcaatcgaaaatgaattcttgctgctatgcacttacattaccatcattctgcaggcctgtgatagtgaacaag

SEQ ID NO: 13314 - DNA, 2818 bp, Vitis vinifera
  Intron number 6 from transcript GSVIVT01026447001 (locus G SVIVG01026447001) derived from phytozome v7.0 (chr-ID chr4 ; pos 23551980 to 23554797 reverse strand)
gccgcttaatcgaagtgagtttcagcttcacatgtaattgcacgcttctaatattttattgctcttgggcattagtttttaccttgtactactctgttgcacctagaaaattatgaattatcaatcagcttcatggtgcgattatgtctttcaataattttctggttatttcagcagtgatacattttgtattttgtaatgcttaatttgaaatgggaattttttctgaacttttgccttggaagcactggtgatacagatactagtgaaaaattgaattctttatctttgcgaaattaatctcttttccttcaagataaatgtgtagttaaattgcttcctggttgggattggtatagcttgaaatgaactgatatccagctatgctctttctatccaaggatttaattgttttgttaacaggacaaaacacttaaaaaataaagacagacaaaagaaaagaaaaaaaaaaaaagaatcccaattacattttgatgtgttttttatttttatttttaactgcaacatgggggttctatgaaatggagaagctattaattcccaaaattttaacctagacaagtggggcacttaaagcccccttgtatatgcagctaagttgcatgaaacacattcaactaactacaactgatgcagaaagtgctcccatgaggcagcatgctgcaggtttagggaaagatttctgttctcttgatagaggttgtgaaagttttgtcctgtctcagaaaacaccctatttctatcaatccctattcctgattactcaatgtccatggtggacttcattgattgactgagctctaagtacggagagaatattgttttttgtctatctccactttgtatggccttttggcatctttatatacaccatatatacttttgtgcgctgttttgtttggcacttttaatagatttgatctttgcctataaataaaaatccctattctgattttttttttttcagttagtataaactaaaaagaaaatatggaaaggaaattaatgaattctccatagaaggacatattaattttaaaagcaagcagtaacactatacattctgtctgaatagtgcattttttgcactttacacaccagagacttgtcatgtataccttttactcataatattggttttaaattatgtgtaagtttctctataaaagtttcatgtttttgttactagtttccatcattttccaaagctatagcaacaatttaagctagtacggcacttacaattgttaggtgaaagaggcaggtcgcataaagccactgagatagcacaggtgccaatcttgaagaatggcggaacttgagaagtggatgaagaaaggcagtgagatctcgggtaaaaggtcaattggcctaaaggagccatttgggctttatttataaggattggatgggcaaaacttgctgggatgtaggcttatagcctacaacctaggtctgccaggctcatttagccacaattcttacaagttggcctttacaaatgcattgctaccacataaccctcaccatgcacctgcacctccacctacctaagatacaagagaccttcaccctattccaattttaagttttagctactaaaccctcaaacaatactagagccaggtaaaggtgatctagtctggtgtcaactatctgagtgtggatcaagagcaccttttcttgataggtaaataacatgagaatagtatattaaaagcaccaaaaagagcaagcaaagtacatgggatgtatacattagtcaccacaaggtgcaacaaaaaagagggaactacaaaagaaaaacccctcacttagtgagatcccaaccgatcaataaaatcaattaaagacattggacccccatctatgtacaccttaggccacaataaaatattactaataaaaatgtttttctttctttagtcagaatgctcctcattttcaaatgatctttgattcttttccttttatattatccaaaaaatgaacaagtaagctgctcgccatgccttcttacgattttttcccacaaaggacccttgccatcaagagcacctttgaggagcttctagaggtgcatcctgagcattggctcaggtggtttagttttgcaccaccagctataattaccccctccacagacacaactttgaaggggggttatagggcctccttaggtgtgggaatatgtacttgctaagctgaacacactgaatgttttggctactggacctctattactttgccagggtcttatcaaatgtttaccattaggcatccagttgtaatcaggtaactatataaaaaatcgccataaaaaagatgtggatgggaagatttttaatatctctgaagttgtttctgataaaaatattgttaatatatctgcacatgtttgtgattagaacttttggatttgataggattgaggtttaaagccactaacaactagattgaaaagatatgtaggacctccaaacaaaattgagacttagaattcagtttgtttagtcaagatttgttgagttatttgagttgtaactataggactgtaaaattaaaagtgtaacttctggacttttaaagtttgtattgcaggaaacatttgaatataccatagaaatcatctgatttctgaaatttattactttgtttgaaattcctttttctactaattctttacttctccataaagattgtcaactcatttatctatatgtatcatccgatctcacgatttttaatcaacttttcaattgtttgtcctctgtagggttacaagagagttggtggc

SEQ ID NO: 13315 - DNA, 5980 bp, Vitis vinifera
  Intron number 5 from transcript GSVIVT01015969001 (locus G SVIVG01015969001) derived from phytozome v7.0 (chr-ID chr9 ; pos 16452375 to 16458354)
aaggtttattctactgctgtaatttttattttatttttaaaatttactaaaaatttcacatattttccccatttttaagagtgcttatacacatggattgctcttggttccttcagtgatgatgcaaacagaaagtagaagaaactaaaaataagaacctgtctgtgatgtgcacaaagttgccacagtgggacacctgattaatttgtatttctggcaacaaggtagtataggaaagaaatgctggagcatctttaagaggaaaagttttaactcatgtgctttcaaatatatcattgtggttagttggaagaaacctcagatgtcagaaagaatttgggtaattagtctgctacttatgagttcaattctggtaaacatggcaagcataatgataatttaatcaataatttctagaattccatgggttttgaatgctctatatagtccgatcaattttatacttgtgcaagaatttggtttttggtattggattatgttgtttttgcatctagctgactatctacatggtctgaatagattcagttttattgaataacacaatcatgtggcttctttgcatccatcccaaaagttatgagttcatgagtgtttttagttgtttgttggaagaaggcaacataatccaagcgatatagagccaatattgatttaaccaatacataatggtgtttctacctattagatggccggaatgagtcatttggtggatatctatggtagatggtggatttatcaccctaaaatatacctttttttttttttgtctctccatagtttactttctactttcaattccatcccaaatttatactaacagataaaatgttgatgtcaattataacattgaggaaaagattgatattggtaaaaatgtagatatgatgaaagttttgacattttaaacattttataaaattatctttttatggatatcaaggaaaatagcaatgttgaaccatatataaatggccttgatattggagatattgacaatattggtaggtatgatgtacatgtttatcaagtctttggtaattgaagatggggtgttttcaaaagactagtgaggtataatagagaagatttgaatttttcgagcgactatacaacaaaccaaattaggattcttagagattagaagagttggattggttcctaatttttgaggagaatgctagatggctacaaaattgttttatagagttggaaattcgaggaactattttcgaatggatagagaaaaagctctaggcatagatgattttaccataataaagaatgttggggcacattcaaggaggatatgtagagggttttcttagaattctacaacaatagtgtcataagtaaaagctccaataccactttcattgctctaattcccaaaagaactcatacaaccaaagtctctgattttagacccattagtttgattattagcctttacaatgtcatagctaaagtgttatctcaaccatccaagggattttgcatgagaccattccagtatctcaaggtgcttatgttgagggtagacatatccctgatactatcctagtggtgaatgaagtagtagacaaaaggtatccagtaacttaggaatttttttcaaaatagattttgacaagacttatggttcatgccttagggaggaaaggttttagtccgaagtggaggaggtggatctaagggtgtttatcattagctcgtttttctgttttagtgaataagtgtgctaaaggttgtgttaaagtttctagaggtttaagacaaggtgaccctctctttgcttcccttttctttttaccattgttgctgatgtgttgagtaggatggtactgagaactaaggactgtggtttgttggaaggcttttggtgggtaaacatatgatatgatatctcccctttagtttgtagacgatacaatatttttctctagttaacctcaaggagttgtaaaactttaagttcatcttaatgtcttttggacacatatcaagcctcaagattaatctagaaaaaagatcatgaatagtaattaatgctacagaggaccttgtccatgatttagcttcctcttagaatgcaaagtttctaattggctcctaacccatttgggtcttcctttagagagggagggaggggtgttgtggtgcagaatccctagggttatttcattctaaactagcattacataggatttcttatagcaatggaagaaagtaattttgtccttgtagaacaacccttgtgcaatcctgcttatcacttatcctcatttatttcctttccatcttttttaagatctcagtaaaagtgactactaaggttgagaaattgcaatgagattttctttggttaggatttgagaaagggacgagatcaccttgtttgttgggaacatgtgtgtagataaaaaagggatagaggtttagggttaggagggatcttcttaaggaatggagcccttctaagtaagtggttgtgggggtttctaagggagagcaaagctttatggcataggtcatcttaagtatttatgggccacactataatggttgggatacaaacacttatcaaaaaaaaaaaggttgggataaaaacactctagttaggtggtaacaatgttttcctttgaagctattgctcaagtttttatatttctctaattttacatgtttctcaatggaagatggttaaaaaagcgatttttgggaggatatagaagatggttaaaaaagccattttgggaggatatttggttggttgattgacctctcaaacttcaatttccaaatctttttgaggttgtaaggactagaaattttcctttttcctttcttctagtttcttgtttaactatgtctcttggaatttcattttcttttaattcttttctaatctagaaatagaagaacttactagccttttttcctccttacacatatgtctctcaccttccttcctaaatgaaaggatttggtcattagcatcctcatggcatttgaggatagatggagatttatggttactatttgggatttgacttacttttctctttcctttagaccttagtcattgagccctttgtcagttttcttttgaataagattggaagaatgtttgctactcaaaaaatcgcataagaaggctatgcttgattggttacccctttagtaggtttgttaaaagctaaaacatcgatgggtgttctttggataattcttcacaattagttataggaggatcgatcaaagattatttagatgtagtattgagagcttgctccaaaattataggagtaggtttaagtagtaaggtagagatactagtattattggtagacttgttgtaagctaaagctttgtgcctattgaatcccactagagaaggagactctgccattgtgatatcttgggtgtctagtaggaagagagactcattgaagttcaacaattgaatccacagaattctagatgttgctggtgaggtagggtgctcctccttttgatttcctcattcagctaaactaaatccacaaaactctagatgttgatagtgaggcagcaggctcttgattttcttctttagctaatcaagttgaccaatgtgtcattagtgaggtcaagctaattctctttatgtggtttaattcacaccaaatcctaagccaataaccttgggtatacttcctaaatcaacaccaagtcctaagcacacaaaatctccatccttactttttgagccatcattttctcggagagtgacactattgccaacaaacaaatccctcccctaaaatagtgcctcttgagacttgaacctatgacctgtctctaacaccacttgttaggatcgaggacatagccatctcatctaaagtttcctttgttggaggctgttttacgcctgagtgtatgaagtttgtattgtgtgtacattcccttttctgcttttttgtgcagaatgttttagtttctgtggagcaatataagtatttgttttttgaatttgcagttgtacatattggaagaattgctcgtccttcttgtatttactattcaatgaatgaatatatttgtttctaataaagaaaaagaaaaaaagtaagaaatatattatgtacatgtttctactgatacatgcagtctgtacatctttctagattcttgtgaatgcattttttgttcaattggcatgtcaaaaataataaacattttttttttctttttttacactatttctaattaatgttaattctttgtaccatcatcaatagattttaggcactgttggttgaggcaaaagttgttgaaacttcttatgcttcagaagttaggtttacaatgtttcaagttaatggttttttgtaccatcattaatatatttcaggcatggcattatcaggtgagggaaacattgctgaaagcctcaaagttttcatgcttgagaagttaaccaggggggaggggtgggggtaagggatattaccatcaggtgaatgtttgtaaaatccttaatggagtctacttatttgaagaagcccttgagatgtcttttggttcacagaatgtaaggaaatagaaataggatatattcaagcctaagtttcaagagttcatatctcaagagtcaagcatggtaatctgactaggaaattgtttatattcccacttttatgtttagtttgtgtagaaattaaagtttgatttaattcttaataatgtctttacacctaaatgtgtagaattgaaaattgaaaaggttcagaaggatctgaaaccatgattttgattcaacatttaccctatcactatgcgtcatgacatatatgccaatttaaattttataatggttctttaaaatccctaaaataagagaatcatgtgatgtgatatgacatataaccatgattttcatcatactaaataattaattgtcctattgcgtttttttagaacacttaaactaaaacatactaaaaatacgagtaattctagttccccctcttgctttttatgttcacatttttcttattagggaagtgtcaatgtaggatgaggagtttgatatttacattttctcctgaaatatcactaattattgtcaaattttaaaattttggacaaattgtgcaaaattagtaaagaattttcactgccttctattaaaatcctaaaataaattatttagaaaggtttaaatttgaatttattcctatgagaaaaataatattagatcaaacttaatagataataaatgattattcaaacatgataagccaaaaatgggaatttaaagaagagaaaaaatattgagatattgaatttgaggcattattattattttgtattgtaagactagatcttataggtaagctggtacttattatgtatcgtaattctaattctatatcatgtaaatacaaatacccatatattttttgagttacatgatgacatgggaaatcaaccatgggttgattcgtgcaaagaaatgcaagaatgctaaaattgtggattactttccctttaatcaacctacattgaatgatcacatttctcttaactcatattctgaacatattagggtcaagaagattttgagaaagccatgtatagcctttgtcatatcatttgtactttggtgtgccctatttcaagcgcttatatttttttctcattttgcctatcaaaaaaaaaaaatgtatattctgtcattttttttttattagaaacaaagataaattttattgatataataaaaagagaaggatgaggggtccttctcacacacatacaaaacttgatcaaagtagagtatacccactatatcctttgtcatgttcatgctcttcttttcaaccatttgtatagaaggcagtttaattttgacattctacagttgtttacaaatgtaggacgttgggagtccaaggaagcaccttccctctac

SEQ ID NO: 13316 - DNA, 6161 bp, Vitis vinifera
  Intron number 2 from transcript GSVIVT01035765001 (locus G SVIVG01035765001) derived from phytozome v7.0 (chr-ID chr4 ; pos 4124356 to 4130516)
ccttctgctgcttgggttaacgtagagtttgcccagtaagtgccttcttaattaatttctttggctttttaatattaaatacattgaattattaattttatttaattatttctgtaggagtttttgatgttattttgtggtgttcttgatgtgcagggtttgaaggttgcaatggatgttaaggccatatacatctcatggggttgattgagagagctggcttctctttctcttgaatatatgtattaatatgtgggatgttaagtttccaattagttgaataaaaattggatcaactaccactacaaattcaagaaattaacatatcttactgatttgaaggttttgatcctactttttccatggccagggtttggacatatgatagattgttttgggaaattaacgtttggtttggtgactattttttaaaatagtttttattctgtagaacaaaagaaaatagaaaatatgtttttttttaaatattttttaaattgtttttaaggcaaataaaacaattaaagttttatttgtttttttttattttttatttttaatttttcttctaatttatataactattaaattttttcaaagattctttattgtgtgacgatggatttcaaaatagaaattcatgtttgggcctaaaatttgatttgttatatttgaatttcctttttagtaagagcttttggatatttttagacaatttttttttctttcaaaaaacattttaatggaaagtaaagacaatatacttaacataaaggttattttgtttttatttttattttattatttttttgcttatgcttcaagttattatatgtttaattaaacttttataacatcaaaaaatcatcaattttaacttcagtttaaccttacataagctacgaagatactcaatacaaatcccctcatgatattaagaatgtcaatttggatcattttcgatatgagaaaatctaaattagatatacaaattaaaatgagaatttcaaactaattgtctatctatgtagaatagcaaaactagttgtaccaatttatgttattagttggttaagctgattagtttggttgttagttatattgttatcctttgtatattatatatgtcattcataatgaatagaaagatatctcttcaactcaaatatacaaagttgttattctgttaagttgatatcagagtgcagaactgttcttgcttccatggatgcttcttcttttgctccattcaatatcggcgctaattttcagatctcaacaatgcttcctccattgcatattcgactcagccacaccaattattcattttggaaatcacatattctttttgcagtccgagggtatggtcttgaaggatttttaaccgatgattgtgtctgtccacctgccatggtagctgatacaaaggatcctcaagtgtttgttgaaaatcctaatttcctctactggactcgtatggatcaatttcttgttagctggttaattggatccatttttgaagcaatgcttggacatgttatacggtgcacttccgcaacagagatttggagcacacttcataaggtatttggaattcaatctaaggcaagaattcttcagttgcatcaataattaaaacttaagaaaggtattacacctattgatgaatatgtctttaaaaaactgaaaaaataaggctgcttaaatgagaaaaacacccaagaggggggtgaattaggtttttcaaaaaaaaaaaattaacacaacaaattcaagcacaatataataaaaaataaagagatagagttagagaattcaaactcgaattttatagtggttcgacacttccttacctacatccattctcctcaaactcctaaccgagtcagagttctactaccttgaagcttcaaccaagcttcttatcttctttacacttggattccagctctaatgggctcttacacaaactcttcaagattcaaaccttttgaaggctttaacactcaacttttgcaagagtgaattcctcaactttgctcaaagatagctcaaatacaaatcaaagctcaaatgcaagtgaggatttaatgcactaagaaagaaatgagagcttttaaggcaagaacaagtgggtagacaattgattgcaagtgttctctatgtcataaatgaagtggagctctcaaaatataggtttctaagcttgggagccaaaaacagcctcaatcgatcgagctaggggtcgaccggtttactagccgttggaccatttaatgctttggcaggttaccgttgcctcgaccgaacctcgatcagaggtcgaccgggaaggagggaacctcaactgagaagggaaggctactgaaagagagagtgtttttggcactccttgatcggacaaaggcaaccgatcgactggttccctggcctattgagccagttggtctatgcctcaaccggttcagccttttggccccgaaaacctatttttttcaattatttttctttctaacacttagacaaggtctttaggtaaattaatatgtcaattttgaaacgttttgcctaaggtacatttgataaaactcaagttttaatgaaatcgaaattttaaagaataaatcaagtttttaaagatgcataaaaagatatgaaaaacctaagtgcacccatgcattcatcttacatttgtttcctatgatcaaaagtcttctaaaattctcgatcttgtatccatttgattctttgatgaatttccaaatttatacctgagattttttaccattcaaaccaattagtcacttaaccatggtttgttatcatcaaaacctgattaggagaacccttgggttaacaaaaacgtatattagcaaattgtttaattgttgttggtcaaccaatatctaattatgaggttattctttacattttatctggtcttggtttagaatatgagtctgttgtggtgaatataacctctaaagatcatataacacttcaacgtgttatgttcatgttgcaaaatcatgaacaaagaattgaaagttgtgaatctactacacaagtggatgttaatggcactagtgctcactatgctgccaatgagaactccttcaactctggttataacagaggcaatgacaattaccgtggatgacctcatggttcacgaagtggaagaggaggacggaatcagtccaagaacaaaccgatctatcaggtctgtaggaaacctagacacatagcattaaaatgctatcatcggtttgaccttagttatcaaggtcaagaagctactaccaatgcttattcagctaatacttcatctacaacatataccaatcctcaagcttacatggctgcaccaagttctggtgatccaaacaataattcttggtttctagacagtggagctacgcatcatattacagttgacaactctaatttggctagcaagaatgattacaatggcaaagagaaattggttattggtaaatggttcaaaacttcatattagtcatattggcaattccaaatttctttctaatcattttgacaaatctttacgtcttaataacattttacatgttcctcatattaccaaaaaccttgttagtatttccaagtgtaccactgataactctgtttctgttgaatttacaccttcttgttgttatgttaaggatctgatcacgggggccactctactgaagggagtacatgatcttgttcttcatgtttttataatcaaaattgcttctttcactcttttgtggcttgtaatgtttcctttccaaataaatcacatgacagttgtaatacttttgctgttctttggataaattcaaagccagattggttgctaaggggtttcaacaacatgctggtgtagatttctcagacacatttagtctagttgtcaaagcctctactattcgaataatttgttgtcgcttacaattgggacatacaacaaatcaatatcaataatgcctttctaaatggcattcttcatgaagatgtctatatgtgtcaacctgaagggtttgttagttctactcatcctactcatgtttgcaagctgattaagtcactctatgggcttaacaagctcttcgagcttggtttgttcaacttcgcagtgctctagtctcatggggatttcagccttccatttctgattattccttatttcactcttggaagaatggtcatttggttttggtattagtatatgttgatgatatcttaataactggcgacagttctgtactcattcattctatgatttaggctctcacttctcggtttgctttgaagactcttggttctattagttactttcttggatttgaagcatttagagataacttcggtctctatctcaatcaggccaaatatatttatgatttacttgtcaagacaaacatgttccatgctaaaccatcctttacaccaatggctcttggttagaaacttgctcttgaagacagtgttctttttcttgatgtcaccttatattgcagcaccattggtactctccaatacttaactttaactcggcctgacatatctttctcggttaataagttgagccaatttattaaggctcctacacaacatcattggagtgcttgtaaatgtctcttgtgctatgttagtggtacccgcactcttggtttagctttccgacctactgctcgatttacacttgaaggtttctcggatgcggattaggcgtgtaatgttgatgacaaaagatctatgaccggttattgtgtttttcttgatggatatagtaacttggagttctcgcaaacaataggtcgttgcaaagtccagtactgaatctgagtattgggcgctaacttgtgttactatggaattaatttggataaaatctttactggatgaacttcaacttccattacagcatcgtcccatagcttggtatgataacctgggtgcgcatgctcttgcccacaatcctatttatcattcacggactaaacatattgaggtggatgtccatttcatctgagaaaagattctccgctgtgctcttgaagttcgctatataccctctcaagaacaactagaagacttgtttactaagtctttgtctctttcttagtttcagtttctgtgttccaagctttcgatttcctattcgccgtttagcttgggggggatgttgaacaacaaaactagttgtaccagattctattattagctggttgttaagctgattagtttggttattagttatattgttatcctttgtatattatatataccattcataatgaatagaaagatatctctttagctcaaatatacaaagttgttattctgttaagtatctaaatcaaaattcagaaagacattatacgtacactataagaaaaaagggaaatgatgacacttttttaagtgttaagaaagataaaagatgaccctttcctaaattcaaagataaaattgtaacgcaagacgttggaattggctaaaggcacgaaacacgtgtacaaaatcatgcatgtaacatcaagtgaatccacccaccaaggatgaaattgagaggcacaaaacctttacttataataaaaaaaatggaaaaattattcttttcattgaaataatgaagaactagtatgcaagtaaggttcatatataaaacatgaccttcactcccaactaagcaaaggaggtgtctcacacggggacggcatgacccattccaaacagataccaagtaatggcatgcacatgggtggcatcgaccggaaagtcggcaccgcccgggccacactgactggtcaatgaatctctttagattattaggcttcaaaattttaaccccttcccatccaacaaatatcagttgcccattcgatctacgtacttctttttgtttttgtttttgtcttgagctgattttatgatgaataaaactgtctctggctttacctttggaattctcatcagcggtttacctaattaacaaagagcggttgactttgaagtatacaagtatatcttcttcatacatctcatatgcaggtatatcttcttcatacatcatatatatatatatatatatatatatatagaagattcatcaaacccgtctttcaaattcttttatttcctgcagg

SEQ ID NO: 13317 - DNA, 1831 bp, Vitis vinifera
  Intron number 3 from transcript GSVIVT01027806001 (locus G SVIVG01027806001) derived from phytozome v7.0 (chr-ID chr5 ; pos 7978501 to 7980331 reverse strand)
gtcacgagcttgaccgtttggacagcccagaggtatgttgggtttccatgtttttaataatgcttttgcctaacaaactgattatattctgcatctttcaaactggcaaaatattacataagatattatgaactaaaaaataaatacgcacataaaatatacaagatgcaataacatatcattcatttgtagcaaaatgtgagttgctgtctttttcatagtttcatgagttaaatgagtttctatatattttctcttgactatcaatttcctgagctatcaaagttctctctgaggcatttaaacactatatgaaaatggaaacatttccttctgcatctggctgctacatgcaaaaaatgctgaaggtttggtccatcactgatcaaccattctggcagcccataaacaggatttgcatttggtaatgacattttttattccatcctttgaatggaggtactagatattggacatctcatgcaaactgaatttgtccatagtcattcacatcattgttgttgttaacttgtaaagtgtatcttgtgtcatttttccgtttttctttattgtgtattgaatattattttttatatatagtaaaaaataaatgaaaaaatatggatgcatatacatatgtattggaagcacaagtatagagtaatatataaccacttttataaaacatagtgacatttaaagagttaaactatgtcataccatgtgaaacattgaataccagagttttgaaaagtttactttaacaaaatatgagtttaatgcataggtttggcataaaatctacaaaaataatttttttgaacttttagatatgatttttaggtcaaattctaactagtcatatttacttatatatgttgcgaatatatgtgccctggtatcatctcctaagtttcaacttttcatgtttgtcatcattccataaaaaattaatattaagttaaattttttattcatcaattgccttgatttttaatgtcaacattcaaatcattcaaataaaatttgtattatttattttaaaaataaatttacttaacttccaacattgtctttgacaacaagaatatattttttttatataggattatttcacctctcattcccttttgtgactgctttctaatcttacagtacattttcaacaattaatataatagttttttcaaaataaaatttgaatttgttgcgtattgtatcatgtttcttatatgtgtcataagatacaaattgtgatgcatatcaatttttattaaaaatgtatcttattgttgtgtcacatcgagtactgtaagtttttaactataattctcttatgctatgaaatgaacattgatatatagcatttagatgaatgtatttgttttttcctaacacttgctcaaagaaagggtgttatattcaattaatgaacatatattttcattctatttggtaatgatgatgttgtgaggaactgttgaaatgtactggagttgacagtgaaattaaatatgataatttggatatccttttaatagctgttgagatgtactggagttaacagtgaaattaaatatgatactttggatcagtttccttttaagaaatcatgaaagtcttctcaagaatgtgtatggatactattttgaagaatatgccgttattgtggttctcaggatgtccaagttccctatgattggtaaattattcatttaggttgagaagaataatagatttaaatttaatttactgggaattaataatcgcaactgctcttgtttgcatcttatttttctttgttattctgagcagattcaaggctccaact

SEQ ID NO: 13318 - DNA, 1366 bp, Vitis vinifera
  Intron number 10 from transcript GSVIVT01023918001 (locus GSVIVG01023918001) derived from phytozome v7.0 (chr-ID chr 3; pos 2493480 to 2494845 reverse strand)
gtgaacaggttcaaatttctatagaatctacttctgtaattaagaatgcaattattgtgaatactataagctcatctctacacacatttttgttaaatgatttagctttttgaagggatagttcatttgtatatgtttcaaaaggtgttacaatttacaaaatcttaaaatagttcatatttttttccttctgcaattagttgatgctgttgcctttagaataggcaacaacactacctattaatttagattttaaaaagtaggcaatgccactgtctagtgattaagactttaaaaggaatgacttatggctggaagaagttatttttttcataatgagtgatttaaggatttttttttatttttttatttttttattggcatttattcgatctagctgacctagaaatttggatcaaagagaagtggtagttcatgcttagactcttcttctcattattatgcttcttggtaagaagattcccttttcttaaaagtaatatctgtcaggcctaagtcacttgctagatttaaaacatgtattaatcactaatcactagcttgcataccagatgtgcatatagagtgataagtctgtgatttcatatccacaatcctagagaatgtcataagtttcttaatgcaacctataaccatagagccatgtttggtaaatttttttactgccttaattttccattgtagcgtctactatgcccacaagagtctcttttggctgaagttgagtctactgtatagtctatttctgattgttgctgattaaaacctaggagctcctaattttattcagattttagtagttagactgataaaaatgtgttttccatctggcatcaaaacctcccaaagtctactttatgattctcacaaagaaaagtggcatgacttttctgtgaggtggatctttgttttcaagtaggttataagcatacagtttcttattttaataaaaagttgtgaattatgaattagtttattattcgatagagcaatgtgcacagtctatggcatctggggctcaagtatctgatactagcacacttgtgcatagtccttcagcacttaaaaactgtgcagtgtaagttaacatggtgtaagaaacttgctgcacccatagtcttggcaaacttgttcctttgtgtcaaagtacatgacgggtcaatcaaacttctaataactgagcatgttagaatgtcatatgttaaatatattcatttagacttccaattggaaattttgatttccaagaatttcagccattctagcaaaagtagtttatgggctaattctttacttatactatggtgtactgtaggtacgtgttgtagaggttccaggtgtatcc

SEQ ID NO: 13319 - DNA, 17514 bp, Vitis vinifera
  Intron number 5 from transcript GSVIVT01020926001 (locus G SVIVG01020926001) derived from phytozome v7.0 (chr-ID chr5 ; pos 17009870 to 17027383)
tattaaggtgccttttctctctcattttttttcccctttttttggcttttgtttctgttacattatttcaattgtcatgcttttctgtgcttaatgcatttcgtgtgcaaaaagatttagaaagtgtcgaatttaattttttttttcccgttgagaatgttttctcacaacatcatggtggtggagtttccacaaaacttcagaagagaattgaggagcctggaaatttttgagataagtgaggatgtggtctcaggtgaggactgtctcagcttggatctaccaggggaggagatctgttcatattgtctttatgcaagttggcttcctttagttgttttgtggaaatggcatgggggtgatttgaggagtggaaagtctccttttagattcgagaatatgtggcttaaagttgaagggttcaaaggcctagtgaggaattggtggatgggttataactttagaggctctcatagttatgttcttgtattgaagttaaaggccctcaaataggacctaaaaagatggaacaagaggttttcggaaatgtcaccactagaaaaggggaggccttaaagcaaattggatttgggaactccaaagagaaggaaatggctctatccgttgatggattagaagctagaagggtagccatggatgtatttagcaggtaggctacattggaagaatgtaaattgaggataaaaatatcaacttcttccattaaatggccaatgaacagagacgaagacatttcttagccaatgttagagtaaatggtgtttggttttctaaagaggatgccataaataaatgagagggtgactagagagcttttcaaagtctcctattcaaagtgagggattagagatctggtattagtggaatgagctttgaagcattggggaatgaggaaactacaagtatggggattttattcactgaggaggaactttaggttgctttatggccgatgaatgtagacaacaaaatttcttagccaaagtcagagtaaatggtgtttggttttctaaagaggctgacataaataaaggagaggatgactagagacttttcaaagtctcttgttcgaggtaagggattaaagatccggtatcagtagaataagctttgaagcattagggaacgaggaaactacgagtatggagactttatacactaagaaggaagtttaggtcactttattagattcatgtggggataaagccctagggccaaaatgacttcaccatgacattttgacaattttgcttgggttttgttaagtaggagatgattgagttttttagggagtctttttatttattttttatttttttataatagtttcttcaagaaaagtctagatgttacttccttagttttgatcttgaagaaatgtggagtagaggacttaaaagatttcaaaccaattggcttagttagggggctaaataagctattggtgaaagctttggctaactaactgaaaaaggtgatgggaaaagtggtatcaaactaccaacactccttggtggagggtagacaagtcttgaatgtagttctcatagccaatgaggccatagattaaaagtggtgttatttgcaaaatggcattgaagaggcatacgatcatgtcaattgggatttttttaatggtggtcttagagaaaatgagtttgagacaaaagtggattagatggaacaaatggtgcatttgttcaacaaaattttcaattttagttatcaggacctcatttggattctttcaaagctctaggagttcaaatagtgggtccctctttctccttttttattcatatactcgtggaagttcttagttggattctgtggagggctaggttggggctcttcatcttgggcttcaaagtgggtggtagagagtgagggatttgaaatgatctatctcttgtttgttgaagataccttgatcttctgtgacattagtcaataatttttggagtatatgagtttgtcttttatgcagtttgaggtcatatcaagattgaaaattaatttggagaaaagtaagcttatttcagttggagtagctggaaatgtggaggcttttgctgctacattggtatgtagggtagggcatcttcctacaacatatgtaggctcgccttttggagctactttcaaagtagtgagggtttgggataaggtggaagaatggttccaataaaagctcagtgtggaagagataatatctctccaaaggaaggagactcaccttgataaaaagcactttgtcaagcttaccaatctactgcatgtctttgtttgtcatcttaaaagagttgaatctaagatccgagtagattcagtggaacttcctctagggtggggccgcatcagtgaaaaaacctcatctatttgaacaaaaagaatagaggccttgatgttagaaacctctgtactctaaacaaggtgctccttggcaagtagagctagagatacacaattgagggggaatcccatgaaaaagtgttagcataaaagctttaggaaggagaagggggatggtgttcaaaggttgtggctgatggttatgaggtgggtgtgtggaaggttattagagatgtgtgagagcctttcatgagcaaatctcatttcatagtaagcaaaggaagaaaggtcaaattttggaaagagagatggtatggtggttaatcattggaagagtccttctcaacttgtttctttatatctagtgataaagactcatgagcggtaaataggagagggaggttggcggagtccctgcttgtttagacaatttcatgattgggagaccaaaaagtgacaacatttttatagaatttgcataagtgcctaattaggggaagggaagctgacataatgggatggaaggaatctaagagtggtgagttctcaattaaatccttctaccacacattagcctaagaaaatagtgagtctttcccttcaagcacagtttggaattcatgggtacttgtgaaggtgggagtctttgcatgggcgacaacatgagctcggattttaacgattgatcaacttaaaaggaggggatggacaatgccaaattgatgctatttgtgtgaagttaaggaagaatcgattgatcatttgcttcttcatagctctaaaggaactatcatatgacaacttgttttctttttgtttggtatagtttgagtaatgcactctacactaacatgaaattattgagttagaataaatctttggtgggaaagaaatgaaaaaaaacttgttgcttggagggttacctcttttgtttgttttaaacattgtggaaggaaagagacgaggtcttttaaagatttagaacatttagaataaaaaattaaatcttcttttatgagcatttttttgaaatgggtcaaagtatacataggtgaccattctttgttcatgataggctttgttgattgccttggctcaaattaggagttagagcttgttttttgttttctcttctcctcaagtgtgcctttttgggcgtcaatagtaaacatcatgtgcgcttttttgtgccatttccttagtatgtatgtatgtgtggacccgcatttttcacgtgcgtccccacttgatcggcgagactcgcttttttatttgtgaaaaaatatttagttttggaaaagttggagccgccacctattttatttttattttaaagggaaaataaaacaagaaagaaaaaccctaaaaagtgactccatagttttggaaaaaagcatgtctttgggaaacctgagtctaggtccggggatcagatttacttattgggctaggagatagcacccctctaagccctaaaaggtctctattgactaagttgagagaaacgtggcaattaaatggttaatcatggatacctaagtgagctagggtgatttaaaaaaaattgcatgctaaccaagataagatcacaataaaggagagttagggtgcatacctgaaccgcttcttgagcgctattataaaacatcaatgcttagtttagatcatatatcacacaacatgcatcttcatcaaatatgtgtggacccgcatttttcacgtgcgtccccactcgatcggcgagactcgctttttatttgtgaaaaattaattttagaaaagttggagtcgccacctattttattttttattttaaagggaaaataaaacaagaaagaaaaaccctaaaaaagtgacttcatagttttggaagaagcatgtatttgggaaacctgagtctaggtccggggatcatgttacttattgggaaggtacctttaggaggtagcacccctctaagcccaataaaggtctctactgacaaagttaagggaagtgtggccattagtcagttaattatggatatctaagtaggctaggtgatttcgaatattgcatgcctaacaagaaaaccaaccataagaaagagtcgaagtgcgtacctgaacggtttctcaagcgctatcataaaacatgagaggttagcttgaaaatatgacacataatatgtattttatcaaagatgatcaaacaaacatcaaggcaatcaattatggcatcaaacatagtcatggctcatgataacgtacactttcatagaattttagagttgtagggtgggaagagcgtacctgattagtgagttaatacacctctatgggaaacaaagttagctcaataactaattcaaaataatctcatatataacacaaagaggaagcacaatcaatcaattatcaaacagacactatcgaagagaatatcatgaatgtcgggcccccaccaaagccctaattaattttgcatgaattgattcgataaattccatgatttggaattatgaagtttattcatgcttgttgaaaatcaagaaaaaatcaagaaaatagttaaaaatcaaataaaacaatgaaagtgcatacctgaaggaaagtggcagcaaatagcatgttaaaattgggattttatacctagaagctcctaaggaactttaaagaaaaccaaagttattttgatggaaaaaaaggttttgaaatccagatttaagatgtataaaatcacaaaataaaggaaaagaaacattagggggagtatgacatgtggcaaggtggcaattctgtgggtggagcttggagatgtgattgaaactgcaatgttgctattgaatcccaaaatacgttctgcccccttttagcactttctgtggctccctgttgttccaagttttggtgacttccagtgaggggtgaagagttccagtaaatttaagtttctcttgagagatacggattctggcgtaatcagctttccctatccgtgtcttccttggatccatgggctcaaattgaagcagttactgaatgggtcactaagcaaaatatatgtcagtatcctcgcaaactgttcgggctatttgaaacctttgcttctggcctccattcatatttattcctcttttacctatttctgtgaggtcactgcaggggaaaaactcaaaatccttagttatcatcatacttaaaactgtcatatcggttcccaaagaggatgctctctttgacattttctgttagtatacatggggactgagatacataggcttttgtaccaccgatcttactgcaagttcctgttctaaggattccaaagaggctgccaattcttcaatttcatctctctgatctttactattagatgcagactcctgtagtaggctcggatcaaagaacaatcctttcaaaacattattcttcctcgacaacccagtttgaagagacaaattttcagataccagcttttgagcaaagcactccaaacacttgacttcttctatgaactcagatgtcttttctcaactttcacaaatctcctgaaacattttatctacaactgtagtgctctgtttatccagagtattacatattctgttgcccatcatatctgcagttttcactgcatcaacgcacttgaccatcttcgaacttgacatttgaagtatttcatactgaattttctcttgagagctgagtttgcttttcaaggaaatattctcttcctccaatgcatgtatttggttatcatgagtttgcaaatcctgaatttttaaccctaaatcttccttaatgatagattgagaaagttggagttcattcaactccacgtttttcatgttgagatcagtttataaactggcaatggaagtcttcaaggagcaaactctgtcttgcaatctacggttttccttacttaattcagacttcttctcttccaaattttgaagaacattgcagcattctgttttcaacttcattacctctgttttcaacagcttgttctcctcttccagcaggtttattttgctaacctctgcatctttcatgtccaactcttcttgaagattgcatgatgaaatttccagcaaagaaatgtcattctgcaacttttggttttgttggtcaaggacagagatttgactggaagagcattctagagctgttttcttagatcatgctaaagatgccagggtaagccttctcaacttcgccaaagggagccattgtgtatggctggagtccaacaagtgagctaattgagagtattaagtggtgagctcaactctatacacccattagttggcttttgaatgaatcacagaagccatctcaaataactttaacatagccatgcgccccattaactaaggcaagagccgttttctgcataactgacaccttcttcaagttatttggagtcttttcctgcaggatctagcttctcatattgttcatatttccattcaatctatcattggcattgaaaattaagcgtgcaacctttacaggactgatggatggcttatcgacaaaaggatcatagtcaagaaggtaagctgccatttctttaaaacctgtcatcccaaccctcactgaacgtttcaggcctgattgctcaaaggttttccctggtgcctccaaagcagagatacctttctatggagggtaaacacaaacctttgatgatgcttcgtttaatttattggctataaagccaacgaatttcctattttcatccaccgtagttcgaataagagatacttgctcatcgtgtacatgaatatttctgttcagtaaatgagaaagtatggtaatcttggcttcagaattcaccatatccaatgctcccacattcacaactaaagggatcttcttctctatcatggcgttaaaacagaaccgtcacaagccatgacacttccaactacataatctgcaacccctgttgttgtgatgtccaaaactccctgtataaatcccccatctgacaagatcctccactatttcaattaggttcttcataatatcaccataaaactgatcatcaaattaagaagctagaacatgtgcagattcccatcataagacacagaaaccaatgcatcaaggtcctcaccaggaaaacggatacaagagtagcaagatggacgtccaaaaaatattcttctgattttcacttttctctggaatatttaacagcaggggctcattcactttgttattcttagacgatgcgattacttcattaacaccagtgactgaggtttaaaccaacagaagttattttctcttttggatgcgctgtattattgaagctggaggctgcaaatggcctaagggtggaactgcctgaagcttctcctggtgtctttgttaattgtgaatttgacacacaaaaaataggaatcgatactttctttgtgacttccttcttcttggtgacctcgagtgaagacattccaccagaaccaatgctagtagcaaccttttctgaaaccttactgttaagagatccttccactctattgttttccaatgaaatattagtcccactggaacaaggcttcgtactaaaagttgcacggtttcaagaccagaagctgtcattttctccttcaactgttttgggatctttatcacgtaaggatgggtcggccacaacacttggcaagcagtccagttttacaggttcctcattgagttcatgcatctgtgaactggaatcatccatattaggcagtgtaattttcctaagctctctgtttctaagtatcaaacacaaatttctatcagaaacaaccgtggggtttaaagaggccataattccttggttactagtgaattggatttgaaagaaacatcaagttctactggactcttttctctctcgtctaccattccataatccaaatattcaaggagatctttaactctatattgactgacactgcacaaacgagaagccccaaatcttatgttctgatcttgtatttattatcaatagaatctgtcattgttgagacaagtgaaagcctgctaggattccagcccagaattctacgaacagagaaacccagaaatagaagtaagttctaagtctcaatagatcacatccggaacccggtttaacaactttcttgccttgaagaaaaaatacccaatctgattcaacaatctgcaatcgcgtgccaaaccccacaaacagcccacattctacacagccttcgtaaagtttctacctttcatgaaatactcaatgccctcgtggtctccgtagcccaaacgccaaaggagggaagagaaataaatacatagaagcagaagacaagaaaatataatccaaaagaaggcaggagagataaagacgggtgaataggcaagccacaattcattgttttcaaaagggcttaaaaagaaacaggtagggactccagagaataagagaacgggtcttggatatcaatatcaacgacaatcccatacatcagccattaataacagagattagaaagattaaaaatagaaactgaaaacagagcatgctcatgtttaaatatattcagcaagagaaacgatcagtcctaaatctccacaacaatcaacaagataacaccgggacttgcagaataatatttaggatcatatagagatgagagaatgcaaatttcacatgaccatacctggaagaaccaatctttgagaagaattgctcggcttcaaatgagatgaggatgcgtgctgccagtccctccctttgtgcttctcctcaagacaatcccggaatcccccaaaagaatactcctttctccctctcctttctccaatgcgtccgctcaccaaaaaaaagaatctcctcccacaataaaaaaaactcctcccttttttcttcctccctcgcgtatatatatccgcctttccctaaaacctaaatctccctaaaaaaaggcgaaatctcctattttctctcttcttttctccttatccatttttaaatcttccaattcaaaagcaatcttcccaacttcaaattcccctccaaaaccttccaaggagagtcccacttcccttaaactccaatggtaagtttccttgcaaaagcatgaaattttagaagttaaataattgcatgaatagataaataagtaaataaattagaaaatggtaaaaataataaataaataaataagttaaggaaaataatataaagaggaagataaccaataaaaagtgactgataatcataaaactaaaactaaaaataaaaaaataataataaaaaaataaaaataaaaaataaaataaaaataaacaaattaacaaaaaatgggccccatgagccatgcaaacacgcaagtcatataagtcacgctaaaaaaaagttttaatagacccagtatacctaaacgggcctaaggtgagactaagtgggcctaaggtggtgcctaacgggtcaagtgtatctaaaagctatcctaaaaaaacaagaaaaacctaagtctaagttagggctgccaagggtcacaataagggatcaaataatccctcaaccaaagtctccgaggtgacttggaaaaaggtaagtggtatgagtagccatgggccaccaaggaactattgtggagcattgaaaacgaattttaaagacatgtgctaaagggacaaaattgagggtctacaatatgatcaaacaatcaaataaatgtcaagacaatcaagtatgacaccaaacagggcaatagcatgcatattcatgaaattttggaaagtgtggtggtagaaagcatacctggacagcaagctgtgcgctaaaatgagaaataaggttagctcaataataagtgtaaaacgatctcatgtatccacatagaggaagcatagtcaaacaaacaatattgaggaaaatatcatgaatgtcgggcccccaccaaagccctaattaattttgcatgaattgattctacgaattccattatttggaatcatgaagtttattcatgcttgttgaaaatcgagaaaatcatgaaaatagttgaaaatgatgaaaatgcatgccggaagggaaaatggcagcaaagagtttattaaaaaaaaaaaatctaaattttatgcctagaaactcttaaggaattttaaagaaaacttgagttattttttaaggaaaacggttttgaaattcatatttaagatgtgtaagatcacaaaaaaaaaaagaaaagaaaaagaagaagcattaggaggagtatgatgtgtggcaaggtggccactatgtgagtgaggtttggaggtgcacttgagactgcattgctgaaacagattcgtgagaagacctctgcaaatcactggtgttattctctttggatttttccttcttccttcttgtgttttctttctttgtcccatattggtctatgagttgtgcttgatattctagggccccctccataccctgggctcttccatttgatgagtccgagtcatcttcagattggataaccacgatctttgtcacatatcccaagcccattggtttgctagttggttgagtttccttgaatcctaaatacttcaatattcctccctcagtgcaatttcttgatcgttcccttgattagtactgattcttggactgatctaaccagggatctttggagaattcacagattgaaggaacagaaaaaataaaaaaaatgaagagaaaatccatcatgaagaccttgtcgtttgcaattacaccagcattttctaaagcaaagcccataggcgactgatcttttcccagaacacagtaagcattatcccatgactaggctgaactagttcctttcattattttggagtagccgaatccattgagaacaatcaagtccccaccttgaaatgatggttagcacttagcagcatatgaataaacgttgagaggtttttcaatatttcacaaaaattctcttctcgcattttattagtttcctgtgattcaaactggacatcgacaacctactcaaagtgaatatcaggattttctaggtatgacagtccttgttcttctatttggatctcattatgaagatcacctccaacaaaatttgttcttattttgaggcaacagtatcagcagcttcattgttccctctatcggacttaccaacctgtttgatatcaaatacaccatactctttccaagctgtctgtttttgtaatggatttatgaacctttgccctctgaaaaattattggcctcaattgtctttccttttaaagctatgacagtgcaatgaacttccactctagaaggtttaatttgaacaatggtttttgctgcacctagaactgtagctgaaccctcatatcaaacatcatgagttcaatatgataacgagtccaatccattcaatctgactccccgataaatttttgaactatcatcttcgtccttgtaaaaattgtttccagcatctgagccatctgtgttgccaccttcatacttagaaccatcatcatcatcttctggacccctgtgatcgttgcgagggtgattgaaagtgacgagcaggttccaggttccctttggaaattaaatacactttactagtttcaatctgattgtagagttgatcagctacagcagtgaaacatgcttccctaatttctccgccatcaactcaccagtagctacatctagtgttaaaacatcaccactgcctgttcccaacactaataacgaacattgaagcttcctttttctttgtcttgctgtccagaaacaaccatttttaaacaagtataatcgactgaaaggtgccctctttcaagtttgttgtataaattagttgcgtctgttgatatgatgtctgcaaattcaatctgaatctgaccattcaaaataccccaaatcttaatttgtgcatctccataactgatgccaaagaagtccaaagaggagccaaagattgttaacaaatcttgagaagcggagggttgatttcactgaaagtgatctacggtcccataaaaatttctggttctggtatctcaaataatgaattcctctctgaagaactggaccgagcatgctgcacttcgatcccttgattgatccatcttacaaagaagttcaagcacattctgatttgattgagcagtcctgttttagatatagaagtcaactgatctggggaaaaatcctcttttcatttcactagaatttttaggaatatgactaggaagatttagatgatccagaaaatccttgttcatgaatttttaatctcagggaaacctgcgaggacatggcctatatgaaatttccgtctttcttggaatactcaatggagagatgctaaaaagtgaacccaaaccaaagaaaacaccaccaccattagtattgagaacgaggaagccttggagacttgtagaattgttggccggttttacgtagtactaatgctggataatgatgagtaaagccttttgtaaaccgggatattgtgtagagcaataggcattacttcagaaaaacaggaaaaattaagtcacaacagtagttcgaatagaacttcaatccctgatttttccataaataatcggcaatttcagaattttccaaagttctattaaccagtgtagtcacatgaaagatggagagttgaatgagctgcttattattgatgtctactacagctgaacccatcaaagcaactacagcaaaggccatccttttctttgtcttcaagatccatttccattgcagcagcctcattaagtcttcttggtgactctaaaattcagcttactagtaaccagatggaacacacattcttctggttcaggcattcgtttctggtcagattctagcgcctatcttgaaaccccattattccaagaccgaattcatagcccgacgtagcctttcctaagaagttggagaaattgtttctttggtagaaaagctttcaagaccgtgctgaggctctgaatgttgatagctttccattacaattgacgtgagttcctcatcagtagtgtcataagagtgacttcatgagaagtttcatgctgtatcagaatcaatagcattaggggctgcttcatcacttttgcaggcagacattcatctttaagaaccaaacagctagggagcatcatcataaactaactcattaacaagaagtggacttcctgacacatcaggtaagtagatcttagatttatgttcatgaaactgaacttcagccagatgttgcacctaacatgtcatcaggcttcaagagctcctgaattccgagtttcaaaaaataattccttgaaaactgctaaatcaactggtatgacacgtatatagaagctaaatggtggagatcattaaggacaacctcatcagcagttgcgaatccatctcccactcaaatccatcgacactcttctaggacagtttgacaggctgccatttgcattcaatctgcatttcgacaatttgagaatgcgtacatgatacatctgttctgttttaacatcagtagcacatctcaatcatcttcttgtggaggtcaatggcagaattcacaacttttaaaggatcacccatcttctagtgcaatctatctgtcataagaggaataaattgtcttgcccataattcaatcaaataatttagaatacgcaattttggccagacatctccactaacagctgcaaagtctggaccaagccgtttcgaaaaccagatacctcttggtcactaattaaaccatgcctccttctacttcaaattgagaccttcctcttatatggagcagggagtcctcgttataagaccatattaactatcttcagcagggccattgccaaaattgaggaaacaccttctgattcaccatctgaagaagtgcctggatctgaatcacttgatgaagagcccgaatcaccattggaggtagtgagactactacgtccatctactcttgaaactgagaccaaaatgatcgccttgcatggtgcacgcatgagctaaaagtagatattccacaacatcgtttctcagttcagaaagtaaggttcggaattcaacatcagaagctttaaagtccagaatgattgaatgaacatgaggttggatcaaacggatggcttaagagaaacatctcattccaggaataattgtcccaacaactcaaccaaaagagcagcagatgtcttccttctcattgatggcttctttgaacttcttctgacacagggcctctctatctttatcctcccaaaaattataacccttatgaaacatttgtaaacagtcaccagaaaactaggaggaaggataaaaaaaaacatgtatagtggagaacagagaaaacaagaagataacaaacaggcataatagaaatcaaataaagccacatctcatgatctttcaatgggctcgggctagtggaaaagatcacaaacagattctgggcaaacaagttagcaaccaatctcaataaaacaatctgtggccctttccgtccacaccaatcaacaagataataccgggatttgcaaaaaaaagaaaaacaatgtagaatcaaatagagatgagaagatgtgagtttcatgtaactgtacctggaagaacctgcttttgagaagtattgctcgacttcaagtgagatcggttccctttctccaaaatcccccaaagaccggtggacaccaattctttttcttctcatcgaaagccatgaaaaatctttcctttctccctctgttctcagtgcgtgctgccagtcccccttttctccctcttgtgcacctttccactctgacgatcccagaaatcccctccaaaaccttccaaggagagtcccactttccttaaactccaatggtaagtttcaaaaagcatgaaattttagaagttaaataattgaatgaatagataaataagtaaaaaaaaaaaaaaaaaaccagaaaatggtaaaaataataaataaataaataagttaaggaaaataatataaagagaaagataaccaataaaaagtgaatgataatcataaaactaaaactaaaaataaaataaaaaataaataaataaaaataaacaaattaacaacaattgggccccacgagtcatgcaaacacgcaagtcatataagtcacgctaaaaaaaatcgtaatagacccaatgtacctaaacgggcctaaggtgagactaagtgggcctagggtggtgccttatgggccaagtgtatctaaataggcctaaggtgtttaaatgggcctagggtgcctaagtgggcctaattaggctaccctaaaagctatcctaaaaaaagaaagaaaaccctaagtctaaatcaggcctgctaagggtcacaataagggatcaagtaattcctcaatcaaaatctccaaggtgacagaaaaggtaagtagtatgagtagcaatgggccaccagggaactactatggagcattgaaaacgaattttaaagacatgtgctaaagggacaaaattgagggtctatagtatgtaaatttgtatatgttattttcctattataaaagacttttctttcatatttttaaatgaaattgaaaattttaattactaaatatcaatattttaaaaggctattaaaagcttatgccttgagttgtgactctttgaattagccttaaggctatagcatcggttagggtaattgaggctcaagcctcatcttgttctagttcacatccttgaggcttaaagttcaagcctcatcctattctagtttacatccttgaggcttaagcctcaaatattcaaaaggttttaatgggttagaggttattctatacttttggtgtatgttttataagaggcttaagcctcaatataattcaatgagttttaatgagccctatgattttgtagatttttggtataggttttataaattttatcatggatctaggcttagtttaaaccttttataaaatggcttagttaactttaaattaaccttttaaatgtaggggtaagagggagattaagagtaagaaataggataattgttggttgctttagtggctaagctcatatataattattatcttattattattgattgagaaggacaaatatcactacaattgatggatgaaaaagaatgggtagacaaccatccattgatggggaggatagaataagaggctcctacaagtgataatgatgatagtgttgaagactatttaatgaagttgtgggaaagttgaattttagtagagagaaagaggaattcaattagaaactattcaaaatgacaaacaattactttttttttacaataaaatttaaagttttcttattatttaatttttatgtgattatattagtgttttttttttttttgagaatttattattatttatttatttgtttaagttgaagcttgtacctcattccacctcgaggcttatgcctccccttatttgggtaaaacacctcaggattatttttaaccttttaaaacattactaaatatgctaacaaatgtgctgaatatgtagtattcagcattccattgtgtaatattaaacaacccacaagctaggtttagaggaaaaggaaactctattaagcttttagatgaaaaagtaaaatttcatctagtcaacagggaaaaaagattgtttgctagagggctatgatatatgttcaattttattttattttttttaagttatgtgttttgcatggacaaaacctgttgcattcatcttgtggctggcatttcagtgaaatcatagatatactctgcaaaatccacaactttctgaaccaatactgctacttgtgcattaatcatagaaataacccaactaatacttattatgtaacgtcgctaattaaaaaataaaggatggtattcttattgctttatatccgaagatgcctccttccatggaattaaagtgaaatagaattatactgcttttatcctatagttttttaagtttatgagttgcatcgttactactagcttgtaatgtgtgcttatgtggtgcctgttagcattgttaatcactagattcatctatgatttttagagaataatttgttttgttctcaatgaagtcaagaaaattcagtatatgtttctctctctttttcctaaatgcaggt

SEQ ID NO: 13320 - DNA, 2630 bp, Vitis vinifera
  Intron number 1 from transcript GSVIVT01031002001 (locus G SVIVG01031002001) derived from phytozome v7.0 (chr-ID chr1 4; pos 20674967 to 20677596 reverse strand)
tacctaaaggtacgcttttatctattcctttctaattgctgtagaattttttgtctgttccacgacaaatttctgaactttttttttgtttttttgttttttttttgtgtgtttgaaatgtgtgtatgtgtgtgtgttcggaatcaggtgggttttgtttagtttttaagttggttcttgatctgcatttaattttttaagttaatttatgggtacatttttatctctctctttttcctctttaaatcttaggtgtttcatgggtatattgctgcgtttggattttcttgtcaatgtttggcgagatggtttttgttttatagttaatttcgatttctgtttgtttgtattttagcggattggacgccctctttatatctatctgaatatgtagtcgttgaattatttgtttcccttgggaatatttcttttgaactgcatgattctgaattggttctgttaagttgttgaatagcaaaaaaatgaacatgttatgagtggatgtaacaattgtttcacttttatttttgttttaagatgtttgacctcagatggggtgttatatcttcttgtttggtcactgagttttagtttttcctttcattctctgcttggttgctgaaaatgtagaaagaaattaaaattttgaatcctgaaattttattgttttccaccccagtaaatggatgcataccctgactgagtttaatacaatttggctaaggtgagttgagcttcttaattttggaaacagagaagctcaaaattatgggtcaattattttgttcttttcttattgtccaatttctctgcaactaaatgaaaagctattttagttgattggtaaattatgagtatgatttgttggttttcctaacaagcacttaataaagataattaattaactctcccaggacaattgtaaggctgtgcaaatctctttttttccatgaggcattgaagaagggcaaacaattcggtgctaccagagttttctcacttcataatggtgatttcatcaatgtcctattgatgccatcaattacccttaaattagccagctgctgaagaaatcaccattatgaaggaccaacatcctcatgaggacttcaattgtctgatccgcatgaggacttcaattaggacttcaattgattgatacaagaaatatgtatctactagtttgttcttcttcttaagcatgtcatagtaagtaaccttcttcggctaccacctaggctattgtgatggaactggcagcccaattagctttagcagaaaatgattagaaatgtaaatctccttattctagataaggatatatgctattatttcttgtggcgtattatattctacataaatatatggttcaccactggaataaaggcaggaggaaaacatatttcattgctatgtttggtattaaaaaaagttacaaatatattcatacctatgtttggtattttaaaaaatccatcttcaacgtcacttggagaccacccctcagctttgtttctaatgaatctttttattcttcattaataagtaaaataaaatattcataaatcattttataaattatgtaatatattaaatatatgaaattatttgctgtgtacatataacttatctaaaatttaagataaatataattattttcctttttagatttgaaatttaatttcttgagctcccaattttttgcatcacagaataatcaaatgagagaaaaaatagcttgaagaagtggacagttgtggagaaaggagaattataatagacatgacatgtatcctcatctatctaatgagacgtcaaatccaaaaggggaaatgagaaagccttgggtaaattatcctgcccacttatcctatcccattctcaaccaaatgtgggaataacattctttatcctatccaatgttcttagcctacataccatacatggccttaaggttataggctagagccattggatttaagggaatatcaaattggaaatagggatgtctctgacccaaacaaggtgccacagaccaacaagcactgcttttgaaggattatctccataatttgtgacctaagaattaagtgatattattttagaaacattattcccttgataagttaacaattttaaaaacccattctgatgttggacatagatatcctgaagttatacaatgaacctacaaaaaggatttaattgcacatgcttttggatagttaaaacatgaaatgaagctgtgttgttttgtgtaaattctgtgtttttagatcatacagcaataaagttaactgaattaattctttttttttttttgatcagattaactgaactaattctaattgcagaaaagatgaattatctaaacatgaaggacagaagggttactttacaagaaatttagcatatatcatgctcaggaaacgagccttgaaagctattactaaagcactgctgtttgaatataagatttaggaatttttggaagccaaattgaaggctggaaatttatggagtcaagcttgtattatacttcatagcatgatgatatatagaaaaagaaatattctacccgactctatgttgaaatatttgtttgatctgttttaatacttttgttacag

SEQ ID NO: 13321 - DNA, 3002 bp, Vitis vinifera
  Intron number 5 from transcript GSVIVT01001389001 (locus G SVIVG01001389001) derived from phytozome v7.0 (chr-ID chr1 3; pos 24149960 to 24152961 reverse strand)
gcaggtgtgttagggattttcttttttcgtgaagcttcaagtttgaaacaaatattgaagaggagtcgaggaggattgaacctaagtgctcacattttggatgcagatagttgccatattctaatggtactggcaaggtcatgctctgtttttatttggcagtatgcctaaaccaagtgaaccacttgataactatggaaaaccatggatgcttaggtttttgtcactttctgggtctatgttctcttatacaagcatggagtaaagtagggatgtattgtgctttggcagtaagaaattttaattgctttggtcttttcttgctgctattccctttccagtgtattaaaagtggagatttaactctgcaatatacaaaattgcaagttttatgactgcatatcctttcaatgtcttatttttcactaaaacaaaaaagttttctttgttttggttcatgttctcaataacctaaaaacatcttattgttttatattttggtttagcagcctgcattcattgattgggagtctctgtaataaaagctggtctattttgcattgacccagtggaccaccttttaaaggtaggcagatgggcttgaagtttggtaggaagttttgttcctgttttggcatttcttaggtattgtgacgaggaatttttgtcttcatagagatgatcattgagatgaatgtcatggttatgggtcataagagaagacctaaatcttttggtgctagcttctcattagcagaattctcattgccatgtctgcagtacttgtgtcattgactatggggatttattctttgatgaattaggaaagattagaaactaagagaaccatgtttgtgacatgtaaaaaaagtaaagggaaaaaatttagatcctttttaaaaaaaatattatttctcatttttcttcattaataaaaatatatgtaatttagtatttgagatttcactctcattcaaacatatgattttaaattctcatgtaggtttcctttttttcatttctttgatacttctagtattacaaatgaaggataagataattagatgtgaaaagtcaataaattgtttttatatcatattttaaactcattttacttatttaactcttttatataaaaattaaataacttgaaaatatataaatttttttactaattttaattatatttgactttctttcatattcttaatagtaaaatcaaacaggagaaaattaatttttttttaacatttttttttggaacactttatgagaaccaagtatgactttaatataaaggattacttttaatataaatttatatttagttcctgaaaattatcaagaaaagaagaaaatgttaagaaaaatgattttatcattttttattatatcatataaaatatggaaaaaaatatatgaaaaaaagtcaaatgtaattaaaatgattaagaaaattatatatttttaaattatttaatcttatatcaaagaattaatatatatgtaaaatgaatttattaattttaaatcattttttttctttgcaatgtttttttttttttttttttgtcttacgatcttccttcaaactttctatgaaccaaccaaacatagcataaatgattgttttttcacaaaagtaaagaaaagaaaaaaaaccatctctctctctctctctctctctctctctctctctctctctctctctctctctctctctctctctctctctctctctctctctctctctctctctctctctctctctctctctctctctctctgtgaggctttaagcagccccatgagccttctatgacttatttcatctttcaatttaatctggcgtgtgtgtgtacatgagaggcacaactctctcgataaaactaaatgaatctcatgcgcatggcttattctatttttttattttttgaatctcgtgtatatggaaggaagtgaggaggatattattgatttaagtaggcatcttataataatctttgcaatgctcttttgtttattatgattaaacaatactaaataatcttaccaatccatcctttggtttattattcaatttattttcaagttatttagcctattttttatttgcttgacaaatgctcagaaaagaaaaaaaataaaaattgagaaaaatgattttttttttttatatatttaatttatgtgaaatttttttgaattgaataatgatgttgttaaggaatcttgcaaggtggcttcaagattggaaagtgaaggtggtgatgatgtaattatgagaagttttatgactgctatagctagagaaggcaataataaggttatttaattaagatttatttttgtcatataaaaattcttaattcagttgaatttacataaacattcaaatatagacaatcttttattatgattaaaatcgactaaagaactacaaaatcgatcaaattgaatgaaattcattatcggttgtacaaaaccaaggatatccaagtaggtatagaactaatgcgagtaaaaggtatatatgcctttgacaaaagccaattaaggtgaaatttcttttctccttttttttttttttggggggttaggagtttcacaattacatcattatgaaaacatagaaaatgacaattttcatactttaattcataaactaccgagttattttttttaacaaaaatgctaattgttaaaaataattttaatattttcaagttaagagcttgaataattattttgcaatggtaaataaaatacaatattctaaagagcaaatctagaaaaaattgaagacctagatcaatgtcaaaagatctgccccaactccaccaattgattcaccaatatattaaaaacaaaaaaataaaaaatcaatactaacaattgaaaaaaacatgcatgaagttatagataaaattatatatggatttgaaaaagataagagtcattaataaacataacatgagttttatgctcgagggtgacagacc

SEQ ID NO: 13322 - DNA, 1443 bp, Vitis vinifera
  Intron number 4 from transcript GSVIVT01008609001 (locus G SVIVG01008609001) derived from phytozome v7.0 (chr-ID chr1 7; pos 437734 to 439176)
ttgtccttttacgaggttgcggtatttgcattgaggtttgttgtctcagcccttaaatgatgtctcattctttttccaaatgttgtatcacttaggtaagttgttagtgtactagcataggctagattaagctggtaaatttgttccaaaagcacttgatccaatgcactacttcttgttaatgaactagcatggctagattaagttgataatttcattccaaaagcatttgatccaatacaccacttctaaggaactaattagcttcaaaagaaagattgaagattcaaggaagtaaagcaaattaaggaaagtatgcagttttggatttggttaaataatggaaaaattaataattgaatttgatgtaaaaagaagtttaaaaatctcctattcttattggttctcacttcctgactttattatacttcctattgtattctaattggggttttgtgcttataaaaagaaaattatttttcaaaaccctttagaaggaaggacacacattaaaaaaaattattattttgccattacttcaccattgtccctaaattctcaaaaatctttctagttcgaaacttgaaagtacttttggtgaaaagcattggtaggttgacctcgtcacttaaaggagttggagttgaggtattcactaaggagcatgaggtatactatatggacatgaaagtaaactgtaggtactgcctaaagttcacttggaagtcggttgcttctaagtcaagtaaatctgtgtacttgcttttcatatttagtggatttgttttgcaatttgctgagacccgtgattttacacctgtagaaatttctgtaggatgtttccgtgtattattatgattggttcctctatattcctgatatgaataaagtgttccataataataattcttaaagttagatttggaattaatcaaaatttcatatttctagatttcacagaaattgaattgaaaaattgaaaaattgagaaatcaagaaactggatttggaccatataaattggacaaccctatttacacccctctggttagtttctgtaaataaagaatgagcttacataaatccaactataagcattttgacaaattggcatgcactttctccatactattaggtagcaacaatactgatgtgtctactgttgggctatgatcgtgtagctttgtatctttagatgtacaaatatatgcttttaaatttcgaagaaagaataaaaatttctcacaaaaacatttgaacctaaaagggcacctggtaacattctgtgtaactttggatgtatacgtatacatttctaaaattggacaaggagggtgaactctcagaactgtttggagataagaggatcaatttgcagtgcatttttggtttctttattcttttgaaatattttttttcaggttcctccgtttgaaaagaaac

SEQ ID NO: 13323 - DNA, 3447 bp, Vitis vinifera
  Intron number 1 from transcript GSVIVT01033398001 (locus G SVIVG01033398001) derived from phytozome v7.0 (chr-ID chr8 ; pos 20962265 to 20965711)
aagaagacaaaagttaaatgtatttacaagtacaaatttacaaaaaataaaaatgaatctaataacttcatcagtagaaaaataaataaatttcacttcttctaagaattgaataaatattttttttttattttttttttctttggattgaatacattggaatagtttgctagataaatcatgttccgatattttaaataatatgtcgttattccatttagtgaacaaatactcgaggaaggaagatttaaatgaaaaaaaaaatagatgacgtaatacattaaacactatatgataattttgtcgtattgggataagagtatgatcatatttcaggtaccattcatgtgagtaatgaaactaataccgtctatttcatgatcgtatttttgtcgcatatttcatgattttaaatattatgttgatactcatgtgagtgaaaaaatatattataatagactatattatagacgatcattctgtcatattatgataaaaacaaaattgtcttatatacataattcatatgagtaatgaaattgatatcgtctattttggttttattttattttattttcttaataatcaaaatagtcaaatgtcgaatgtttcgatgttccgatttccttcattttgaagttaccctcgaaacactaatgagaaaaaaataatattaatgaaaaataaaaaataataataaaacgttcaaatagatttgtatttgttgtcacattaatgatatgcaaataaatatacttttattattagtactaaatatcaatctcttattttaaaatacataaagaatacgactaagacaattcttaataaatatcaatcattgatgcacatagtatgtcactcatcttttgacttgttttcttataatatatgatatatttttaacaaacatttatagcttaaaacgtgttttaaaaaattaagcatttgacagaatttagaaaacacgtttaaaaaagttaaaaaatcatttatcatgcttttgaaaaaacatttgataagtgattatccaaaaaataattataaaaatctacatatctaagactaactttttatatgtcttatatgatcccgatatgaatttaagtcaataaagataagaaatttaataacaaaacttttaatttgattttcatccaccattacattaattgaatagggatttatacttgttgatgatatcatatgtttaaaaacttagtaaagtaatacactcaactaaggcaatcttcgataaatatttaccattcaagtatttcttacatgtattcattttacttatttttttatacaacatgattaaatgccattcactctttctttgctctctgaatattttttttttttttaattttactcgatagatttcctcaagtcaaaacggacaaattctcgtcaaataaaataaattttatttgttagcatttatatccctttatacttttgcattgaaaaaacaaaaatagttttagtagtaatgatataagcatgttataaatgtcactagtaattttgtttttatatgacattctcatgcaattcaaatcttcgatattaattatataaacatgtttgaattatcatttaccattttgtttttatatgatgcacatcttcaatattaataatacatctacaattttgtttttgcattgctcttgcgatatgcacatctttaatattaattatacaaatatgttataactatcgtatataatttgtttttacgtgattcaaaacacacacacacatagttggggtaccaaagtcatttgcttaattcataaaattaaataatctaaatacttcggggatatttggtagaacttaatacttattatttaatgacttaagtcgattttaagttatattatatttaagttgttgacttaaaacttatcacttaatttttactttgagtattaagattatctgataaaattaacttaaaattaattataaatcatcacattgacatatttatgattgtaaattataattaaggtaaaaaatatcgagtaacagtgaaagtcatggaatagttaaggagcgtgaaggtaattagggcaaataaaggtaaagatgtaaaataaaaattaagacttaattatttttactattatttaaagttgtttttaactttaagtaatactattaaattattttactaaatatactcgatttacttaatgacttaaattaagttattaaactggtttaccaaacacccacttactaatagtcaaatatagaatatttcaattttataatttctttaacttcaaaattactttcaaacaaccataagaaaaaaagtaatattgatgaaaataaaaaattaatgataaaacttttaattagacttgtatttgttatcacattaatgaaagacggataaatatacttttattattaatattaaatatcaaaaatttatttgaaaataaataaaggacttaacaaagtctgcacatttgttgtgtctttttgctattatcaataactagttgtaagtgtcctaaaactttaaataatatgttggtattttggctaatgaaaaagtattggaagaatgaagatttggttggaaaagatcaatcaacataatatgctaaacaacatagggtaacattgtcatgtttggataagagcaaaatcatctttctgtacatgtaagtaataaaattgatacatatctatttcatgatagtatattttgtcgcatgtttcgtagtttaaaatatcatgtcgatattacgagcaatgaaaataatattttataatagactatatcacaaatagtcattttattgtatcatgataagagcaaaattgtcatacatacatgatttatgggataataaagttgatatcgactattttagtttattcttatttttttatttttttaacaattaaaatagtttaatgtcgaatagtatagttttcagttttcttgacttgaagtcacctcccaccgctaatgaaaaaagagtaatatcaataaaaggaaaaaaactaatgattttcaactagatttgtatttgttatcacataaataagacacaaataaatatacttttattattaatacttaattttaattttttattttgaagtaaatggagcatccaaccaagacaattctcaataaataccaattattgaagcaattcatacattcatcttcttttgacttatattgaaaacatatttttattcatctttttgataaatgatgattatttttagataagtatttgaaatttgtattttataaatttagatttatattgaaaacatatatatttttttaattttcttaagaatttggaataaatattcggtggaatagaaaataaataaaaaaattgagcattacatatatataatttggaccgaccaaacgcagcagcattgcgtaag

SEQ ID NO: 13324 - DNA, 1362 bp, Vitis vinifera
  Intron number 8 from transcript GSVIVT01007682001 (locus G SVIVG01007682001) derived from phytozome v7.0 (chr-ID chr1 7; pos 10484883 to 10486244 reverse strand)
ctgtgctacaggatccaaagtctgcatctgacaaggtaattttcagctgtgcaatgtagaattttggagtttgacactgaaatagtaccaatcttgtatggtcatatgcccctagtgttcaaatgccttctaagaaaaaagaatatagagaaccatatgtgataattgtatatgaaacatctctttgcacaacccatccaattgctttcaactttccaaatatgtgttatgattgataacagagggcaattggccttgataacaggaaaatagatgttgattaattataatcaaggatgaaaatattaaaagtttgtttgataaaaaaaatatattaaaagtttgattttatggaaatatcggaaatatcatatggaaattctataaaaaaatttggtgagatgaaagttaatcaaaactgatgaaaatgttggaaaaaaaacaaatgctaaaaaaatgataaaatgagcaataatacacatactataaaaaataaataaataaataattatagttaatctttctaaaaaaaaccaatatatatgataaaatttgtgatgttggacaattatatgatgtgcattgataagaaatatgaattttgaaagtgttatacttaatgttaatgtaaagataaaaaaaatttaaaattttttaacacaatatatatagatatatattgtaaccatatatatagtaaaattaaacctaccaatgaaattattaattttattgaagcatttttattatattttgagtaaaaaattaagtcatttgaaatttttaatcaagattttatataaaatattttatttgaaacttcattttaaaaatctctttaaaaaatttatttgacaattttttttttttttttgctaatttgtttaaattgttaaaatattgaaagttgtatttctaatttatcgtataaaattatttttgtttaaaacttattttataatatattaaaagaatttatttttatttttattttttgatattttagtcatttgccaatagttctaagacttatattttataatataataaaaagttactttttatttttattttctttatgttttagtcgtttgctagtaaccttaactttttaaatttttaaaataaaaaattttaaaaaatagaaaaataaaaataaataaaaagttaaagttgactttgcaggccatgttctttgaatgcttgaaagtttgcacaatcataaattatcatcacattgaactctataatttattctgtggaatatatgtattgtctcacaatctgccttgttttccttttaaattatctcctgttttattgccagcataaaagccacgtgtatagggatagagctgcaga

SEQ ID NO: 13325 - DNA, 8521 bp, Vitis vinifera
  Intron number 1 from transcript GSVIVT01034617001 (locus G SVIVG01034617001) derived from phytozome v7.0 (chr-ID chr1 3; pos 14223841 to 14232361 reverse strand)
ctgagacaaaggcagtaaaaaggttagaatctgaatgtatgcttgtgtcttcaattgctcaatctccttaatggtaacaatgtgatattttgcttcttgtcgtaccttctgatgtgtatagtttatttttttatagatgtcagctgtactagcattttgttgaaatttcatagttgtgcaattttttgctgtgccaagattgcttttgttctatgtgctcataattctgattgtggtgataaaagaaaattcttggttgaatagatgcaacgtaaagatctcaaatcatttctaaaatgtttatttttgtggaacaattcttttatcatgttcaaactgatgttgcttagttattaacttattgttagctcagcaatggtgtcctttggccattaactagagataccgaagttgagcctccccagttatttaagtggtttaggatagaggggtggatccatattgtcaagttttgctaaacataacttgataagatttgttagaagattgtggcaagtatgttatctaagttgtggagaacatgattagtcataaacaaccattaggaaggtgtaatgtatggattctagcataagtcatggttaattgtatgcattgcaaaaacctttttatcctttgaggatatattggttaagttacttagttaatcacatgaacgttatagtagtgagaaactaatggaaagttgtgaccccaatcatatatcatgtgtcttcgtggaagttgatgtagacaccttagcttctatgtccctttgagcaatattttgctggaaacctagctttaggtgggaaacctgctcttgaagattggactaagctttgttaagtttaggggaaatttatggcaagtaggtgaaatttttaggaggttagagaaaacatatttggaaacattttgttacttgttgagttttctggaaacattatggtatgtgtgtgtgtatatatatatatatatatatatatttatttatttatatttctcaagtcaataattcagaattttttttttagtttctctagtttatttcctaaatttttacattttgatttaccatataatttatttatttatttatttttttactatttgtgaacgcaatttaaagttatgaaaggggagtgttgattggcactaaaattgaattatcctaactatttttgcactaaattagaataaaactaattcctaaactttaaaaatcttcaacactccccctcaagttagtttgaagatatctatcatccccaacttgttaattaagcaattaaacattcctttataaagtcccttaattagaacatttgctaactgttcttcaataggcacataaggcattatagttaaaacatttgctaactttttttcaataggtacataaggcatgcagatcaatcctacttctagcttctccttgatgaagtgacgattcacttcaacatgcttagttttattatgttaaactggattatgagctaaattaatagctggcttgttatcacagtagtgtttcattggcttctcattatgaattcttaggtctttaagcagtttcttcaaccaaagaagtttgcaattaccttgggcaataaataaccctgaatttagcttcaacaatgcttcttgcaacgatagactacttcttgctcctcaaagtgattaggtttcctcctacagaagaacagtaacttgaagtagtcaactcaatttgcttggtgtaggcttcaatctgaaggctattgttggtcctaaacattaagccttttcttgaacttccttgtaggtacttaatagcttgataaactgccttaaggtgttcttcaattagagagtgcataaattggcttacaacactcattgaatgagctatatttggtcgactatgagagggatatatcagttttcccacaagcttctgataacgttttctgtcaatacacttgctctttttttagtgatcctaatttcctccaagtaggatcaattggagccttcgttggtttataccataacaatccagtttctttgtgcaaatctggtgtatacttcctttgatctagtaaactcgattcccaagtatcttagggttcccagatccttgatttcaaactctttggccaaattttttttcactctctctaattcagctagattactctaataaggatgatatcattcacgcacactattaatatagcaaacttaccatctctagaatgattgtagaagagagtatgatctgcttagctttgtgagtttctgcagcttctaatggacttagcaaatttgtcaaaccaagctcttggtaactatttcagtccatagagtgattttttaagtcttttcacttccaaatctcctttcataacttggaggcaaggctatatgaacctcttcctctaatacaatatttagaaaaggcattcttgacatgtaattgtgtgaagactagttcaagttggttgcaagggataagaaaactcttaactatatttagttttgcaacttgtgcaaatgtctcttaatagttaatcccatatatctatgtgaagccttttgcgactagtctggctttgttcctctcagtggattatttgcattgtacaactcatgggtttcttacctcttagtgcatccacaagttgccatctccctttattctcaggtgccctcatttctttcaaagtaacttgcttccactttgtaacaatcatagcctcttgtatatcctttggaatttcaacattggacgtagtagtagtaaacaccctcatagtgggagaaagtctatgacatgagatacgtttagcaatagaatgtttagtgcaaaccctagtacttttttttaacaacatttagatcatcattaaaggtattttctgcattagaattatcagaggaaaagatttagaagctggaataacaaatgaagaagatctaggagctggtcggatgtgatatttagtgagttgtaggaggaggattttccatactttgatctttcttcctccttgagtgaacacaaagtttgatgcaaggctgttcaagtcatagttgtgaaaggggtgttttaggcacgcctaggtgcaagacgacacaacgagaaacttcggcgcctcactttactctaggtgccgcttgttgaaggaggtgttgcttaggcacaaaaggtgcttgccttacttcttttgataaaaaaaataaatagaagaagaggagaagatagaggaggtgctgcttaggcactcaccttccttccttccttcctccttctttctttttcttcttcttttgataaaaaaataaaaagaagatttcttcttcttccttcttccttgaaaaaattaaaaaggagagatcttctttttccttcttcttccttgaaaaaaattaaaaagaagaagagaagaagagtcttcttcttcttttgacccaaataaaaccaaaaaagaaaaaaaaaaaggaaaagaaaaaggaagaagaagagaattcttcttcttcttcttttgacccaaataaaaccaaaaaagaaaaaaaaaaaggaaaagaaaaaggaagaagaagagaattcttcttcttcttcttttgacccaaataaaaccacaaaataaaaaactaaaaagaagaagataagaagatgacttcttcttcttaaaataaaaaaaagagaagaagaagagttcttctctaggggattattgtgggacatgatgttattcaaatatctaggggattattgtgggggctatgttgtagtggacgaagacactgcaaggtgtcagaatcttcaatgggcaagagttcttatgaggtcaaatggcaagaagcttctaggctcttttcaagctgtggtggggtccctttgctagttgatttagttgcagtgggagacctcgccttaggtttctcaaatctcatccatgacaggtgagcagtagcaagaggttaggatggagtaagaaggtggtggtggtggttcacgtgctttaaagggcgtgagtgagaaggcttggattagctgtagatggtcagagggcatgttaagcttgggggacttgaggggtatgatagtgggagggtagttgatggctctgaaaaggccttaactctaggcctaggtgtcaatgggggtaggcctggagtcactagtacattgcgtgctgggtgcatgtctttgaaccttgggcttcggaaggaggctcattgcaagctgaataaggaagctgtcttgggccggggctgtttgggtctaaggaaggatggtgcagtcaacaattctttagttcatgaatttggtggattgagcttgccccaatgttccattttaagggattgggcctcttctagttctaaggggcctaagggttgcttaagcccttctcatgtgaagggagatcgcgatgagggttgtgagaaggcttccctgtgcagtaaggaagttaaaaaagcgacgtttctagatctgagtttgtctctaaatgttctcgatggcacaaggttgggttgcaaagatgactcccgtcttcttttggtccgctcttctttgaacctagaggagagagtgccttcggttgatgccactctcttatttgaagtgggtaagcctttgtcttttgttggtctgttttaagggagggggagggtctctttctttggtttctcccttgtctaaagatgatgagggcttttctttagagagaagggaacatgatgtgggtcccttagtagagggcaagggtgacatttgtaggcttctatgtgtgatttctagcgagggcttggaggtggaatccctagagaatcagcccaaggattccaagatggtgaacctagaagtttgtagtgacgagggggtttcggggtttaggtgtcctaataggggtccgttggctgtggagagcctttctgatccattgtttaaaaaattcatatcttttagcaagttagtgggtttgccggtggatggccatgagaaagaaattgcttccctgttgagaaagatggagtccataaagggccgcagagtttcagtagtgaagagaaggccatcctccacaccttgctttattagggagctttgtaatttggaatgctcgatcaattaccgcaattcaaacaaggagaagagcccgagcaatgggtgggacatggtttgtaagtgacactattcattgtgtttttggggttcctagtggttggattagaagctaggagtgggttttttgtattcatgagagggttgagggtggtggttccgggggggcaagttgctatgtttggggtttttaggtttagcaaggctttagggtgaaacctttagttttgagtgttggtttgttgtttctctttctctttgcttgttttcggttgctacttgtatactccgtgtgtacgttgtgcgcttttaatatatttgctttgtttacttatcagaaaaaaaaaaaagaagagaagaagaattcttcttctccttaaaagaaaaagagaagaagagtaaaaaaataaaaaaaaaataaaaaaaaaagaagaagagaagaagaagacgtacctttccaatccctttgttttgcctacacacaagaagaatcttcttcctcttcttttgacccaattaaacaaccccccccaccccccaaaaaaaaaaagaaaaaaaaaaaaagaaagagaaaaagaagacgtacattttcgggccgtttgttttgcgtcctttgttgattagattgaaattttggataatatttgatgatatatgtgcttatgacaaataaatggttattaaatttaattgtattatataaaatcatatatgtaaatttgggcctgcctcactaaagcccgtgccttagttgcgctttgcgccttaggctccaggaggactttgtgccttagatgtgccttgcgccttttaaaactatggttcaagtagtgtttccctccttgaatttgaatttagcatatgcatgagtagtgaacctgaacttttccaaaaagaatcttcacctaaagagaatttttggtaaagaaggtgttttcaaagaaagtaacagtcagactcaagattttttagaaacaagatcataatatttattccccttttaagttgggaaataaccaaaaagcacacatttgacataccggttaagtttagaatagtattttgtttttggatatgaacaaatgctatacactcaaagacttttaatgggagagttaagaattctggtttggggagaacattttaagaatcgttgcaatggggtttgaattgaaccatgattctcactgaatattatgaccttttccttctttgaattactctaagatgaggtaaatacacatttgcatttaatgcaagatagaaacgcacttttataatcatgttgctgacaatctcattatcagtttatgtggaatagattcaatgtatcttcatgagctttcagaggaattgtgaatttatgtttccaaggggcttaaaagagaacaatgtatcctcttgtgctttcagaagaattgtgaatttatgtttccaagggcctaaaagagaacaatgtatcctcttgagctttaagaagaattatgaatttatgtttccaaggggcctaaaagagaacttattctcggaggatgattccagatttaaataatcactgcactgttcaaggcaattgcaaccagaacctgtgtgaaactgaactttgctacatttcgtagacttgtcttaaccaagcctctttatagtatggggaagttatgcttttcgcaggttgagtggatgataggttattgtatgggattatcaaaagcctggcacgaccttcactgttatggacaaatgatggttgtggaggctgtagtatgtcacaacaaataacttgggaatctatccacccatatgaagactcattgcaggtcttacaagtgactcaagaaccaagagaatgatgaatagttttagtatggttatcaccagctgttactggatgcttaaatactttgggttcatccctatttgtctaagctttagtgttgtgatatgggaaaatgaggatgaatagcatgaaaacaaggtatttcataaatattgtttactgtttattgggtgggaacttgagagatctcagatgaaaaggatgaaaaaaatcatctggagagaaaattggaactgaaattagggtgcaggaaaacctactggatgaaattgtaatatttatctgttgaaaagttttgggctgtgtttggaaactgtacttcagaatattttttttatttttgagaacaaagaaacataaaaacatgtttcgttatcaattattccaaaataggtttttgagaattgttatgaaaatagaatgttttttgagaacagattttagttgttttcacttgttttctaggtactgatttgaaaaataattatacaaatatgaataataattaaaaacaaaacattatggataaaagttatttttaggaagtatttgaaaatactgaaaacaggttaaaaacattctaaagttgcaaatatactttgttttagaaaacatcataaaattggtttttgagagaactcttttcgaaaacattcccaaatagggccttaatatatatattttttatagtggatggttaaatttagaagtatctaatggtagaaggatggcaaaaaatcattataactgaaggctttgaaaatattaacaagtcatatcacagctagctgggctttggggaaaatgtggtttagcctgtggagaggcttcaaaataagaaatcaagctggttttaaatgaagtatgaggagttgaaatgatagattcagggtgggtggaggagaaactttggaccaaatggatatataactttttttggttgtgccagttacagaatttggtcctgcttgttcatgatgattcacactttatatggatctccattgttgaaagtgcttgctaaattttccttattcagtgaatctttctggcttcactgggaaattatcaggggaaaaagaaagaaaactaggatactgtatgtatcattattttctttttctttaagctacattgagatttataaacatattaagacaaagtggccattaaaagtaatctttctccatttcttttccttccagaattgatggttcatgcttacaatatacttctagtgagtcagaatcctgcctgtactgttgacatgtgctttgttacctgaaatattatttcatatttcatagctatgaaaagactgctcaaatgcatccacaccctcactttattgttttgttttgtttgtttttttttttttctttaattttcatttttattttatgtagatgaatctagaagttatgatctttaaacactcattattctattcatatctcttccattttcagtcatgcctccacactctttatgcacttttttagatgaatggttttgatgactactttacaggcattctgggcagcgctcaagggttcgtaaactcc

SEQ ID NO: 13326 - DNA, 14635 bp, Vitis vinifera
  Intron number 1 from transcript GSVIVT01015998001 (locus G SVIVG01015998001) derived from phytozome v7.0 (chr-ID chr9 ; pos 17125261 to 17139895)
tcaaagatcaaaatttattttaattatttaggttagtttatatatatatatatcattttttaaaattttattattagttaaataagttttaaattaagcaagatttaatgcattagattcaataagagcttagtaattttttaaaataatttaaaattcaaatagtaaaccaattaattcaaaaaacttagggataaaaattggtttagaacaactttattatttctctttcacatagaatccttatttcttaattttttttcttaagcaaatgaactccaaattaaataagacttaatgcttcgattcattaatgagtttagtaattttaaaaattaatttaaaactcaaataatgaactaattaatactagaaatttatgaacaaaaattggtttagaaccactttattgtttgtcttttacatagaatccttattccccaacttttttcactacaaatgaattccaaattaaataaaacttaatgcattggattcattaacgagtttagtaatttttaaaattaatctaaaacttaaataataatataatcaatactagaaatttatgaaaaaaatggtttaaaataactcagtgtttttattttacatagaattattattttctatttttttaactaagcaaataagcttcaaattaaatgagacttaatgtgttgaattcatcaataagtttattaatttttgaaaataatttgaaagtcaaataataaactcattaatactagaaatttatggataaaaattgtttcataatgattgttatttttataaactcatcattaatacatattgcattaatgattaaattattaatttctttaagtgtatgtatgagcaacatcttacagtgatagcataatttttaactttaaacaatcaataatttaataggtagtaatatatatctttaataatagatacaatgatcagataaatctgtcattgtggtatttccaccaagtttgaatttaatattcatccttgtgcatgtggacatataaaatgatcatgggaaggggtgggtttgtaattcaaggaataaaaatgtaacacaaaaagtagatgactacatagtatttaaattacagataataattcatgagaaacaatatataatgatatagtaggcttgggtaaagcattgatgagtagtcaatttaattttcatagagtagtgaaatgtaataaatcttcattagtgtaatgaagattaattgtaatgtttttggaaaatcttatgggacttggtttattatatgggtgccaattgttgcatttgagttattgatcatttttctacattatgatttaaattatgaaatagaaaaataatggcgtacaatatgaagttaggctataactcattcattcatgaaaaaattgtaattttgccaaacctagtttacataaacaaatttatgtcataggttagagacacaatctctaggtggaagcctaggagctacgatccctctctctctctcttgtttgattgtcatttggtagtttgaaaattttaaattagaattttcttctaatagtttttaatcacaagtttttagggggctattattaattttacttacaatgggaaaatatatttgttcttttttttttagtagcagttaaaaatgtcaacttaccttaacaagaaccctttttttttttaataagtcaataaaataaattagtagcatacctaaactaacatgaagatataataacataaagtaatttatctttgaataaattaaaagcaaagtcttttcttttattgtaatagtgatgaaattcacttccaaagcttatagcaaatcataaagcatatgaagatctacaaacaaaatttattgccttcgagtatgatttttggcataagtcactcttcttttgaacagtagccacttgacaattttgtccacaaaatcaaaataggcatcacaccaagatcttcttattgccaagacaaaataaggaactaaaatgcctagcgcaaatcccaagccaatgcttaagtaaaaccactgatcaatatagccaccatcaattttgtcctcaagaacactttgccttttatctaggtcttcatcctgacattttgtgactagtggagttccacaaagattcgggtttccagtaaaggccaactctgtgaaagttgtcatttgccctgcaaaggggatcttaccagagaaattattatttgatagattcaaataacccaagaatgttaacgaggacatgcttgaaggaatggtgccagaaagcttgttgcttgatagatcaagagaggacaactgacgcaacattgaaatgcttccaggaatttggccaatgatgtgattcatggacaagtttagaaacaccaaaccagacaattttgttattcctttgggaaactctccacttaaattattgtcggatagatcgatgctaacaacaagagaaagagtcctcgtgtattcaagactttggccttttgtaatcacaatcaacctttcatcatatcgagaaccattcccactgtgatacaaagaatacatatccatgttacgctcctgagccatggctttaagctccaccaaagtgactggaattttaccagtcaaattgttttgtgcaaggtctaagacatgtagggagcttaaatttgaaagtcggtcgggaagtcttccaaaaaatgcattcgacctcaagttgagtattacaagatttatgaaagcagttccaatccatgatggaaccttacccgataattcgttataactgagatcaaggagttccaaacttgataaattttggaaagatgagggaagctctcctgaaagcttgttgtcgttcaggtgtagtgattggagcaattgcaactgacctaatgactttggtatcatcccggacaaattgttatttccaaggtccaaaacaattaggcgagagcaattatttatggtagaaggaatgcttccggtcaaattattccttgaaaaatcaatgacttcaagagaggtgatgtgtcctatggaatctgcgatggtccctgttatttgattatgagaaagacgaaggtaactcaagtttaacagggattcacctttgctaagtgggatagggccagaaaatttattatgggagagatctagaaatcccacccctttgattgaaaaaggaataggtccttcaaagaggttggaactgaaatcgatctgtgcgagaaaaggataagaaaaattcaatgaatttggtaactgaccttgtaactgattctgagaaagacttaagtaccacagattgaaagaaatattccaaaaccaatttggaatacgacttgaaacgctagcatttgagaaattaagatattggaggttcttctgagattgaagccaaatcggaaatgaaggacccaagtggcttgaacccatatcaagatatttcacctggaaagggggaacccaattgggactaacattcaaacggaaagaattggagtccatctttagatactccaacttacttagcttccaaaagtgttgttcagagagacttccactcaaatgattggaagaaacatccaaccattgcaattctgaaagctgtccaatactatctgggagacttccactcaaatgattgagagaaaccttcaattgttgcaattgagaaagttgtccaatactatctgggagacttccattcagctcattcattccaatggacaagaactccaggtgttgcaatgtccataaagaagcagggatgggaccttcaaatctattgctggataaaccgagtcccctaagatttttaagctcacccaaccaatttggcaattttcccatcaattgattgccatacaagtataactccgtcaaattaggcaaaggacttttagaactgcaggtttcaattcccttgataatctcaggtaaacttccattcaagtaattaaaactcaaatccagatattttaagttgcagaagtttccaaaagagcttggaattggacctgtaatgagcaagattaaaaaatatgtattaattaaaattatgtaataaacaaataataataatagtaaataacaaaataaattaattcatgaacaattaatttaaagaaaaaataagaaaaattattattattcatgaattggtacttttttttatcttttctgataaccataaaataaaataatttatttcaatgttgtaagaaaagtagaattaatcattgatattaattgttcctttaaaaatgaactaaatttttttgaacaaagtgatagttcaatgagagaagatagaaaatcaaaatataaaccaaaggattaagaaatcaagttatcaaaagataaatttttattttagtgatgaaaataaagcaagagaaaactaggaattcaacatagtttaatatcttgaaacaacaacactataagaaactagcaaaattaaataaaaagtgagaaacttacaataaactaaaattagtaaaatgacgaagcaacatggtttatagtctaactaaaatatacaaaggatatgcaatgaaatgaattatctaaattaattgaggattgaggatgtccttcaatcaaattgtcactcaaatctaaatattttagagacttcaattttatcaataaaggtctgatctaattaattaagtttacaagacacaaaactcatatggcaacaattacttcccctttaggatagaggttaatattaacttcttgatttggattttagtcaattctcttaatgatgaaaaaaaaaacgctaaggttgtgtttagaacttctaatgttttatttctaaagatagaaattcatagaaaccctaatataaatagtaaaactttaccataaaaagtaatgatatttaaaaattgttttaaaaaccatgaatattagaaaaaaatttactatcttaaattttttaaatttcaataacagtaattaagaacatgaaatgtcatattatattcacttaatgttcaattttatggtttcaattacttgtctcaaccatgaaatgtcatatctcaatatataaattacaataatttggcataatagatgaattatggagagaaaatagaaattgaaaatgtgcaagagatgactgaaagttatttgatgataaagattcttaacaaacgtaaattgtcaaaataggaatataaatttttttactgtttaaaaaagcagtaatttggcaatgtccataaagaagcagggatgtgaccttcaaatctgttgccggataaatcgagtcccctaagatttttaagctcacccaaccaatttggcaattttcccatcaattgattgccatacaagtataacttcgtcaaattaggcaaaggacttttagaactgcaggtttcaattcccttgataatctcaggtaaacttccattcaagtaattaccccccaaattcagatattttaagttgcaaaagtttccaaaggagcttggaattggacctgtaatgagcaagattaaaaaaatatgtattaattaaaattatgtaataaacaaataataaaaatagtaaataacaaaataaattaattcatgaacaattaatttaaagaaaaagtaagaaaaattattattcatgaacaaaataaattattatttaaaagataaattttaattttagcaatgaaaaaaatatgtttttctaaacaattattttaattccaagtggttattctatttatttacaaactcctagaaaatgtgaataaaaaattatagttatctaagttatataccagtagaaactaccattaaagaataaagctagagaaaacaaggaattcaacctagtttaatattttgaaacaataacactacaagaaactagcaaaattaaataaaaagtgagaaacttataataaactaaaattagtaaaatgacgaagcaacatggtttatagtctaactaaaatatacaaaggatatgcaatgaaatgaaatatctaaattaattgaggagtgaggatgtccttaaatcaaattgtcactcaaatctaaatattttagagacttcagttttatcaataaaggtctaatctaattaattaagtttaaaagagacaatatatcaaagtaaaaactcatatgacaacaattgcttcccctttagaatagaggtcaatattcacttcttgatttggattttagtcaattctctaaggttgtgtttggaacttctaatgttttatttctaaagatagaaattcatagaaactctaatataaatagtaaaactttaccataaaaaagtaatcatacttaaaaattgttttaaaaaacatgaatattagaaaaattttactatcttaatttttttaaatttcaataacagtatttaagaacatgaaatgtcatattatattcacttaatgttcaattttatggtttcaattacttgtctcaaccatgaaatgtcatatctcaatatataaattacaataatttggcataatagatgaattatggagagaaaatagaaattgaaaatgtgcaagagatgattgaaagttatttgatgataaagattcttaacaaacgtaaattgtccaaataagaatataaatttttttactgtgtaaaaaagcagtaatttggcaatgtccataaagaagcagggatgtgaccttcaagtttgttgccggataaatcgaggcgcctaagatttttaagctcacccaaccaatttggcaattttcccatcaattgattctcatacaagtataactccgtcaaattaggcaaaggacttttagaactgcaggtttcaattcccttgataatctcaggtaaacttccattcaagtaattaaaactcaaatccagatattttaagttgcagaagtttccaaaagagcttggaattggacctgtaatgagcaagattaaaaaaatatgtattaattaaaattatgtaataaacaaataataaaaatagtaaataacaaaataaattaattcatgaacaattaatttaaagaaaaagtaagaaaaattattattcatgaacaaaataaattattatttaaaagataaattttaattttagcaatgaaaaaaatatgtttttctaaacaattattttaattccaagtggttattctatttatttacaaactcctagaaaatgtgaataaaaaattatagttatctaagttatataccagtagaaactaccattaaagaataaagctagagaaaacaaggaattcaacctagtttaatattttgaaacaataacactacaagaaactagcaaaattaaataaaaagtgagaaacttataataaactaaaattagtaaaatgacgaagcaacatggtttatagtctaactaaaatatacaaaggatatgcaatgaaatgaaatatctaaattaattgaggagtgaggatgtccttaaatcaaattgtcactcaaatctaaatattttagagacttcaattttatcaataaaggtctaatctaattaattaagtttaaaagagacaatatatcaaagtaaaaactcatatggcaacaattgtttccccttgagaatagaggtcaatattaacttcttgatttggattttagtcaattctctaaggttgtgtttggaacttctaatgttttatttctaaagatagaaattcatagaaactctaatataaatagtaaaactttaccataaaaaagtaatcatacttagaaattgttttaaaaaccatgaatattagaaaaattttactatcttaatttttttaaatttcaataacagtatttaagaacatgaaatgtcatattatattcacttaatgttcaattttatggtttcaattacttgtctcaaccatgaaatgtcatatctcaatatataaattacaataatttggcataatagatgaattatggagagaaaatagaaattgaaaatgtgcaagagatgattgaaagttatttgatgataaagattcttaacaaacttaaattgtcaaaataggaatataaattctttttggagatacaaagaaagtaaattttttagatttcaatctaatgtggttttttatttattaattacaagattttcaaaaataaatgaatagtaaattataattatttaaattttataggaacaagaaataccttaagataaacatgacaatctagaataaaactttgatagaatagtttaaaacaaagtataccatgagaataaaaattgaaaactatttaataactaaaactagtaaaatatttttttaaaaaaaagtgacactaacaaagtacgtaatattatatcaattcaattgtaatataaatattcaacttagtgcatactcaaattattattcccaagaacaaaataaattgaaaaaaataagagcatgtcaaaatcttactatagaaatgaaagcattcaaaaaaataattaatataataatgtatgaaaatgatactactattattatttaaaataataaataataaatcatcgataaactaatttaaaataaaaaaaagaggttgaggattaaaaaaatcatattcctatgagtacaattcttttattagttacatagacatgcaccttttataatcacttacccttacacaaaaaatttgttaaataatatagatacttcataagcataaagtgtcaaactatatactttttcttagataaaaaaaaaacgaaaaaaaaaaaactaaatttccttctaagaaatttaaaattcaaaataatgttttattagtaggtataaatttatttccactacgagaacaaaatatagtgattatttgatattgtatgctaatacatattcaataagaacttatatacacaatcatcaactatatatatttaattacacatttacatacaaacaaataaatatcaaattttctattaagagaagaacttaccatgtaaatcatttctagccaaactgagaaattctatctttttccaactcttcctcaatagttgagagatattgcccccagagaggctacaaccatctagatgcagctctgttaaatttggaagtttgtctagcacctcgacccattcacttcctattgatgaaaggttaacaaaatccataccaagatacttcaaggaaacaagactagtcacccattcaatatttccaatagataaatcactaaaatattcaaaatcattataactaaaaccttcagaagaaagatctagatactgcaaattagaaagacttctaaaatttgaaggaattgtaccactaaactcagcacctgataagtttagatatagtaaattcttcaaagacccgaagaattgaggaattggcatgcctttgaatgagttgaaactcaaatctagatatttcaaagacttgagttttgtcaatgaaggtctaatttctccactcaagttcatagagctccagttctcatatacattctcacgaggataagggttatgaagatcaatggaaatgacaattcctgtgtctttttcacaagtaattccttgccaatagcaataattgcttcctttccatgatgaaagtcggttgttgggatctttgagaccacttttgaagtcaataagagcctcttgttcagattgaatgttgttgatgatatgggtatagccattacatgcaagttccgttgttatgaaatagagaatggctaaaatgaaaccaagaattgaaattctctccatgtaaatattctaagttgagcacctgtaaaaattgaattccaatatgtagttagcattttcttgaattaaattaaaattttatttttgacatcaaaatgaaaaactgataaaatttaaaagacagttgcatcaacatgacgaacttattttaaccaacacatttaagaaatgtcaccagtctaatataattttaaaagatctactcatagcatatgtaaatatatactaagaaaaacagtagtaatcatctcatagatattcaaccttactttgattggcaagaactgaaatcacctacaagtggaaggattagatagaaaaaaacacattaaaagtagtttatcaatattagtcgagttcaaccttacctgaaacttctttcttgttttccttgttttttcaattcaactaaaatatatagaagattgtttaaagtgatgacaatgatagcctcactttcttattttccttgttttttcaatcatattaaattctaattgagtggaaaatgacttagagttcttacctccaccacaaaaaccaagtgtcttgattgaagaccttcacttgaagataaaaaagatgtggattgaaagaccacgagttggcactaagtcaaggtcaataagattaaaataaacattaaaattcatctatgagtaaaaaaaactacacttgtttaaattttgaaagatcttaattgggaaaaataaaatatgtatatcaaggtgctaagaataagtcaagagcttagatcattcaacatacaaaaatagtattgaatcgatgggcttatttggtggtataatttagaaattcatacactatttggcatgttttatcccaaaaacaaatttttaaaataaagttaaatagagaacaactttaggaaaataaataaaatttcttctcacttgttttttaaaacaaaaagaaaacataaaaaaaataataaatacaatctctttcttctttcattttttctttaccaaccaatgataaaaaatcatcaaatatgatctttctcttaattatacgtattttttttattttctttaacttctctaattttttttattaggcatatagactttgaatcaaataatacttaaaataaaggatttattcattttaaaaataatttgaaactcaaaatcaatttaattaatactaaattgtcatcaaacttaaaagttaatttaattaatacaaaaaaagtcatgaaccaaaatttatcatggatgacttttttagtttcttattacaacacataactatatttttctgaattttttactagaaaaataaattaaatctagcaaaacttaatgtttcgatcctttaatgaatctgataatttttagaaatactttcaaattcacatatggactcaattaatagcataaatttatggataaaaatggtttaaaatgactcttgttgtctattttctgggtagaactataattttttattttttattactagacgaatagacctcaaatcaagaaaaaaaaaacttaatgttttgggtgctttaaaaattctattacttttaaagaattaatttgagacttaaattacattcaagtaaaacatcctttaaaatgaaaaaataaaataaaatagtttgtatctttttcatgacccattaatcttgtaagaatcatagatcacgttgtttgatcatgatcgatgattaacgaactttattctctatgtagtgttgactacgttatcaagtcaaaaagttataccgtgttcaagtaagacatcttccaaaattttaaaaaatataataagataaaataaaataaaggccttgactcaattctttttatcatgaaggtcattcttcacctaaaaaataaggttaacaacttcgcatctaattataatataggataaaaagaagtgtttaatagtgatcaaaacactgattttatatcattatacaaaattaaaggaaataatcaactagtcaagaaatgaattgattaattgttacctttaccaaaatgccttattatatattatagcttttctttaaataaaattaaaagaaaattgtctaatagcaccataacaaagggaaaattgatcttagtccacattactacttttgtttaaacaaaattaaaataaattttgtgaaatatatcaataaaaaaggaaaaattgcatgaaaagatagaattttttttttaaagcaaaatgttactaaataaagggaaaatacttgtataaactagtttatctaaaattagaccttgacttagtatttcataaatataggagaacaaatatatatgtcaaccataccattaattttatcttaatgtataaaaataaagataactattggatagccaaaaataataataaaattaaatatttattatccataattgtaaattatgaaaacattgaaaagttattttaaatcctagtatgtcaaaataacatcactaatataattgctttcaattcatttttacacacacatagtagattaaacattatatctatcttgcaatttaagtaatcacttttgacttcaaaggaaaatgatattagaaaataatattatccaacccaaaaacttaatttctttaagttccaactaatgagaaacatacacatgcaataaccttattacaatagattagtttcttccaatttattttttttaattttttattattcaaatatctaataacctaatttgcctaaaattaatcatgacaatgattaaccatctaaaatcaaatcataatgtccatttttttcttgatcataatccacaataaagaatatttattttgaatgaagtgtagaccacattataaagtttgtcaattcaaatagtcatatggataataaataactattttaaaatcatattagaatagtttgtattgttatatgacctatcaattttgtatgaagtgtagactacgttgtttaactatgaccgatgataatgtaattttattctctatgtagtattgatcacgttatcaagtcaaaaagttaaatcgtgttcaagtaaaacatcctttaaaattaaaaaaaaaatcaaaaatcaaaagaccttgactcattcaaaattatgggttttgaaagttggaagtaaaaatggagaaggaaaaaccaagaaaaaaaggcccatatattaggcccttgtagaaaggaaaaaaaggttttcgaaaaaggaaaattaaataaaataaaaattccaacgagccaaaagttgcccagaaaatgggccgaaataggggccaaataataataataataaccatacatccgtattgaaggtgatatcttttgaaacattcaagtccacgtaagatagtaatagataagatgataatagccttacaaccatattgaagggtgatatcttttgaaatattcaagatcttacaacgttgaagtcaatgaaaaatgttgtccacacaagatgataataactttacaatcatattaaaggatgatatctttcaaaacattcaagaccttacaaccacattgaaatattttagacttttcaacattcaagtctatgacaaatattgttcacacaaaatggtaatggataagtttaatattctcaaattattataaatcaagcaagtctagcttggctaataatattataaacttaaaaattaattatctagaattataaattagttaaagttattttgaatccaaatatgccaattaagtagcaccattattataattgcatctaatggtagcatgttatcctctagttcattattttcattaattgacacagaatcagtagaaatagaatcagattttacttgaaaccctaaaacagggctgaccttaaattccaggttgtttggatcaatagacttgagcatgaagtcattatgtctagactttgaatcctcctccggctagggctttgaagccccactctctttctaggtttcattgttctgctcctcttgcccactttgtgctatttcagataccacactctcactaaccatagtgctagtttcgacaaaaattacatttcctgaataaaatttcattgaaagaatataatcatgcaaagtaaaaataagactaactaaacattagttgctgaaaaatataagataggtgcactacttgaactattgactgtgaacctgctaagacatcaaattttctacctttctttccagaaattctaatatgattctgcacaactcaactagaataacattaaaatctaggccattgaattttttacttttacatgggctgcatatatatccagattaaaaccatataagttgcaacacaatagcataacaactaattcgtatatggtcattcagaaaccatattaattttttttcataatgactattatttttttctacacataattatattttaataaaatttctcactataaaaatgaacttcaaattgacactttgtattaaatttattaatatgtttaacaattttcaaaaataatttggaactaaaaaaataagtacaatcataaaaaaaaaaaacaatagattaatactaatatattatgaatcataactttactgtttcttctatatatacaaatatattttttgaatttaggtaaataaattataatttgagtaagacaaattaataatttaagttctttaatgaatttttaaatttttaagaataatcttgaattcataattgccctcatggcatattgcccaccagtacacaaaataaaaccgatggaagtaggtagaaaattatttaggaagaaccactcagattatgcagtatggtaatgtacatcaataagttgggtaatcagctataaagttgtaatttccata

SEQ ID NO: 13327 - DNA, 6239 bp, Vitis vinifera
  Intron number 14 from transcript GSVIVT01000009001 (locus GSVIVG01000009001) derived from phytozome v7.0 (chr-ID chr 14; pos 2672837 to 2679075)
ttggtccaggaggaaagaagtatcggttctgcaaggtaatcaacaagttttaccattacattcaagcatgaaaaagtttagcaagctatattaactaaatgtaggctgatttttttctctgatgaagtctttttacattattattattattttttttttgtaaatcaaaatattacattatcattatgtttttgtttctacttgaatctatggaataaagtgtgcaaaaaaagtcaataaaacaaccagacgttcctagaacttaagaccttatagtcaaacagaacatgaagcaagaatgactccatacaagcactctttttcacatcaagctatattaactaaatgtgggatggttttttttttccctgatgaagtctttttacattattattggttggaaaaaacaatttattatttgataaaaaaatagtacacacacacacacacacacacacacacacatatatatatatatatatatatttatttatttattatagtgtctaagagtctaacacccatttacagctgtcataatcactaatttatagccatcctagtcaatagttgactgttatagttatcctaatttgtacattgattgactaattctaattgctaatattaacaactaatatgcgcaaaatataggtcctttagagctgatcaggccttaagatcaggggattctattgatttcctacactccccctcaagctggtttgaagatgtggttcattcttagcttgcatgtcactgagttgaagcttggattagacactcctttagtgaatttattagctagctgcagttttgatgaaacaaaaggagtgcaaatgaaaccattatcaatcttttttttgatgaagtgtctatccacttcaacatgtttagtgcggtcatgttgaatcgggttatgtataatgcttatggctgccttgtctttgcaatatagcctcataggttcttcaacatctacttgtgattcctttgatagagttcccatgagttcacaaataccaagggccataactcggtattcagccttaacacttgatccaataactaccggttgtttttttctcctccaagtcaccaagatgcttcctacaaaggtgccataccctaaagtagatctcttgtcattgtagatccaacataatcaacatcaatgtaagcctctacttgcatgtgactatttttagagaataacaatcttagagaatagcaatcctatgcctttagagaataacaatcctatgcctagagtagcctttaaatatttcaatatcctcactatagcttccaagtgatcttctatggagacatgcatgaattgacttgtgacatcaacaatatatgcaatgtttagccttgtatgagataggtgtatcaacttgccaacaagccttcgatatcttcttttatcaaccgacgctctgtctaagtttatccctaacttattattatgatctataggtgtattcgaaggcttacgctctaacattccgatttcttctagaaatcaagaatgtatttttcttcgagacacatatattcctcttttgattgtgcaacttcaatgccaaggaaatatttgagactgtccaaatctttaattttgaattccttagctaatttacttttcaaattctatatctccttaaaatcatcaccagtgactataatatcatccccatagacaataagaatagtcaccattttccttggtgatcatttgatgaacaaagtgtggttccttggcttttttggtatttgaaccccataagggatttggcaaatctttcaaaccaagccctcagggactgttccaaactgcataaagacttttgaaacttacacatcttctcattcttaaactacccctcaaatctaagaggtacatccatgaagacgcctttttccaagttcccatgaaaaacatcttttatccaaatcgtagaagtgaccaatcacaatttgcagcaaaagatagtaggattttgatggagttcatctttgcaacaggtgcaaaggtctcttggtagttgatcccgtaagtttgagtgcacctcctagtgaccaatcttggtttatatccctttatagagtcatcaactttgtacttgatacttacatccaagtggatgctttcctttagaaagatcaactatatcccatctttcattcttgtatagggccttcatttcttcatctattgcctctctccacttggggtcaacaagtgcttcttgtatattttttggggctgaacttgaattcaagtttgtagtaaaggccttatagctgttgttcatccagtataagacaagaaattcaatgatgaatgtttgttacaattcctaacactttttttgattgctataagaatgtccgcattggtatcaaccacttggacaacattgggaggattcaaaattgtagaattaggcggattaggggacataccttcttttagggtcgatgattgatcgtgcttaaagaggattttgaccttgttccagcccaatttttggaggtcttcttgagtaaacaagcaactttgaattttgagacttcccttgattttgtagctcggaatttttagactccccttgcattctggttctctcacccacccaaataggcatcaagaaaggtagggactagttttggtactgatcttccacttccaatttctcttcctgaagattagttttttgataataaagctagtcctcaaagaagttaacatccactataacaaatttctttcgagaagcaggatggtagcatttataacccttttgagtaggagagtagtctaagaagatacatttagtagctctacggtcaagtttagatttgtctttacttgggatataaacaaaaatattgcatccaaacacttttgaagagagagtcccaagccatggtatatgggaaaaataatttttgaagctttcaatgggagttttgaagttaagggcttttgaaggcatatcgtttattaaacaagctgttgtaaggatagtgtctccctaaaaagtcattgacacatttcttgcaaacataagtacctaagctacttcaaggagatgtctactctttcgttgaaccatcccattttgttgaggggtatccacacatgcagattggtggaaaaggccattttaagtgaagtgtacttagactttcattggagtactcaattccattatcatatcaaatcactcgtacttggacaccaaattgtgtttgtatcattttgtaaaagttttgcaagatgagaatagtttcagattttccctttagtagatacactcaagtagtcctactgcaatcatcgataaaactaataaatcacctgtctacaaaaagacaagttatccatgaggttccctacacatctgtatgtataatagacaaaggaacttcacttcttttatactcaaaggatagggatcccgatggtcttttgccattttccaattcacacacttcacacttgaacttagagctatctaggttgatacaaagtttaggatgcaactgttgtaagcaaaagttagatgccttaatctctcatgcattagccaatagctttcaaaaaatcctttagctccctttatttgataagcctgaacttttcctctttccttggtgtctaggtactataggccatttccctccttagcattgccaatcatttccttgaggtgaggtcctagaaaacacaataatttgggaaaaaagttgttaaatagttgtaagtttttttaagtttgaaaaaggttacgagacgtttttgggacatgcagtgcagaagtgagggtaatatttggttgaaagatgcactttcctttgccactaactagagtaagagttccatcagcaacctgcaccttttgtttgctggaacatggtatttatgacaagaaacgattgaattcttttggtcacatgatcataagctcttgaatcaatgatccaagagttagaattagatgtaacagtggttgtaagagctttatagagtgtacttgattgtgtaaaagcacaagaagtggagtaacgtctgattttcccatgatcttatatggaagatcaaattgttccttcctaaaaggcagattttcataagctgaaatagattcattagcagcaaagttggggcctggtattatctaagcttgaaaactctcgttggtctttggaaaattttccattcttgttccatttcttgtggccttccattcattttccaacatgtctctcttgcgtgtttgggtcttttggaatagtcacaccatcttgtatctttctcccttcccttgtttgtgtttggattgttttccacagccacattgagagcagaattaccataagatggtgttttcatcataacaccaattctaaattcttcactgtgcataagggaacactacattcaaggaaggaaggggaacttttccaaggatttggctctgtaccttatctaactctggattcaagccaacaaggaagtcaaagatcctctatctttcaaataaattaacaagctttgtagcatccttgggtgattccatttcaatatgttgatttttttttttttttttttgataaatatttcaatatgttgatagatgtccacctcatgccataataccttcaatgtattatagtatgatttgactatcaattctccttgtttggttgcatgaatcctgttcatcaattcaaacacttgagcagcatctccttgctttgaataggtatgtgtaacaacatcccaaatctccttcaccatagcaagaaataagaaaggcttagctatttttggttgcattgaattcagtaaccatgacattattaaagagtttttagctttccatgattcgaagttaggatctgaagtttttggttttgttattgtcccatgtagataccccatcttccttcaacttaataaaaagagtttggttgattgagaccactcaagaaaattatgatcattgaatttttgggtggtgatttggagagtaaggttgtcgagttgattggatactttagggactattgaattctgattggaggtttgttcagccatgtggagaactgaagatggagaaacaaagattcagaaggggtgaaaggaggagcagataccaaagttaggagaaggaagggcagagacaccaaaaaaaagaaaaggaagaaaggtagggtagagtagccagaaaaattgagcctaagaaactaaagtggctctgataccatattagttggaaaaaacaatttattatttgattaaaaagtagtacacacacacacacacacacatcatagtgtctaagggtatagcactctatttatagctgtcttaatcactaatctatagccatcctagtcaatagttggctgttacagttatcctaatttgtacattgattgactaattctactagctaatattaacaactaatatacaccaaacataggtcctttagggctgatcaggccctaagatcaggggattctgttgatttcatttgattttttttttttttttttttttttgtaaatcaaaatattacattatcattatgtttttgtttctacttgaatctatggaataaactgtgcaaaaaacgtcaataaaacaaccagacattcctataacttatgaccttataatcaaatagaaaatgaagcaagaatgactccatacaagcacacacttacacgtcataaattgaagaaaaatgttatttgataaaacagttattttatttgtttttctaatattatttaattagcataaaaaaaattgaattattttgcaataaagtgacttgctttgtcatatggtgattgtgaaattgaagtacgaagcatttgtttagaaactgattttaataacttcacatcttatcacctatcaacaaagtaactttacatcttatggattaatatgttaaacttttcccaaaactgctgaagttttataaaatattttataacagcataggttattgaattttgataggttccgataggctttggttatgttattctaaattatgaaggttcacaattgccctagctttcaagctagttctttaaaaccgaaaacattatggctatgccgatggaaacattttgaattactaataaaacattttgaattaatatcatgtttaaatccatgtattcactttttttgtctacagcat

SEQ ID NO: 13328 - DNA, 5601 bp, Vitis vinifera
  Intron number 3 from transcript GSVIVT01009854001 (locus G SVIVG01009854001) derived from phytozome v7.0 (chr-ID chr1 8; pos 11796167 to 11801767 reverse strand)
aaggctatcatagtgacatctccttggttattagaccatgggcttagtccatttttcctctacttctgtaatttaattcttcaaatactcgtttaaatcttatgtccatcaatgggaattattatcttatacattcatttatttatctagcctaccccttcaaaaatcccatgtttttaatttaattcttcaaatacttgtttaaatcatattttcataaatcgaattattatcccatgtttatttagttatttaaaatctaatccttcaaaaatcccctgtcttaatttagtttatcagtaattcgtttaaatcttattttcatcaattaggattattatctcgtattcgtctatttatttaaaacctagttctccaaaaatctcttgtcttaactcaatttctcaatcctaaaaattctacagttcgtctaaattttatcctcatcaattagaatcattatttccacatctattcaaagtccaatcttccgaaaaccccatgccttaattaaaacttcaatcccaaaaattctactatccatctttattcgtctaaatattattttcgttaattagtattataatctcatacttacctatttattcaaagtcatatcctttaaaaatccaacgccctaattcaaatttccaattagaaaaatcccactattttattcgtttgagcattatttttgttaataagtatcgttattccatattcgttcatttatttatttcaatcattaaaattcaactcttcaaaaccggatttccaaatttaaccttcagactaaaaaaaattccaccattcacttttattcatttaaatatcatctttgttatcattattataaattccatgtctacttgcttctttcttctaaaaattccaataattagagttaattattcaaaggcccgactttcaaaatttaattttcaaaatcccactattcactattcatccgcccaaatatcgttttgattaatccgtaacattactccatacttacccatttatttctcttaaaaatttcaatcattagagtctaattcttcaaaattctgattcctaaatttagctatctgaaattccaattgtcctatctccgaacttaatttccagtttcccatgctccaattcccgtatttaccccgctacttattattatcattatcattatcatattgttcattatttctataaattctgccttcgaatgatttctaagatttccaatttttacacatcaactttcataatttctacgcctcaaaaaaaaaaaacttatgattctgatccctttcgaaatttaactcccataatcccaattttcgtaacttaatttttcttaaaaatcccgaactttcaaataattcttcaaaatcccaattttctttcaaatttaatttctaaaagttctcatttcttacatttaattcctaagaatccaattttcaaataatatctaacattccgattctcaaatgaatttaaaaaatccagctttccttcgaacaattttaatccctgcttagtgatgcatgtggtatgttttgtgctctatatagtgtactaaccctctctattgatagcgcatgacagtttgttgcccaggtatgtacccattttccctctaatcgttgtctatgcatgtcttgactcttatgtgtgcatgatcattcaggatattcactgatttactcgtaaattgccacgtcagcttcattttgttagtagagacccgattttagggacttagaagggtgctatggtcttttatcgtaccttcccgataagtaacctgacccccgagcccgatccgatttctcgtagatcaccttttccaaaataaggagtcgcacttagggttttctttcttattttgtttacccttttaaaaataaaacaaaaataagtggcgactccaagttattttcttaaatcaataaaaatcatttttcaaattaaaattgaggtcgccatcaagtgggaaatgcataagccgaaatgcggggtccacagtatgcttaaccaatgtatgtaaggaatgtcatctatccttggttaggggaaataaacaaataagtttttcagaatcacttaaaattcttcacaaatgatagtcttgtacacccttctacagttagtatatttgtcgtgtacacttagtgtaaataccttgtacagtgacccaaattccatataccccctactcaatgtgtaaccataggtaggttaaccacgttttcatttgtttggttcaaaaaatagtggaagatgaaaaaacaaaattttctctcaaagatcattagtaggataagtacttaaattgtcatgtgtgagttaaataaaatgcataagatgagtgtgtgatagagaaatgtgtaccttgaaagtgtgcaatccttagatgacaagacaaaaaaaaaaaaaaaaaaaagttgtccaaaattgattgaaatctttcacaaaggatagctttgtataccccttgtatagttagaacatttgttttgtatagttagaacattttttttatccaattgaacatttaccttgcacagttaatataacacccttgtacaatgatataaatttcatccatatgcatacattatgtgtccacatatgatgtatgaatcatgtttccattggtttaatttagaaaatgatataaaatgtaaaaacaaaattttccctcaaatatcattattagggtaagtatttgaattgtcatatgtaagttaaataaagtacatgaaatgaaagaatttgtggtaagagagtgtataatccttagatgacaagaaaaaaaaagttgttcaaaatgtacagttttgtacaccccttgtacaattagtgtaatagccttgtataatggtatacattttatactgttagaaaatttaggctaattcaacctatggtaatcaccctagaggggggagtaaatagagtgatggtttttttttgcaaaatttaaactatgtgaatgtaagagacaaatatatgtaagtatataataaaacaatataaagacaattgcatataaagtaaaagagtagggaagagagaatgcaaatacaaaattttatagtggttcgacgcaacccgacctacatccactctcctctagtttcaatcctaagcttgaggttctactaattcaaggcttctaaaccaaacattcaagtaataaaattgaattatggttccaatctaccatcttggacttttggctctaagcaccctttaaaatccttaagagataccccacacttgagaatcttactctcaaatatatacaaataattaatctcacaaaatcctagtacaaaatctttaagctcaaatgatacaagaaaactaggattgaaaggtgcactaatgatatgcaagttttagaataatggtgcactcaaaacacttttccatggctcaaatatattcaaaaaaggtttgggaaggttgagctcataaataatgaagatttggagtcttttcatagaagaaaaaaaagtcaaactagccgttgagggttcgactagtcgagttaagcgtcgatcggttgactagccgttaacatttaatgcttagcaggtgaccgttggacctcgaccgattgtggtgtgggttgactgatttctcatttggttgaacaaccattctggaagagagagaagatttttacacccctcgaccagttgagttggcggtcgatcggttactgttcacacctttgaccgattgaattgggggtcgacctgctcctagatcggttaagttgggggtcgaccggttcctcatctggttcaaccagttgagtcgtttttggctcaacaaccaactttttcaacttaaaaccttttaaacaagtttgaaaaacatttgacacaaggttttagttgaaaacatgaaatcatccaatttaaaatatttacaacaaaataactcttggatgactttggtgcataagtaaagaatgtaatgcataaaaattctagtgcaccaacaaccttacaaagagatctttatgaagcttgggtcttgaaaaacacttctctttgaggtggtcttttttttcatgatttctcattggcttaatttgtctttgtaattgccactttgaaaatcgtcttgcctaatcacacttaaaaatataatcattagttctaaaccttgttttgttatcattaaaactgagattaaccaaacattggtttcacacattcatatgcataaattatattcacatgagtatgtaaattatgttcccaatagtttgacttttaaaataatcaaaacaaataaaacgttattttattttattttcaatgcaaaatttaattaaaaataaaacaagaaattacttaaaaactattatttaagacaaatttatttatttatttccttttatatttggaaataaagaaaaaagaataaaaaatttatttaaccataagaaatataaatataagattggttaaaaactaccaaatttatttatttatttcattttatttttggaattaaataaaaaataaaaaaaattaatttaaccgtaaaaatattaatataagatatgttaaaaaatacaaataacctcaaatttatttacttatttcattttatttatttaaattagaaagtaatttattttaatagatgaaaatgtgcacaattgatctattactttgttaattatggatatattaaaattttctattagacaaaaaaaaaataaagaaaaaaaattaaaaaaagtaataaatatatataatttagttatttaattatttttcatgtaaaagatagtcacacgaaaaacacataattgaccaaattcctttgtttaattgtaaacatgctatatatatatatattatattaaaataactaatggaaaaataaaaatggataattaattaatgaaatgtatttatttttattattttcatataaaaaatagtactaaataaggtttttaatttttaattttaaaaatagttttcattttttaattaaatgttttttcaaaaagaaaatataaaaaatataaatcatattaccatttttttagaaagtattttttaaaatagtttttgaacataaattttcttcatttataatttaaaataaaaaataatgctaattttttcaattatttataaaaaaaagttttaaaaaataattagaaatccaaatagttaaaatagaattattatggttgcatgaatagtaatgcaataaagataaaaaaagtttatttgaatggtcaatgaatattttggttcatcattattttataatcttaaaatcaattagtggtaatatataaaaatttaaaggatatattagtattttcatatcttatatcccttttatggattaggtaagttacatgtactcttccaattaaggccaatatataatatatctccacgtactgagttcttggaatatgtaataattaaaatttaataagattggtacgatacggcaagagcccagtccagaattatattatataggattcgtcttttgcccattccttacatagcaatatagcactaactcatagcagtgaagatcttc

SEQ ID NO: 13329 - DNA, 6512 bp, Vitis vinifera
  Intron number 8 from transcript GSVIVT01016269001 (locus G SVIVG01016269001) derived from phytozome v7.0 (chr-ID chr1 3; pos 5673023 to 5679534)
ggctcttgtttggctggtctctcctgcatttgcatgtaagtttgctatcataactttcctagcttgggtaactagaaattatgattccaagaaaagaattgaaatatgaagaatagtcgtgtggattcatatcaaacatgagggatctctgtggtgttgaaaactactaaaatggctatttttttttttgtttaatgactcttaggtcatgtttggtatgtgggaatgaggagcgggaatggacatctcattccttttctcatctattccatatttggataactcaaatgatgatgggaatgaaatcaataatgatttcaaaggaaatgaaatcccacttataagtgggatttcaattcattcccattaaaaggcatttggattccttaatgcaagttatttttaaaaacacttttaaattttttttaaaaaaccaataacttctttagataagttgtttttaaaaataattgtgtattttgattttgtaaaaagcaaattgtaattcaatttatataatataaacaaaatttaattaaagtcttattaaaaataaaaataatttttaattacaaataaatagtttttaataaaatatgaatagtaatattataataaaatcataaattatatatttttataaatattataaaatatggatattaacatcttacaaaagcataattgatttattttgttaaaataaatgataataattcaaaattaataactaatattattttatgttgaatgaatttaaaaacaaataaagtttaattttttaaagttattattgacccaaaattttcacttatatgcatatatttagcacttaattacagatatggtattatgaaattttttatttaacctctgattaattaatctgttttttgaattttaagttatccttaaaaattagaagattcattaaagaattttgaaacatgaattatgtttattattttttatagtcattataaatattttgtgagtttcaaattatttttaaaaattattaaacttattaataaatttaatgcaaagtctcacttgattagaaattcatttctctagtgaaaaaaatgggaaaaaatagtttgctattttactttgtttttaaaaattgtttgtaaagaacaataaccaaatagtggtataaatttctaaaaaacaattttttttttttttagattatatgcccaaataagttttcattatttaggccaaaaaaaaaaactctcaaagatgtttttttaaatgcaaataaaaaattattttaaattatgtatagtgtgagagtttttcttttaaatgaagataaaaatgattttaaactatatgtatggatattattgttaatttatttatttttttcattctcattctcattatcattattacttgacattaaaatggaaacaaataatcattccaaccttacatttctatatgcattcaaatctatgaattggaatcaccaacttctttcctattcaaggagaaataggaatggaagcaaaatattcattctcatttctcattcccatgtatcaaacatggccttagggtaatttggtacatggaataggtgaaagaatggaataactattccatggagttagttagtccattgtttggtacctcttctactttagcaaataagtattcccttttcaaaacctaaggaatagctattccatctggttattggaagaggcatctttaaacccattcataatctgttgagaaatctaatctaaattgtgttggtgtctagcctgcacaaatcctagacaactagcaatcttttgttttaactgggctgatttatttcttaatttaggtcgattttctagctgtatgatatctataattttttttccttatatgttttcctagcatatttcttgcctagagtttaactaatctcttatatatatatatatatatatatatatatatatatatatatatgtttttggtcatgtactatgcatagtaataagaaaattccaatcttaaattcaacatggcatgataacttctatgggttttgggccacgtggatgttgtaggttcttccattagttaatcaaccttcatttgctagttaaattcagagatctccatgtctaaaatcacatctgagaaaatggaaactcttgtggagcaatttgcaagctccaacaagagtctcacgattcatattaatagacataatttcctgagatgggcatggtctttgaagtttttcattacaggccaaggtaagatggggtgctagatggctcgaagaaggtaacgaatctaattgattctggatttgatgtttgggatgctgaaatctcaatgataatgtcatggctaatcaattccatggaaatcgaaagcggtgaatctcacctattggtataaggacaatgatgcacaattgtacagttcgaagtgcgtgcatgataccaaacaaggaaactagtttttgacaacctactacaacactatgaattggtagtatgattttcttactataggcaaattccattaatcaaagtgcagctgatcataccatgtttagtccccaagtacagtgacatggcctccttttacatggttttagaatatggtatgattggtttggctttgcatgtatccctgttacgaactgatttgatatatttttcaaaccaagccaaaatgagttgcttcaatctgtagagggactttctcaacttgcaaactttttttttttttttttccaagtgtttcttcaaaccttgatggcaatttcatgttgacttcttcctcaatgtctcatgaaggaaaacattcttaacgtctagttgatttagtggccagtcctattggaagcaatcacgctttttttctttttcttgatttatgtgtttctctctcaaatttttagggctttcaaatgaaagagtaggagtagggatagaaatagaaagaggagtaagagtaggaactggtatagattacacatccatagtaactggtatagatttcaaaactgatcttcctttctattcctttcccccttgagagaacttagggtgaaataatgttgattcttgaagaaagtgacatccatagtaactaagaacttttgagatgtgaaattgaaatgcttatacccttttcgagatggtgagtaccaagaaacacacgcttagtagactttgggtctaatttacttttggtgcagtatggtcatgaacaaaggcaatgaaaccaaacatttgggtgtaagggaagaaaaaatatgaatagagggaggaaatgcccctttagcatgttcactgaagtttcatactgaagaaaacgagttggcatcctatcgactaacttggaagctatcaacacaactacaccctaatagtgtttaggaacaaccattttaaacaacaaagccctggccagttcaaggtgtcttttttgttcttagccaccctattttgttgggtttacctatactagaagtttcatgaataatcgcattttcatcaatatattttcctaggatttctgaatggtattctttcacattcttagttattggaacttggaattttttttaaaattgattttgaaccattttgtgaaaattttgaaagaccttagctgcatcagatttgtatttaaacagatatgtgtaacacacacaggtatgatcatctatgaaagtaataaaccatcgtgcactatatatgttattcacagaagaggggccccacatatcattgtgcagaagaaaaatgggctagactgaacataaatttgtgtaggaaaaaagacttggtgatgtttaaagagctcacaagtttcatattgaaaatcggaaacatcctccttaaataaagaaggaaataacatcttgatttgaagaactctaagataggatgccctactctaagatgccccaacattatttcatccattcaatttgaagaactctcacattgcagtacctgcggaaccttcttgatttcttttaattcttcttctagaataaacaagccttccatctccctagcactactagtcctcttcgctggacatacctcttgaaattcatggtgagttggggagaatttagctactcaatttagatcacaagtaagtttactaattgagataagattatagaacggatttgggacatgtaggacaaaatttagaacaaaatttttagacatgattatagaaccttttccagcaacagaggaaagagaaccatttgctatttttaccttttgttatcttgagaatattttttttttctgaagaacatatcacatgatctaaggccccagaatcaatgatccagggtttcgattttgaatttctggtatgtaaagcatggataaaattacctccttgggctgcattggctatggaggtagagagattggaaggggaatggttttaactcatgaacagagatattctagttgttccttgctgaaaactggaggtttggatggtcctgattgtctattctgatccttttgccaattagcagcaacttgatggcctcgcttgttgcatttgctgctgcatgttctgtttcttttctcccttccttgtagtttcccatgaagtttccaacatgcctctctcgtgtagtgtgatttttgcaataatcacaccaaaatctgttgtcatcattccttctgttataattctactgagcaccattctagagtttggcagagactaaagctgagtttttgttactgggattgttcatcataactgtcaacctgcttttctctctccttattgcaacataaacatcccttaaagaaggaaggggctttgtcccaagaagtctccctaacttgatcaaatgcattcaaactagcaaggaaataaaacaaccctaggcctttttgcgaacacttttgaaaacagttatcaaaaaatagtttaaaaaaacagttttctaatgttttttagaacaaaatttcatttggtaacttggaatgttttcaatatgttttctgtgtttttaaatctcttaaaaataattttttttgtttgtagtactttattatcaatcattctccttatttgtacaattattttttaaagtagctcccaagaaacaagtgaaaacaattaaaatatgttctaaaatataccctgttttcaaaaaagtgttttttatcaaaagaaaaaaaaaagtcaaattttaaagtaagtttactactaatatggaggatgattaaaaataaagtccaaatttttaggtctcaattagactccctatctttttcaaggatcattttataccttaggttgtcctcaacccattttcagtcatgatcttgatagagatccatctcttaccaaaacgattcatagtgttgtagtacgttgtcacagactggtttccttatttggtatcatgcactcatattgtacaactgttcatcattgcccatattggattaagtgagattgacagcctcccataacaacttagtggtggaaaaaaaaaatgtagcttgattgatcttggtttctgtggaattgattagccatagcattaccatggagttttcagcgttctaggcatcaaatctaggatcagtgagatctggtgtcttctttgagccatccgaaaactcaatcttgccttgtccttgatgtaaacttcaaggacaatgatgctagttctgtccattgagtttgtaagttgtaatatgaattatgggattctcgttggagctcacgaattgctccatgggagtttccattttctcaaacatgacctcagacattgagatctttcagtttaatcagcaatgaaggttgattaatgatgaaagaatctaaaaaatctactttgcctagaactcacaaaaggagctctgagaccatgttgaaatttagggctgaaattttcttattactatattacatatggcataatacctatcaaatatatatatgtattacataatgcataatacacaattgaatatatgtaagagattagctaaactctatgatagaaatcttcaaggaaagaatataagaaaggaaatttttttttatagatattatatagctgcaaaattggcctaaataaggaaataagtaagcctagttaaagtaggagataactagctatctaggatctgtataggctgtacgctagcccaatttaatgggtaacccatgtgtgtgtatgtataaataaaattataaattataaaagaaaactagaaaaatggaggaaaaaaaattagaaaagtaaaaaaccaaaaacataaaaaatttaaaactaaattggatactaacattgagtttaatcatagggatgcttttccttccaacatcttttatttgtaggaacagctatttttattccatcaggaataatcgttctgtgtacaaaatgcacccttggttattaacaagtttaggattcattatttgacaatccttgccctttaactaatcttgtattctggaatatctag

SEQ ID NO: 13330 - DNA, 2104 bp, Vitis vinifera
  Intron number 1 from transcript GSVIVT01036480001 (locus G SVIVG01036480001) derived from phytozome v7.0 (chr-ID chr1 4; pos 22558502 to 22560605 reverse strand)
tcacctggtgatattgcattcaaggtggatatttattcttttttttcctttttttttctcctttttcatgctcatatttataaggctttataatttattttttcaccaagtatacattaggtagaatatggcatccaagtatcagaaaatgtggtgtatggtaaagaattttcagtattgtgaccttctatcccactgctattattttcatgtctattttatgtagaaaaatagaattcaagaaattctaattggtcttctgattaaatggatagtttggacacatgaatgtggacatctaatcttgagtttatacagaaatgagcgctaatgatcttttgagtctggaagatcctgatacatgtttgtaaaaacactctttaacttgtttactgaagtaaaatttacccttaaggatcaacaagcattgatactgaatcactaatgcctcacaagatcaatgacatagaaaccaaaatccttgtgcggtgaaggttttaaaccaagtattaagtgtgggagatttgcaattgcctccaacttttacaaacccaacctgagtcaagacttatctatgggctcaactgtgttcctcatatattagttatagctgaaatcctattcattacactaaaaatgagtctaagagaaaattttgaaatgcattctgtgccaactggatattgaataaatttgagcttcttttggaatttagcttttctatcatgaaaagtcacagtggtcataagagttaactggttatagattggccatgggaccttgacatgacaatgcctttatgatgaattctcaatggaatagatattagcagccctaacctatctgagttttctaagtgaggcatgctaccaagaaactcacattaaaggtgctccaagttttccaaggaaggcatgccaccaagaaagtcacattaaagatgctcctgaactcttcatcttcttcttcttatatttatttttattttcatcaataagacaaagtgctcagattcttttgagaatttgaagcacaaaatactgatttttaagtcattctcctctggttcatctggagcaggttgatatcttttcaaaatgcctccaacagtaggagggaataatctgcttaagagtttatacattttcatcaagattcaatctttgaattattcatactgtcttttgccttactagggaggcacaccaaaggatttatttttcttcttcttcttcttcttctatattatttttttgattggtttctatagaacaacccagtgtttacatgtgtttttttccacatgaatgttacatagatttgtgcatatttgttgctgacaaggcagatccttcacttagcatgctgctgcaatctctttcttttctgctggtgcggtaaaagaacttaagtagaatttatttgtttcagtaggctatatattatgcatgagatggtgttcacctataaagtatgaaatcataactaattgatttctcattctctgattagctggacctctggtcccccacaagattctaccatattggcacaaggtaggtacagttgcgatgttccaagaaaattgaatttctccatactagacttagcatatttgaaggcacaaatcctccaccaagtatgggcattctgaagaaaatggcttccactgaaaatagcaaccaacatcccaacttaaggtgtaggatcactattaggatttcatgaatgacaatttttattttcatttctcttgaagaattccacttcctgttatgctccaattttgacgatgagtttgttaatacattcatacaaacatacctgaacacatacattacatatttatatccaacatacagaagcacacatatgcaattgtgcacacgagtgcacagttgcatgtattgcagtcttctatttcttgtgcagttcccattgctctgttattatgaatttttctttcttttttttttttttttttttgaagaaaaagactgttctaaagttctttgtcatttttagttattccatcttatgaccacccttctgcgttcttttatctacagtcgaacattgcaaccttagacgagaagactggaat

SEQ ID NO: 13331 - DNA, 13912 bp, Vitis vinifera
  Intron number 3 from transcript GSVIVT01028475001 (locus G SVIVG01028475001) derived from phytozome v7.0 (chr-ID chr7 ; pos 8122432 to 8136343)
tttttattggtaagaagtgcttatatttattgtgatatagttttgatatacttgacttggaagatgccttgtagtttatctaggcctcatttaattccttcgctgaaggcgatctacaagttatcattcttttaataggagaagtaaaaaatatgtatgacatttataaaatatgtataaaagggctcccaaaaaggaaaataaaaataggtaaaaaaatgcataaagttgtgcaaaagcatgcttcaaccttgattatattctgttttctaactgttttggcacaaatgcttaaatcatgaatagtacaaaaccttcaagagtcagcctccttttgttgcctgagacttgatgtatgagccttcatgaaagatcatgtcgttagtattgtcaaatgtgaactccatagcatatattattttcatgactgaggataatactcatactcttgttatttatttccccaaccctcttttatgctagtgcaatgtgcccggatattattgcttatttcttatccactttgcttaagtcatggttgaaatggtttttaaataaaataaaataaaataaaataaataaataaataaattggatagttgagtgtgcaatatatgaaaaatatgtcagggggcataatggggagtgtgcaatttacaggtgaggagaagaaaagaaatagagaaggtgctgagcgagaaagggcatgccactccccactaagcctatgtggttcactagtgtaaaggataatctccttcctcccccctcaccatgccctcttaaaaatttcttctgcttagcctctggaaggtgattgatagactcttcattttacctcatacaaccagttaaatgagacttccttactttctcttcataagatgatcaatgaactaaagccactacccataggcagtagagaaatagctgactgtctcttcctccattgtctcactgcactagcattggcaaagattgttccatctgatgaatatctcctcagtttcacctagagacattgcaaacttcatggtggattttgggagaatgtttagtggttgagtgttgtggtagggtgcaactcatgtcatttgcatattatttccttaggtgatatggacagagagagtgaaaagtaatagagaatcatagaaatcctgtgggattctacttgctatcgtactttactatgggtatctgttactgaggagtttcggggaatttccatcagcttgattctgttaaattagagaggggtgtgcaatgacttgacaaagatagctacacctagagttgagcaactccacacctttagtatgcattgaaattcattttgatacccaaactgtgcctattctttgcatggcacaccatcttccacgtgggcaaatgcaaaaccttttcctccttttatagcaacccataaaaaatccttttgcagcttcccaactgggccaaccctgtttctcattgaatatggaatggtgaatgtgaacaaagtgctttttggaagcattaacctctcacttttttgaaaggtatcatgggtttttgttttgtttttggggcctatctccttaaaaagatttctgaaacagggtcccaaacaacctcagatttgaaggaggcacctaagggtaatcaaataagaggatggcaaggatctaaccttgcatcatagtattgctgccaacctcagaacaccctgtacctgagacacaggaagaaatttgctcttatccaagtgtacttgaacacttgacaccacctcagactagaacagaagagcctaggatatttcaagttgtcaaaatgtgccttgcagaagaaaattgtatcatgtaaagtgggtaaaagatggtctttccctcttgtttttcacccccatcaagaagcccttcatggagccaccattaacagttctagtacacgcttactaagatccttccattgctataatgaaaaggaacagagaaggcaatccccttggtgcaatcctttagagctctctaagaaaacaaacaaggtgcttttgactagaagtaaaagtctgaccatgaaaaattctcctcttaatccaattcacccatatctcctaaaactgcaatccagccagcatatacgcaagaaatctcagtcaatgtgatacaaagcctttttaatgttgcatttgaaagcctttgctattgtactcttcaatctcctgtcttacatttgttggtaactgcagttgtccacgatttgatgaccctccaaaagattgttttgagctgcaaaaacatctatgctaacgattgcctgaggtaccaccctaatgacttcacagcaatttataaatcaactgtaaggctaatgggtgtgaaatcccttagttcctttttaaaccattttcttggaaccagaaaaatgattatggtatctaggccattcaactttcctgtcttgttccccctaacagtctctcagttatgctgccaaaataccattgtcaaaccatctaggccaggccttttttctccctaaacctttgagagtcatttccatctcgtcatattcagctacttttggtcgtctgaaccaatatttgttgaagaaaatcctgtcatctctgtcttcagtgtccatgatccgactacaagctcttaaagaatcaagacactcaatatttattgccttcctctttggtttttctacccccgtcagcagcttcccaatatggttggcttggccctctggtttctgtcctgtagaactttgtgttccatctctttctattgtctttccttctctttatgagatatgctttcctgcatcgaagggtgagtcattcaccttgagtattttaactgcatagtttagagcttttttcagagccaagcactagggagatctatgcagtgatcgggtcaggtctgatattcatacacatgcccttgcaccactcagctttcacttgtgagcggtatccatagaccatttggcacttggcagcagtatcatggggcatttgatacctgactgttggcctatatcatgtatctgtaacagcagcttcacttttttaaaaacagtggatttggttccagaaattggcaattcatttgataggtttttttttgcttctatatttcaactgtcttggtttaaataaactaaaaataacagtgctggctttgtacatctttcaactctgctaacctttatgttcctccttttccttaatcctcttccctgcatattctactgtaagcctcttctctcccttgcatccccaaaactgatttcttctagtgcccttgcttttattaatgaaaatgcttccaaaatttcttaacttcactttgggttttattttagatctttcatcttcttttccaatttgaagctcataatactagaaaatcatggatattccactacaacttggtcctgtggccccctatgcaccagcatcctcctaagatcccctaatgctctcagttcctcccaaagcttgtttctctctctctcatgcacttgcctgtaaaccccagaaaataaccatttgaaataatccttcatgtttctaaattgatgagacccaaaaaagcccaaacttagcatcctgctcatcctgctctaagaccacctttgaacttatttagggtccattttctcagaggtggcaaccaatcaagtaaatgtgatgtcagaaagtaaaattttggtatatatatagtgaacaagtattgaattatagtaatgtagagaaatatatatatatatttgctccttctccccataaaatgctatggagccaacaagttgaggaagaagaagcaaggcttcattcttctaacactatgcctaacaagatgatgaccttgtactatgatcattctgatccagctaatccagtcaaggccacccagtacccagccatttcagggtcccagaccttcaagcaagtcactaaggctaatccctctcaaaaggaattagcatcaagctcctctttttcaaacaagcaaattgtggtggctaccaaccccacacctctttcaacaaaatcaagatattggcaaaatgatttaaatcaacctcttttggttattgaaagataatttttctctgaaaaccccagagaaattgctgcaaaagcttttcaagaaaattttcattatccctctggtgatattttaaaaacaagagagttttatgaagcagtccttacagaaactggatttgttaaaattaagcataatgctgacaaattcaacaatatgggtttgacattctccacctgccatatatataagattcttactgtcaagcaatggggtggaaatcctaatctttcaagggaattttctgaaccatcaaagccaaggttttttaattattgggattatcagagagcacggtttaatgcttttctgatctagaatagggacttccatcattcatggatgtctattttccatctaagaatcaactttcctctttcccattttggttctacaattggtggatttattatggtccgactattaagatttttcctaagcccatcctggatggctttgagctattcagaagttcttttgatatccccaaagaactttcagcttttccccctttactattctttttcagcaaatttggccttgcttggatagtccaatgggactatattatcattacagacgaatcagcaatctttccatctctgggaaggacttttaaaactaaatggtgggatgccttgaaaaatgatgcatatattgatgcagtcaagcagtatttcctcaagaaccccacacaagtctcagccagtgatgatatgtctcagtttctcctcaaaaagcaacagttacaagccatgctcgcagtagctaagacccctcaagatttccagaaaatccttgaagaagggagctcaagcttctcctaagaaaattcttatgcagagtctgatgattcaacaagctaccttctagacaatggtgatgactgtgaaggaatccttcctccaataagaagatctaagtaatcatcagccttatgtcttccatcaagaatattttacaagctttgcagtttctacaccaaaagcagcaagcatgtgactacacagtctaaagaagcctgtcagaagtcttctcagccgaaagtaggtttttcggtggatttcggtggaaaagtgaattttactattcactattcactattcatgcacgaggctactattcatctttttgcctatttaaggagacttgatctccatttgtaagcactcataattttagatttgaaacctctcccgagcttatgctctcccttctctcttctttctttttcatcatgtaagccctttaagccccaagctttcttcaaagttttcctcccattgtaagatatttctccttatgtataatataaatatgttttaattacctcctatatggatggtttttaattaagttttgttttcatttcattttatgttcttgtacctcctacatggatggttttaattaagctttgattttaattttatgttttttattcttataccgcctatcatggacggttttaagcttataatgaactaataagcttttgtttccttctctttttaaatttctttggttatttattttgggtgatttctaaccctcttctttgttttgaatcatgacataattcctgttttcattgcatatgaccttgtcctgggtgtctatggtatcagaaccctcgacctgacgtgccaaattcaggcgtgacaccagtgggaactctcactcatgacttacttagtgactagagcgaagtggggctctccgcccactggtgacggtaattcctctgacgggggttacctaggactctgataggtaccttgacatgctcttggaaattgtgggtgtctatggtatcagagccatcgagaagggaagttgggtttgttttgggtgataaacacccaagacaaggtcatatgcaatgaaaacaggaattatgccatgattcaaaacaaagaagagagttagaaatcaaacaaaataaataaccaaagaaatttaaaaagagaaggaaccaaaagcttgttagttcattataagcttaaaaccgtccatgataggcggtacaagaataaaaaatataaaattaaaatcaaagcttaattaaaaccatccatgtaggaggtacaagaacataaaatgaaatgaaaacaaaacttaattaaaaatcatccatataggaggtaatcaaaacacccaaaacaaacccaacttcccttcccgatggctctgataccatagacacccaggacaaggtcatatgcaatgaaaacaagaattatgccatgattcaaaacaaagaaaagggttagaaatcaaacaaaataaataaccaaagaaatttaaaaagagaaggaaccaaaagcttgttagttcattataagcttaaaaccgtccatgataggcggtacaagaataaaaaacataaaattaaaatcaaagcttaattaaaaccatccatgtaggaggtacaagaacataaaatgaaatgaaaacaaaacttaattaaaaatcatccatataggaggtaatcaaaacatatttatattatacataaggagaaatatcttacaatgggaggaaagctttgaagaaagcttggggcttgaagggcttacatgatgaaagagaaagaagagagaagggagagcataagcttaggagaggtttcaaatctaaaattatgagtgcttacaaatggagatcaagtctccttaaataggcaaaaagatgaatagtaacctcgtgcatgaatagtgaatagtaaaattcacttttccaccgaaatccaccgaaaaacctactttcggctgagaagacttctgacaagcttctttagactgtgtagtcacatgcttgctgcttttggtgcagaaactgcaaaacttgtaaaatattcttgatggaagacataaggctgatgattacttagatcttcttattggaggaaggattatttcacagtcatcatcattgtctcaaaaggtagcttgttgaatcatcagactctgcataagaattttcttaggagaagcttgagctcctttcttcaaggattttctggaaatcttgaggggtcttagctgctgtgagcatggcttgtaactgttgctttttgaggagaaactgagacatatcatcactggctgagacttgtgtggggttcttgaggaaatactgcttgactgcatcaatagatgcatcatttttcaaggcatcccacaatttagttttaaaagtccttcccagagatggaaagactgctgattcgtctgtaatgataatatagtcccattggactatccaagcaaggccaaatttgctgaaaaagaatagtaaagggggaaaagctgaaagttctttggggatatcaaaagaacttctgaatagctcaaagccatccaggatgggcttaggaaaaatcttaatagtcggaccataataaatccaccaattgtagaaccaaaataggaaagaggaaagttgattcttagatggaaaatagaacatccatgaatgatggaagtccctattctagatcagaaaagcattaaaccgtgctctctgataatcccaataattaaaaaaccttggctttgatggttcagaaaattcccttgaaagattaggatttccaccccattgcttgacagtaagaatcttatatatatggcaggtggagaatgccaaacccatattgttgaatttgtcagcattatgcttaattttaatagatccagtttctgtaaggactgcttcataaaactctcttgtttttaaaatatcaccagagggataatgaaaattttcttgaaaagcttttgcagcaaattctctggggttttcagagaaaaattatctttcaataaccaaaagaggttgatttaaatcattttgccaatatcttgattttgttgaaagaggtgtagggttggcagccaccacaatttgcttgtttgaaaaagaggagcttgatgctaattccttttgagagggattagccttagtgacttgcttgaaggtctgggaccctgaaatggctgggtactaggtggccttgactggattagccggatcagaatgatcatagtacaaggtcatcatcttgttaggcatagggttagaagaatgaagccttgcttcttcttcctcaacttgttggctccatagcattttatggggagaaggagcttgactgggttgggttttctggttaggagcttgggtattctttttaggggccatggtctcgtgaaccctacaaattccatgagttgagtgattaggaatggaactttctcctttaataaacttaatttgaaaattagggtttaaaataatccaatcagttaaattatacttaaaagctatatacttaattgttttctcagatgtgaaaacaacttttaaaattccttggttcaaaatagcagttggaaattttgaaatgcataaaggaatgcttaaaatatcatttataatgagattatgaatgaattgggtacctaatatcttaggtggatcatctattctaacaagattaatttcttgatcacaaagagtgatgttttcaaattcaaaaagaatttccttatcaaaaagttttgttcttattccttggttatctacccacaagggataaatagagcttaagaagggtattcctagaagggctttttccttaagatccttaacaaggataaaggtttgcttaatacagatgtcatggttacggatatgaacatctgttaatttatgcttaatagcaagtctttttccattggctccaaatagagactgactagtctcttcgcataaaggaataggtacaagaccttcttgaaggcaattttcagctgctcctgaatcaatcaaagcaataatatcaaagacaaatttatctttgactattatagtaagggagacttcccacctttggaagataaccctactcacagtattaaaaaaagtatctgtctcattatcattaacatgagaagattctggaatatccataaggtttccttggttgacaattctatcgatttgttcttggagatcagagagacctaaacttatgaattgtcttaactctttaatctcctttttatactgcttaacttcttcatgaagttccttaatgctgacttccttaggagactgttggtcaaacctgtttaagatatcattaaggttataaggattaacagtcttcttggcttctaccttaacaacagatttcttaaaaacttcataaagattttgcttagtcttttcatcttcaacttttcttaaagtatctaggataaattcctgatcttggcttatgacatttatagttttaggacgacaattacaattacctttaatacattctgctttgtcactagaagattggctagaaacttcaccactactgtctagttgattaatgtcatcttcattatctgaatcagtccttgattcagaatctgtggagtttaacattactttacaaagcatattttttaggtcatctgagacacttaagttattaatcttttgcttaactctacaatcttttttataatggccaactttgccacatttaaaacaaataattggcttgacatctaaaggagtttctacctttttctgggtatctttgttgaccattctttggacatgtcttgtctgcttagtatcattcatcctatagttgtcataggtacctctcttactgtggtaaaacttatctttgctaggcttcctgcttggtttttgcttagagggaggcatagtttccttttggctgaaaccaaactggctacagaatgatccaaattcattcttgtagattttttgttcattcttcatttgttgcttaagcttgaagtcattgcacaacttaatcccttcagctgtgacaatgcttataatctcaccataggttagcttatcataagggatttgaccattatactgttcccttatcttgattctaattctctcagagaaaagcttggctaattctgagatgaatttttctttccaaaaagactggttacaatctgatcttagcatgactttggttaggaagacttccttataccacctaaaatcatgaagtttgggacacttaaggttggtcaagagatctgcagttttatccttaatttttgcaggatctccaatgaagtgcttggatattgagtagattagagtagccactgcatcctctatatcttagccatcttcgtccttaacaacttcactattctcattaatcctataggctttaaggatactatttctatcatcaaaagtgagataattatcccaccaacccttaagctgacctgtaaacccagcaacaatggtctgagctacagcatgatctggcagtctattgtttaatttataggctgtacttaccatggtcatttcttgaagcttagtgagtatgttatactcggtcatactatctatgttccattcatggatagtaccactggtgtatgaggcttgagtatactgatttctttcctcaaactgcatgtcaggaaatgtaggtctaggatagtaattcctagtcttaaaggtttctaaattgttaatatcttttgaaataatttgactatggggttcctcaaacattttaattagttcatcaacttcttcttctgaactaatatcacctttaaccatattgattctcctatgaggctgaacagtcaaaggggcaacaagattatccttaaacttctgattaatcctatcaacaaaagcctggttgatttggggattttcctggaattccttagaaaattcaaaggacttaattttatcagtgctcttagtgttattaacacgcttataaggataatctggataatcctcttgtttgaagagttcaaacaaaatccaaaacttaatatttttcttttcttgtcttaagtaggcatagaattcttcttggtaaatggttctaatgaccttagggacagtgctaaagaaccaatcatttctttgcttattgactttagaatagaagtcctttcttaagagatccttgttgatctcaaagtcctcatcacttaggcttatagtgttaatcatctgggaatatgtaggagacataacaggggactcatcttgttgggattcctgagtagactcattttcctctgtgtaaaatggtctagccacgttggtgtgacttctaacacctgttagcttaatgttctttggatttcctgagctggatctttcttcttccctagtggttctaactgggaaagaagagcttgaagctctagagggttcataaactgaaactctaggactactggaatgtctgaaagagttggagaaaaccagttctcctcctccatcaggatattgaacaatttgttcaatactttcagatcgctgtgcaatggctggaacagcattagcaaaatgccaattttcaggaaactcaacatctttccacaagatcttcttgggaatgatgaaatctgacttatctagcatatccgagtgaaagtaagtggtctcacctttgggactggtgcaaagagccccagatccaacgcttgtgttcatgctcttataggcaaacctggttatgattgaaacaaaattgtttcctggtttgatcttaaagtcatgggtcttaatatacaggacaacaaaatctaagatgtctgcatctcttattctaactgtgaagttaggatagcactggaaataaactgggtcatcattcagtccagcttggactgtgcctataatagaatctcgatattcgagatgcctattatcccttaaacacatgacaatagaggtgtttaaacctaatcttgtcaagggcttagctgctacttgaatcataccaaagtgtatgaaattatagccatctctcttatgcttttcaatggatctgttatctagaagtcttatgacttggtcgtcttgttctaagctaacagacatttcagaggtcttgatggtataatctgtgaagaacttaaaggttcatttcttataaatttcttgattagacaccttgggtaacttccaatcatctaaatcattttggatcttaggataattgatctcttcactgtttacaacagtatcttgagaatcactggatctcctagacatggttctgaaaattgaactcattttagggttttgatctagagcctaatagcagattgacaaaccttatgagacgtcaccccaaccctcttacagcctaacaaacacttatccacagctaacaacggctcaaccggcagggctcgcgctcctaggcacactgctacctatcctaggataggccaaaacacccaaaacaaacccaacttcccttcccgatggctctgataccatagacacccaggacaaggtcatatgcaatgaaaacaggaattatgccatgattcaaaacaaagaagagggttagaaatcaaacaaaataaataaccaaagaaatttaaaaagagaaggaaccaaaagcttgttagttcattataagcttaaaaccatccatgataggcggtacaagaataaaaaacataaaattaaaatcaaagcttaattaaaaccatccatgtaggaggtacaagaacataaaatgaaatgaaaacaaaacttaattaaaaaccatccatataggaggtaatcaaaacatatttatattatacataaggagaaatatcttacaatgggaggaaagctttgaagaaagcttggggcttgaagggcttacatgatgaaagagaaagaagagagaaaggagagcataagcttgggagaggtttcagatctaaaattatatatatatatatatataatatcttcttgaactgatgtagagaaatggttaggaacaagtattgaattatagtgaaccgagttgctactggtttctacatgatagaggtgaacaaatggttcaactgggttcatgttatagaaaagaaaaatgatatgagtagtgcatgatgaacaagaaactaaaggaaatttggatctgtatcaggtaaacaatatttgagccatagcttccaattataaaaatatatctggaattttaattgtagagtacttggaataacttcatcttaaaggtttattgttcctcaataagaggaacactaaaataactcgcaatttaggattttatgagagactgcctttctaaaaataaagattttatgaaaaaccagccgttctacaatctacagtctgattctcattggaattttgtttctgtcttaaaaaaaatacctaatggttaaattcacaaataaaaacaagataaacaatgccatttttacagtaatttatatataaatatcattccagggattccacatgcattatctatactgctccattctgcataaacagtactggagatttttatttgaaaatcatacagttattttaatgctgtgtttaagatttgcatgctaatgtatgcactttgatgattctaggtcttgaagtatgttaaggtttgcacactagttgacagttcagaaataaaaaatgattatgagacgaattcaacagtgtgaaaatagtgatcgataagattgcacatttatgtataggaataggttatttttgaagaccatccttttcatttgatgtgaaaatggccagagcctgtattcggaaaaagtctctcacattttattatgctgtgaactatgtattttaattatttgtataaagatattttatattttaattatgtggacgttgactgatgataattacccaaattttattcccttctgtgatcagggggcaaacacattggtggttgtacaggtgcgttg

SEQ ID NO: 13332 - DNA, 10764 bp, Vitis vinifera
  Intron number 12 from transcript GSVIVT01014864001 (locus GSVIVG01014864001) derived from phytozome v7.0 (chr-ID chr 19; pos 10787334 to 10798097 reverse strand)
caatattagcttatcaacaggtaggcctcacacaattacttttgtactccaattggtcttgttgatagacacattaaacttaattaaatctattgtatttatagaacatttggagtctgaacacaaaggttagcctctagaatgattagaacagaataaaagccattaatcaaaatcctaaatctattaaagaagcattaggaaaagcaaatggaattatctaaatgctaggaaagcacattaaacttcttagtggcttccctaattagcaggcatccagtaagcaaggcttagtaattataaaattctttgcagtttggattagtataatgaaaggaaattgatgtatgtaatagcattcaaggaatttgaccttatttgttttactgatagttctgcttgactgcttggggccacaactggggagctgggtctgggtttctaaagagtcaccaacagccaggtcctccaaaaattgattgctgtttagatattattttaccttatttgttttacttgttagttctgtatgcctgcttgggttaacaattggggagcagggactgggttgctcaagggtcaccaacagctgggacccccaaaagttgctctcttttttagagacagataattagataggtagatatgtaggcaggcaagtgggaagatgggtagatagttaattattttatttacttggggaaataatttgagagtgggcactggattggtaattatttacttattttacttgctgttttatatcctgcttggggcagtaattttgaaggcctccaagaattggttaaggtatatggctgggtatatatagatataaacctatatcaagtaaataaatcaactaactatacctagcaaacaaaaaaaaaaaaatctcaattaataatagtcactttcatgcataagaatacctaggatccagtatgacaggaagtttagtgcaaaagttcaaaaccttctataaatatattctgaagtagttttaaattctgttaaacatttgtaaacttcaagaagttgtttctgcttctaaagcaatcaaattttagaaaccttctaagtttgtgttcagtatgcctgcttagggcaataattggggagtgggggggtgcatttgctaaagggttgcccaacggccaggacctccaaaaatttatctaggcagattgcaagacagatatctgtgactttagatcaactaaatcaaccatcagtagtcacttccatgtcacaacacaggtgccaactgccattgctttttggttttagcaaggcaggaacagcatgaggcttaaactttcacaaatgagacagcagctcctccacttaccttttacgctttgcatgctcacttggattcatgctttaggcaggaagattaggcaattaagaccttgccataaaatatatagcatgtcgaatgcttttttattttattttatttttatttttatttttatttatcgacaacaagaaagactataaatatgtataaagaaaaacatacaatgcttgcactagaggtgtaacatagtacacacaaaatatacaaatggtgtcgaaggataggcaagaagaagatcgaggaacaaaaaggaatatcccctctccgccaccccttactcaaaactaatccaatctgacatgggactaacataacaatttaatccattacacgaaagtattcaagatgatagtttaattgcttgttttgtttctttgttaatcttcacaggtccttctgtttctttccattcggagcatttagaagaagcacactggagttgccctcctaccttttttttttccttcttgcctacataagagccatgctggcttaacaaagttctcattgaggtatccatcacacaaaccataccaaacataaaaaaatcaattgccacagaataataaatgtagggcaatggaggagcaaatgattagccgattccttgtccttttttacacatgtagcacttatttggaatactccattctctccttttatgttgctcaattgtcaatattctgccccatgatgtttcccaagcaaaaaaatattaactttcgtgggaacccaagaattccaaacgtagctagtggtgaaaggcttacttcttcctttaattaaagagaggtagaaggatttaatggagagcttgccatccttggattcctttcactccgaaccatcatcctcctctctctgaactgagcaagcctggagtttttggaaaaagtttgtcaagacttcaagctcccaatcatgaaactggctagaaaatagaggctctaccaaccactttccccatattgcttcgatacatccataatccatgcatttttgtctgtggtaaaagaaaaaaagagaaagacgatggaaaagattcttccaaaaatgagtcatcatatcatttatctttccaaaacttgacccttccattgccaatagagaagcgaactctacccttcatggattctcattcttttttgattgctttcaacacacccacctcataattatctctcccctcttgagcactatcccccttccctaaatttttgagaaataacttgcttctaaagagaatgcctctcagttgcaaatatccaacaccacttactgagaagagccttgtttggaacaacgaggtttctaatacctagaaaactataggtcactaaacaagatgtggtttttttgcaagctatgccccacactaaaggaagtttctttggatttgctcgagccttcgactcacctttttcgggataatgaacataaagtaaattgggagactagaaagtgttcttccaatcaaagtgactctatgacctttagattaatattgccttccacaaagtgaggctcttttgaaaacctctccaagtcttgtgtcgtagatggcttaaacgaatgatccaacgaaaggcctagataagggagcttaccctgcaaaccagcaaagcagctaacatctccatattgctatcaaccccaattgaaatgagctcgtgcttttccatattaattttcaaactcataaaattaatgaccaacttagatcttccaaatgatcttgcctagtgtcatagaaaacaagagtgttgttagtatataacaagtggatcatttcttgcccattgctgcctccaccactcaccttaaaacctgaaatgaaacccccttctcttaccctcaacaaaatttggctaagtgcctccatggccaaaataaacaaataaggaaatgggccttccttagcccttgagaactttggaataagcctgttggagtcccatttatgagtgctaaaaattttccaatggagttgcaccatctgatccatctctactttaatcccatcttctctaaaaccaactttaaaaagtctcaattaacatgatcatatggttttttgatatccatttcacaaagtataccattgatgctgcccttcatcctttgagtcaatgacctcatttgagatgaggacatccaagatttgtctaccttccacaagtgtgtgttggtagttagacacatggacgaacatgttgaaattttttggtgaaatattgccgaaaaatcatgtatcggatggtctcgacacgagatatggggtggagatactgtttgcctaatgtttttgattttttccccattcatcactgataatttggcgatatcccaatattttagcaacatcttggcattatcgctgatttttcagtgtcagcaccatttgtccatttaatggcaaaattaattgggctgtggcgtgcaggatacaacccagcctagttcaaaagtcctacaatatgtaatattagggcccaattgtggcctgatgatctctgctgatgctcagccctattaaataaggcatttgtttcctttgagaatttgatgtgggattgtttcttaaagaaagaaaggcacaaaaatctgcaaggccaagttttgaagctggtcacacctgaacctggtcctcgggtgtgaagcatgtgagcccttgccactgaaccaagtgtgcttttgatacaaaaaatgcgcatgtaatttatatgtatatataaataatatattttatattcatgtgcacacacatgcacacacacatatatatacatatgtatgtgtatatatacatatatacatgaaggagagcaagagatagagggctcgagagagcgagagcgacggaggagagcgagtgcttctgtgtgcgagcgagggtatagagggcgatgtcctctcagggtctcggaaaagcttgaggaagagtagcttcggagtggagtcgaagactttcgaggtcgaggtagaggagaagaaaggcaaactgcaagccacgattgtggagaggaaaagagggatttcttcgtggatcaagctgggaccggagagcctagggctctttgtagaatgtctggttctatgcattaaggacacgagaactggaaaatgggaaagaaaatggaaggaaaaagggagggcctattcgctggtgtgcaatgaaaacaagggggggtgcttccttcggctaggagttgtggagctggagaagaaaaggtttaacatctttatcccgagaggaataggagtaaagggtggctaggcttcaatggcggagacgttacggcgcttgggtgttgcttttggaggaaaggaaagccagaaggacgaggcgatgatgctgaaggaggctaactagtgttgggataacatagagttcaaggtgggtaaggggactaaagtcaagttctggactgatcattggtgtggccatgcggcgttgtcccaaaattttccccagttatgtgccttggcagtccataggaatgcaacggtcaatgaagtgtgggactcaagccttggtcaaggaggttggaatctcagattttcaagagattttaatgattgggagttggatttgattggagatttgtttaatatgctaagggacttcaggatttcttcagaagaggactcagtgttatggaaaggagggggtcatgacacttttggggttagggatgcttataacttgctggttgctcccaatggccccgccttcccgaaaaagtgcatttgggtggataaggtcccaaccaaagttgtttttttttgcttgggaggccacgtgggggaagattctcaccttggataggcttaaaaaacgggggtggcagctctctaatcgttgttttttgtgtggttgtgaagaggaaaatgtaaatcatattcttttacactatataatggtcagagtcctttgggagatcgtccttgccttgtttggggttcagtgggtgttcccagagatagtcaaagaggtgttacttagttggaggggcccttttgtggggaaaaagaggaaaaagatctggaattccattccgttgtgtattttttggacggtatagagggaaaggaatagattagcttttagggggggttttttagctatacagaaactcaaaaattcttttatttgtaatttgtggagttgggctagggtgtatatggaagaggagtcctcttcgctcttaggctttttggagtggctaatggctacttaagggctggtgaggttgtttgttttttgtgttttttggtttaggttgctatgtatactccctgtatgctttgtggctttctgccccttattatattttgtgcttatatataaataaaaaaaattatattattatgtattttatacaataattaaatacaagaaaaatatacatttataaatatttttttaatatttttaaataaaaaaaatactaaatacattctcattttaatattaatgtgttttcaaatttaatatattattgtctaatgttataaatttatcataaatatatcaatttattctttaaaacaacttcaatttctttcttaaaacaacttcaatatacatagtaatgtttttctctcattttttggggttttgattaaatttttgtttgttgatattttttgtcaaaatatccaccgatatttcccaatatatccccctatattcataaaatccaactaccaatatatccgtaaaaatcgatatttcatccttggttagacaccacttttccaactacctttttaagcctatttgtcaggaccttcgctaatgtaaccccctactagactgatgggtttgaaatccttcaaatcctttgctccacctttcttagggatcaagaccaaaaaagtggcattaagacttctttctaaggagctgttatgaaaaagatcccaaaagaaacccatcacctcttgcttaacaaaatccctactcaattgccagaaagccatggaggagccatttggatctggaggcttgtgcctgcacaagttaaacaaggaatccccccaccccccctctctctactaatggatgctccaagctcctaacatctgcactccccagtgctacaaaacttaaaccactgatatcaggtctctaaccccctctactttggataaaaggctttgtattccttctcccttaatagctacctcctcagaaaactactctccatttattcttacccttgtaaagtaattccttctattgcatgcagaggccattttatggaagaacctagtgtttctatccccctctcctttaaccagaattccccatgatttttgtcttcacttagtttcttccaaagctgcccacttgctatacttgtccaccgccgccctatagcatgctaaatgttgcaacgtgcacagtaggggatgttcattaggtagctctttgggagcgacatctgaaaagttcttcagccatccccctctgtatgtagaaaagaaacactatgagcagctgtcttcttcacttctctcattattacagaatatataaccccattttccttgctttctgattgaaaaacttcttagtaagaatgtgaggtgaattcttcatgttatctgcaactgttgttagctttgccactcgatattcgtccatttcagaatcaatcattagcttcagcattacttttctgtttttgaacatattttcttttccacaatggaatcattaaaagctggaaagttttgtgtttttcggccatcaatttattagaagatagactgaccaactttatatgctacaaacctaaactcttaagactccttggaagtaatcacagtaataaaactaaaaaattagcatgaactgataaacaaagttaaaagactcctgaaaatgtaaaacattaatggctttgaaagtaagaatgcttctggctctttgactggacttatatatatagaagattagactctaaggcccaaactatgatttggaatactttggatgataatgggcctagttgagattttatataattcaaggtagatttctgcccaagtatattcaccttgcattatataaaatctcaactaggccaattatcatccaaagtatgccaaatcagaatttgggccttagagtctaatctttgatgccttaacttttacaggtggttgccactttttcataccaaaagtttagcccaaagagtgaaccttttatgcatatacacagaattagttttaaaaattttgttgaacattggtaaatttcaagaagttacttccatttctaaagcaatcaaattagaacctttttcaagttcctgtgttccttggggaacgctgtggccccatctattcagtttctttattctccatctggaattatttggaacaccttttcaagtctggatatggtctttcatgaattctcccttgcagtatattgaattcaattatgcttccaggaaactttcaattgtggccttcatatgttattggccattatgcctgccacttgtattttttatttatttattttttgatagacaacaagatcatgtattaagaagtgccaaaaaggagggggcgtgccttacgtatactggcagtatacacagaaacagcccaaggcacacctcaaacaaagatggactacactaacaaacaaagcaaagcaaagctaaccacaataaagagtatctaggaaattcaaaatagagaggagctctaactccaaagaatccctagactgttcaaaaagtgtctgaatgaagagatcttttaatctttggtcggaaagcttttcatctttgaaggtcctttgattgcgcttcttccaaatacaccaaaataagcaaatgggagccaaacgccaaactgctcttttttttttttcttttgaaaccccttaactttccattgtagaaggagacttctcattgagtctggaaatgcccaaacaaatccaaaaagggctaacaaaaaggtccatagctctcttgtcttggcacaatgaatcaaaaatgtgatcggctgattgttcactatctttacaaagattagatctgttgaccatttgccatcccctcttcattaaagtatctacaattaagatcttcccccaaacaacttcccaagcaaaaaaacaagttctaagatgagcacaggatccccaaatcaccttgccaggaaaaactacactattctccatccttagagaacaataacaagacttgacactgaagattcccttcctatcttctttccaacataaagtgtcctcaccttcttgcacttttaacaggtaaagaaataccaaaaagtgggtcacctcctctaccttccaatcttggaagggtcttctaaattggacctcccaacatccccctttgtccccttctcttttccataaatctgcaactgtagcatttttatgggatgctatcctaaaaagagtagggtaaacatctttcagcttaaaatcccccacctaaatgtcccaccaaaaacttatacgactaccatttcctatatggatagaagatttgacactgaatttttctcacgcttttctagtgtccctccaaaggctcatcctaaaggaatccctcctccctctagtagtccaacccccctccatctccttgaattttccgcaaatgatcttcctccacaagctgtcacgctcaacaaagaacctccgtaaccatttgcctagcaaagcttgattgagactgtccaatcttcttagcctcaaccctccaaaatctttagccttacacacagcaggccattttactaagtggatctttctcccatcttccaaatctccccagaaaaagtctccttgaattctctaatctaattctcatttttctaggaattacatagagggatataaaatagatagggagatttgaaagagtgctcttaataaggactagtcttcctcctttggataagtattatttttttccaagcagctaatttccttttaaatctctactcaattgagttccatacaccacaatgcttcttaggggccccaaggggtaaacctagattagaagtaggaagctttcctactttgcatccaaaaagagaagctactctatttacatcctctgtctcctctactagaataatttcacttttttttttgcaaatttattttcaaacttgacaccaatctgaaacaaatgacaacccatttccaatatttcagttgctctacataatcattgcaaaaaaagaagggtatcattagcaaacaaaatgtgtgaaacttgagtctactcttcccatttccctcaatcttgaaactcctaatgaatcctccctgttcagcctttgcaattaggctgctgagggcttccattaccaacacaaagcgatactgtgaaggagggttcccttgcctcaatcatctagagatcgataaaaaatttgtggggttgccattaacaagaaatgccattctcatagatgaaatgcaaaagtggatccattgtctccatttggggttgaaccccattttttctaaggctgaaaaaaggaacttccagcttacatgatcgtaagccttttctatatccagtttgcaaactaagcttgcagtggaattacgcttcctcgaatcaatcacctcatttgcaatcaaagtagcatccaagatctgtctacctcccacacaagcattctgaccgtttgacaccaccttgccaatcagccttttcaatctattaactaggacttttgcaagaggtttataaaggctccccagcaggctgattggtctaaagtccttcacgtcacctgcccctccttttttagggatgagaactaaaaatgctgcattaaggctacgagtcatggaattctgcgtatgaaactcctcaaaaagcttggcattttgaagaatcaaacaccatttaatttgtgatatatatgttgaatgggctaagcacatgtatttattttacggggtaaatttcattcacctcccttcaggtttggactaaatacacttagctatgattagtatgaaatttcgttaaatacctaccttattttaaattgaaggggaggtgagtaaaaataataaatgagaagggtaagaaaggtattttacaaaattttcgaactaatggtttttagaggtgtttggcacaagcctcagggtagattagtgacattagcccttattttatgtgcataagcataccagtgattagatttcctactggcataataacctttcatttctttcatgcattcttgtacttctataatcaagtttccttatttcttttctgaggtgtatcattttcaactttaaactaacgttttttgttctatctctgattcctaggcactggatttgaagcctaatt

SEQ ID NO: 13333 - DNA, 1750 bp, Vitis vinifera
  Intron number 4 from transcript GSVIVT01008224001 (locus G SVIVG01008224001) derived from phytozome v7.0 (chr-ID chr1 7; pos 4497406 to 4499155 reverse strand)
catttaaaacatataaaggtaccagaatttaagtatcatgcttgtagttttgttaaagcacattaaactggatttaccattttaaagaatctagaagaaacaccttcattgtgtacttgtagttttatatgtttcttatattttgaaccatgttcaatgaagtgttagtaatgtagaaaataacctacttttacttgattcacttataagtgattctatttgaagacttttttgcttttttgggaggtcattgttttctcattccccaacattgcttgtccagtaatgattgatgcttctctttttatgctactatttgatccttgacatacctaaacttgtgctgattttaatcctatgctgtttcataattggagaatttagtggtttcaggctgatagcaatattagttgtatgatttttttttagggcaaataatatgatttatatcagtagtaaaagaaattgtaccatggacagtattttatcagttgctatgcctccacttagtgattgagaagactttcacagtttcacttgtagaccattgacatagtgctgccaagtttacatcagaacaatgtctgtactgtattttaccctcccaaatcaagtttgttttgattttttcaactaaaagaagtgatatttctagaactatgaatactagtcttttgtagaacactttaggtaagtaagatcaactcatttccatttcgttgctttcaagtttctaattattccacaacatgctgttaggatgaggaagagaaagagaaaaaaatgttgatcattgatgagatatgaagtgatggatgtccctcttttatacaatagtttccttcttgttggaggggaacttgtgtcattggagcactggctttcaaaaggtctctccaagattgggagttagaattggtggtgatatttggagtgcattcagtctgtgggactgcaagaggtgaggacgattaggttagtttggaggggtgtaaaggagtggattttcctggtgaaatctttttataatgctttgtctttggtagccttaaatttttttcatttttcttttcaatctttcaaaggaggtgtggagctcaagccccccttcttagggattctaaccatagaccaactaaagagaatgggatgagccatagtaaactgatatagtttatgtaacatgtgcggggagacagctaaccacatctttatttactgtagtaatgcccagttgctgtcagatatcttgtttgcaattcttggatttagtgggtttttccaaggacgatcagggattttctactgagttgtggaggaaggcgtagagattgtctcctcttacagaagaaaaggaatgacaaaatcttcaaagggaggaagtttctgatcagatattgaaaaaggtttttctcaaatctctctgggaattggtctagaatcccctcaggggtgggttaatatctgttggattccattgatcatctatgctatgctagggtttgaaagctgtccctgttttttcttctccttttcttgtccttttcctagtactctctgtatgcgccatagttacgtggttggtacctccatttttatttggcactctttttaatatatttctctattttcctatcaaaaataaaagtcatgtccttgttattttagttgaagtgtggatactggggcttttgatttctcagcgatactgttataacttaagaactgttttatttgccattttgggtag

SEQ ID NO: 13334 - DNA, 2666 bp, Vitis vinifera
  Intron number 1 from transcript GSVIVT01030896001 (locus G SVIVG01030896001) derived from phytozome v7.0 (chr-ID chr1 4; pos 18552798 to 18555463)
tcgtgcttgccgctttcacactgctcattttggcggtacccccttcctcctccttcttcattgtttgtttgccgagaaaaattggagaaatcataaccaaataagatgcagttttttattttttttaaacattcttttttttgttcactcgttttctcagcagccaatctcagcgttagggttatgtatgtacacaagactcaaatttggatactctttttgcaattgcaaatctaggagatcgtattgggtactggaaagagactgataaaaatttatggtgaatggtttgagatcgacattatttatttatatttctttttcttctgaatcttattatttatggttccagtggccttgtggtttatggtgggtgggtttgtggtttagtgcccagaaattgatataacgagtgggagaaaaggaaggcggatagtgtgggtaagttgtgagatagaggttttgggcattgtagggggttcatggatgaggaggaactttcaggatatgttttctattcggtgggggatgggaggaagacgaggttttggcatgacaaattctcggaatgtatttgttgtctgctggggataggcagaggctgaggtttttgcatgttgagcttgtgatagagtgttactagtataatttctggaacttttcagaattgctgtgaatagagaagctactgagctgaatgttgataccgttcagcttctaggggtactggatcccatggtttgtagagaactctgtgactggaagttcaagtttgaattgtggattccttcataaagcttaattaagcagtgaggtccttagaatctcaatgttttgagatggaagatcactgggaatgggtggtgcttttctttatattccgttttaaaggatgagttgggatggagtgaatgtggaatatggactgtatggtttcaatttccaaattagagggaaggtgtgagtgattgaatagtgatggtgaagaatataaatgtcaaagatcaagcccatgttgcatgggtttgggtacgagtgcctggtgcaggtatgcatctaagcatctgatctttcacatctcaaattttagaatgtagggactcgactgaaaaatgctcttgaatggtacatagatatgatatcataaggggaaaaaatcaattggaagtcgatcaaagcaaaaaagaaaagaaaaatatccttgaagaaaaaaacaatttcttttttttctcttttatcctttttcttggaaaagtaaaaaattagtaaatatccaaagcaaaagaagagcatctgaaaaggatccctacacccataaccttgtcatatcgtctcaacatgggtacattaagcaaaattgaagagtttggatattacagggtcaagcaccaaataaagccttgattttgaatttgaggatgagttttctgcagccaggtaaactggtgcaacctaagcttccctgtcttccaaaaggaatcagacaaaataaatcttggacttggaaatgatttcaattttaggggtatttcttttattgagcttggtggatgtaactatatatctgctggagggaattcttgctatcagtagagaatagcttgtacaatggaagcaagaagctcattaatgatacacgtaaatattactttgaagtatggtttttatttttcagtttttagattatttggccaaaattaacaaaaagttcctgtgctgacattcattttggaaataattcccttggatttaaaagaatggacatagtaagctgtgaaagggtggtttctaaattttttattgttgtggtctgaaggcattgtgggcagagacaatcttcccttctagcttttgtagattgtttgagatgtaagccggaagtgtgttgtttctattttctttttgctatgtgcttttgcatggcttgtatacttgcattgcactattttttctggttaggtgctttctaatataatttctcttatttacctattaaaagaggggattacttccatgggaaaatgaacaaagactagcttggtagaaggcacatatgtggctatgtatactataaaatggaatgtatctggaaatttgaagaattcatgaatcatcctttagtcctatgtgggtattttggtctcaccgtcatcttgtcagttttcttaaatcaaatagttgataaatttgagaagtaaaaaggaccataatcccattttgttgtttagtaatcaaatggggctcttgaatactaattcaagttgaaaatggtttagtttgcaaaactgagacatagaagaatgctgccaggttgtggctaaagttggactataaaaccaaggacatcatacgtaaccaagagttttaaacttaaaatttactgaactcaaaatgcaatagcattggctttgcaaaggtcattaacttgtgcaaatcataaaaattaaaggggaaaaaaacataacaggaagggattccagctgtctattgaatattactaacttctgaatctctaatttcttgtattagcattatgcttatatcatgcttctacatgatggatattttaatgccacttcattcccaatgctctatatcacctcatctcttttccattctccataccctcaggagaaacgaagaggaagttcgagagcgtctacaca

SEQ ID NO: 13335 - DNA, 11240 bp, Vitis vinifera
  Intron number 1 from transcript GSVIVT01032362001 (locus G SVIVG01032362001) derived from phytozome v7.0 (chr-ID chr1 4; pos 26720949 to 26732188 reverse strand)
ctgacgcttcgttttggtcgagctctttgttcaaggtactgttccactctctattccagttcaatcgatcgacttctacgtttgatacgatcgtttgaatgctgaaaaaataatgagaaaatgaaagaaaattttgaatcgtagaattctcaccatgtagggattgagaagatagaaaattgcactttgtctaaaacttatatgactctttggtttgttgatccgagttttttaattttattttaaggaaagtgagagagataacatagtaactaaaatatgtctttttttttttttttctttcattttcttcgtaaccaaccagagggtcggatttcactcgagtgctttataacttgtgaatgctattgctggaaattttgaattttagggttctctttcaataaccgtggaactattgtcagtttggatgactgaaatttttgttagattagcggtctttgccatctcggaatgttcgcttgcataaaaatagatttagtttacatacagagaaaatatgaaaaaaaaaagtaacaagattttgaaaggaacaattttcacaagcgatgactcgggaatacagaaaaatgccaattaaaattcacactgactgtttggcttaattggtgtgacgggtgtttttgcttttttcatctttttggaaggaaaagatgggagataacaaattattgaaaatggtgttttcttttattgctctattttcttggaaaccaaacagaggagttttctctttgatgcttttaacttgtgagtgctattgtaaaaaattttgaattataggatttcattttggactacaactcaagctagattttttataaaataaactatatgagaacattaccttacataattatatatatatattagatttggcttgaatattcactaatttgtttgctaattttactatgtaaacataaatgatatctactatgttgcaagtgaatcccaatataaatggaagtatttggaaggaaaggaagaaaataaaaaaaaaataaaaactcttatcttaaaaagagagagaaaaaaaaaaagaattttgaagtgcaaaataagtaaaatgaatttaatttcatctgctataacccgtgaataataaaaatgtggagtatgaggggaaataagtgatatgactgaggtacattgggaagaaaaaaagtccatgaattcttcataattttatatattgtatggatatggttatagatatagatgtttaaacattgattgattttttatcaaagtatttttgatagaagtgctgaaaagtgcttttacgagaatcacttaaatgagccgccttatatcttatgcgaggattgaaagttgatgttagcaatttttgggagatattcttaggaaaaactattttggatgcttgttactttccaatcacccacatattagaatgctttggtcccctcttggtgaagggaatgaggaaaaaagcgataggaaatttctttggttttggagggatgtgggttctcattaaaggccatgataatgagattttggaagtattaatggagattgatgtgagaagaggtgagcaagggtttaaatagctcaaatcaaattaaagaagtaggtaataagaacctgtccaagaaagaaagtagttgagaatgcaactaattgttaggtttttgccctcttgaggaaaattggaggcttgcatgatccaaataagagcagagtgattaaatcctttatgtgggggaaaaaccatagttgtgaaaggcgcgtcttggctccaagcggcttgacgcaacccttcggcgcctcgcctgaaggcaagcgacgccctttcacaaaggtgctgcttaggcgtgcaaggcgctcacctccggcaaggtgcgatgcggcccacaggtgcgccttcacctcctatctctttcttctttttcttcttccggtcttcttctctggcgacaggttgccaagggcaaaaagaagctttttatttttatttttttattaattgagaccaaaacaaagtcgttttggacctttaatttttttttttcaaagggtcaaaacgatgtcgttttgttccccgttgtttgaaaagaacaggccaaaacgacattgttttggagcctgctttttgaaaataaaaaacaggccaaaacgacactgttttgaccctgtctttcattctagcccatttttctggtagttttcaacccgacaacacccaaaacattgccttagcctctgctgtgctgtgaagaagcgaagagaatgaagaaaaggaggaaaaaatagaggaaaaatagacttacctttcctaaaccttggtgtttaatgatgtttttgaactgtggacaaattgcatgttttggtttggaaactttggatttggatatgtatcggcaatcatggtgctttgtttttatgcttggagttctttaattttatatttttttgttgattaaattgaaattttagataatatgtgatgatttatgtgtttaagacaaataaatgattattaaatttgattatattgtataaaaacatatatgtaaattagggtgcgcctcacttcactaaagcctgcgctttaggtgctccttgcgccttaggctccaggagtactttgtgccttggtgtgccttgagccttttaaaactatgggaaaaacgcaattttgtttgtttataggaaacaaaaatcaattaaatgacccttgagataggtaggagcttgggcttaggttggagtttaggatagagtatagtgctaaaagacacaagaggcatctaagttgtctcttgatgcttaggcttaggtgcaacttagggcgagcttgagtttaatgaagcaaaatctagggcgcatgttaatttataaaatatgatccaaaattcaatccaagtaataaagaattcaagaatttaaaagatgcatccaacaaaaaactattgcaattatgcaaacttttgatttatttggaaatttcaacagtaaaagtgttaaaaaagagaaaagaaaataaaaaagaaaagaaaagaaaatagatgatgtgggcctcttggtaggcaaagtgctatagctagggaattgttgtgccttgagctagccttgcctttaacaactatgggtgaggctatcttgatgctagggtttagccaaagggattctattgatgtggggttgcaaactcttggaatgcttggaaattgaggtagggtagtgtagattttctttgttatttagaaattgtggatccaatttcatttaggggttcataagtatttagggtcttgatggggatgaagagaatggagatatgggaggagttgggctccattaaaggtttgtgggaagaacatggtatttagttggggaattctatgtgattcaatatctagtgaaaaatgaaattgtagtcaaataacattagtgataagggaattctcaaaatctacaaaggagttttgagttggtggatcctccactaaaaggaggtgtttttacttacaatgagggcttgtctaaacctcatttgggccactttaggaggaacaatttcctttgtatccaaacaattatttccaaggcccatcttagattatctcctgttcctttgttttctttttgttggggcttggtgttaaaagtggagggctttgaggattttgacaagatttggtggtggagttatgagtttaggggcaatcccaattttattcctgttaaaaagctgaaaaatatgaaggaacatgtaaagaaatgatattgaaaggtctttgacaatgagactctattgttttccttgcttccctttgggctttctgctccaaggcatttaaggggactccccttaatgtgattcaattggattggatagcggtgtgtactccataaggattggtccttagtgggagttcgtttgttttatgtgtattttcctgtaatttagttgtatttggtgggaggatttctcatccttcttcttgtacttcttttttctatcaatatatctttgtgtcgtttccaataaaaaaaaaaaaggtctttgacaatgtgtccctttaggaaagatgcaacattggacaagataagaggtctttgtcaatatgtcctttaggaaagaaggagttttggacaagataagatttttagatgttgatgagacaagagtttgagatgttaaagaaagtgaaggaccttttgtcttaggaggatgaggataatccaaaagcggtagatgataaatttagtcatttagccattttagagaaaatttctcgaagacaaaaatcaaggcctctatggcttaaggaagagaataaaaacatgaaaaaatttcattgcatgactagtgattattggagaaagaatcttattttatttttgataagcaagcaaagaaatgtattaacaacgtttagtaaaacaacacatcaaagtttcaaaaggggcatacgggggatgttagaagtaggctcaaagagaataaggaatcattttccaaggaagtagattcgaagggtggggtttgtcatttttttttcattttatacttgagaatccacaatgtaggagtcttaattgtcatagacttaggtgtttcttaagcaatcatgtgacacttagacaattgaaggttctagaagttgcaaagttagtcttttccaaatttagctttcaatgataagtaatgatacatgtgacataaacaagagatgagcaaagaaggcaataattagagagttttgtactcaaatggactttacaatgctttggaagcccctaagtgcttcgtgctttggctaaatcagaccttctcctatttataggcacatgtggaactctttacaacccttatggctccttataattctagaatattctatatgtaaaaattctatagaatactccacacaactctaaggactcctacccatttgcagagatgagtagatgtctctagcttcttatggaagcttcttacccccatataagctcaagtgaggggtaattttagtaggttgtgacaaaatgctaaggatgattttatcaatttcattgatgacttggataaagaagtttggaagttcctttcaaggaagaggaggtatttactaccttttgaggtacggttgtagataacccatgtagtgttgatgacttttcaatggctttttggtaggtttgttcactacattgggaagagaaataatggagttctacaaggggttctatttgaatgaatcctttgaataaagccttaatgctatttttctagttcttatccctaaaaatggtgaacaaactacattaaagattttacaccaatcaacttacatgggggcctatataaactcataatagaggtgttagtgaatagattgagaagggtgattgcgaaggtagtgatgaagtctcataatgcctttgttggaggtagaccaattttaggtgcagccttggttgccaatgaagctattgatataaggaagagaagctctagggtgggcttagtatgcaaattggatagaaagaaagcctacgacaatgtagaattgaatttcctcctgtttgtcatggaaaaaaatgggattcaacaaagatggataaggcatattcattttttatatcaataatgactaatgaaaatgtctgtattggttaatggttactccactctttgagagaggatttccttttacttttaagtctaacttcttcataaaatgttagagtggcagatcgtgggaggttaatgagtgtggaggtcattagctctttctttttagatgactctttcagggataggaagatgattaatttttaaggctcattcatgatgagcttccaagaaaaaggaaaacctatcaaaaaaaaaaaaaaaaaaaaaagcttccaagcaaaaggaaaggataatatagggtgggaggaaagaagggaagtttccaagtaaaatcttgttataattccttatgtgttgagaattcaaaaggagccttaggaagtttggggtacttgtgttcctttaaggatatgtgtttttttttttttttttgcttgggaggatgtgtgagggaagatcctaactattgatctctttatgagtagagggtggaaaaggtaaagagatgcaatctttgtaaatttaatgaagaattaatagatcatcttacctaatgtaagtgaaccaaatagttgtgggacatgttttttttggctatgtttaggttgtgatgagtattactagataattaaagaaatcacttgttaggatagaagattttagaaggataagtggtgtggaaatgaggctttgtgtgttttttttccctctttattttccatagcggtttcaaaagaggcacgagtggtagatgtttggggctccacggttaaggctggtggttggaatatgagtttctctaggccttttaatgattgagagctgaatattgtggaacagttcctttcgagaatccaagaaaagagggtgtcccaagacttggaagataaggtgctttggacaaaatcaaagagcgggatgttttttgtttagtccctttatgttgctttggagctagaaggtgtagtcccatttacaaggattatcatttggagcccttacgtacctttacggcgggtttttctcgcttaggaagcattgtgaggaatggccttaactctggattaggtgaagaggaggggctaaggggtggtctttagcaaatagatatttccttggccatgttgaaaaagaaaccatagatcacttcattgcgttaaggctagggtgttgtggcagttactttttgctctttttggtgtgtcttgggtcttacccttgttgattagagagactctccttggttggcatgactgctttatgggcaagaagcgcgaaaaggaatgaaagacatcttctttatgcatcttttagacaatttggaaggaaagaaatagaattgcttttgataacgaagagcttttggtacaaagattgaaaaattcttttgtttgtactttctggtcttggacaaagtcgtgtatagatgacaaatctctttctctaattaatttttttgattggttgggctctagatgaggacgagtgagattttttgtggctcctccttttggtaggttttgtctttaggcaacaattgtatacttcctatatgctttgggatgccttttgggcaccattttttcttattcaatactatcttgattttacctatccaaaaaaataaaaaaaataaaaaaaattgaattgggttggtaatttgcgtaataggggtattgttgtaaagttgttcaaagctcgattctcttagcttagatgatttacttgtcaattcataattagtataatatgcctttagaggttgtatttactcgcactacggtgcaaattcggcatgaggattgtaaaaggcaattcaatgcttcagttggaaaatcttgtaacaagtcttgaaacatcttggcgcccttctttagggggttttaagacaattgcttttacctatcaaaaagtcttgaaacatcttggcaagggctgttttggatttaactcggccaagtagtacccttcttgaccgatactttgaaccttgcattttaatagtaggtagccttgataaagcaacacatgcttagagaaaaaaaaggaacaagaagattttctactttttgctgaccaagatacctaagatatgtgaaaaaaaatattttgtatttttgccacccaagatatttgaaagatgtaagatatgtttctattatttgaagttgtttggtcacttgtaatgaaatttggagtcattaggagcattagtgatggttgaagttctatgtagaatatggtttgaattagctacttattgcttaaagatttacctattaaggaatagatagtcttggtttggaaactttgattttaatacttacaataagactcaagatgatgacatgatgttattatttacataatttggagttctcttatgtttctttttttcttctcttcttttctttttccacctttatttatttatttatttattaagaaataaacaattcattccatttaattacaagaatatataaataaggatgagtagtccttaaaaaaaagggaaaaacctaaatctaaccaaaaatgagaaagagtagtagaaaagaaagcaaactaggaactagaatggataattaccaaaaacccttcaaaatgaagcaactctttagacaagaaccaagactacggttgatggagatagaaattcctccaatcatacaactatttggccaaatccttagctagatgatctgatatttaattagttaagaaaatctaagtgaaggagaaacacaaaagtttagcatttgttgagttatttgatgcaatcatccttcatacttccatgaaccttgtttttactttaatacctaggagatccaatagtagaatcttgtaaactatgagagtgcacaaccctaaagatctagcccaaacttattccttctgaagaggcttaaatctttgactcaattgttgatcctagtccaacaagtcttagagaaagctcttagcataatactattttatccctaatcatgattgcaatcccttgctacctgggttacccaaaaagcaatgatcaaactttagcttaagggcacctagtagtggaggtatctgcttagcttgtacctcatcatcactcctcccaaacaaagagtagtatgattcaccgcaatggaactttaaaaagactttgttactaaagccacaaaggaagatagataatgtataacctcctataaacaaccatcaacctcatctattcaaatgtttttggcatttctctcaaactagattattagatcaaagcaagatgtgccactctccacataactctataccactttgtcaaaagcaaaaggtgatgtcaaggtgatatgactctttttagcataaggcgaaaggtgaaaaacaaggtgataacttgactataataaggtgataaaaaatatatatatatttacctattcgatacttaaccaatataagtgttgtcttcaacaattagcactattaatttttcattgcttatgatgtcttataaagttaacaaaatagtaataattattcaaagcgttaaatattatatcctatattataaaaaacatcatattgtttagagatattcatcttgtctaaatgcatattctaatttttcaaatatctaaaaagcaaaataaaaaacaaaataagagattgaacattctagagaagctctaggcatcgttgaaattaaaattgtcatcacttccatcaagactagattgataggcctctatcttattatctctatgaatgataatataatatttcatcttatactttgtttaatccaatgctagattgaatgaaattatgattgaggtatgtttaatcttaactcatggtcaaaggtgattgcctctatgctttgtgccttatcccaaggtgattgtctaggcgttgcctctttgaagtagccttgcctaggtctttaagaagtgacctttatctgccttgccaggcttgatggcctaggtgatctaggcaatcgcctttgataacactgatcttagtagacctatggactcttgaaaggcaacaatcatcatgtctaccaaaatcctgggagggaccaaattgatccttacaagtgaccaaggaggatgaattgtttgccatttttttgtgaaggtgtcacaattaattactcccgttttttttttcttttgtaaagataaaacaaattctattctctcctatttactacctactatagcaatgaagaatcaaattattactctatttattcctttcaagagtaggagattaatggatctcaagataaaataaaggttggggaatttagtccaaaacagtccattgctcatctaaaaaaactcttttgttcctcgctaatcaaaataacaaacatgagacaaaaaatctggaagatcctcagcaatagctttctaatgacaatgattcaaccatttgcctatgatttatgttgcaaaaattgtaatcgagtgtttcttgtcttgttgcaaagtgctttgggtaattgtttgttgtttcattaactgtcttacattaatagtaaaatttcttgattttcttcttcatgcatttctttttaattagttaccttcatgcatatgtagttatgtttgtaaattattattatcatttttcacgggaaaactttttttttttgggtcctcactaggactcgatcctaaacctcgcacaacctcacctcaaccacttgccacttgagccaagcctcaagcgtagagttatttttgtaaatttgtagcacacattaacattggtgttagtttatacaagtttaatgttatattcacatggattattgacatatgtgtgttgtgtgctatgatcaatgttctacattttaaagtttgttaccatcctcacgagaacttcaaaaatggaaaactaataaattaaacacatattttcattcttccatcattattagtcttgtcagcatcaaatcatccaagtgatatatctttaattcaactaataccttctcaattttcgttggaataataattacactcaaacatcatctatcaaaaaaaaaaaataattacactcaaacatcaattttttgagagtgcctttggcgacatgcgcacaatagtttctgtatagtatcatccctctcccttcctttaatttttatcatccatttttaatctttaggtacagcttaaacagtaataaaataaccttagggcctattttaacttgctcatacctcagaccttgggttgtttggaattcaaagtgcaacaataattgtcatgcataatcaataaatgtcatgtgtaaccaccatcattgtgtgcgtgtgtgtgtataaaatgcactaagttctgataagcacctttgattttatataactttacatgaaacaagtgttatgttgtatgtatcatatctgtatcataattttttgacaccttcgatatataatgttttaatttgcaataccatttttccttctagaaggagggaaggcttgtattgagcccttcccttaattacttatcactaaagactcaggattgtgttctaaaatgtgctgataaactattgttttcatttgcagtgttgggggtttccctttcac

SEQ ID NO: 13336 - DNA, 8098 bp, Vitis vinifera
  Intron number 41 from transcript GSVIVT01037040001 (locus GSVIVG01037040001) derived from phytozome v7.0 (chr-ID chr 3; pos 8507734 to 8515831 reverse strand)
tttggcaacagaacttgctgctttggttagtttctttactgccccattggtccctatattatatgtgcaatattcttaggcttacagctttctgtattaagatggctgcttgctttttttaaatcttcctatccaaaagaaagcagttaatagaaaacaaaaattgaaaccactcacatgaattattgtattttttttcatcaaagtaattttttttcatgtttattgctaccgttttcaggaatgaagacatctttagggcatggttaagaaaaaaagaggggactcttttagagtcacatgtttttacctgttattgtaaaggcttgcaagtgaactcacaatagttaccaataaatgaatagaaaattcaaacccgtactaatattttgtcaaaaattaaattgaaagaccttaaaggggagaggaaccagatacctatgctaactgtttatacccgaaaaatttagaaagctcaacttgcataattagcaatgatactatggatactaaatagtgctaattgctcaggattctgatgttatggatattgcaagatttatattatgtagatttgtttgtgaatatattgatgttgatgttagatagaaataatttcagttaacaaaatgttgagaactaataaacaaaaggaagtcatgtgtcaaataaaattcgtccctaacaaccatattgtgtttaagatatttatatttccaagcttgaattttcttgtgctattcaataaaaaataataatgaaatggagcagtaattgactgcaagcctttattacattgctcattaattcctaaggttcttattaatagttaatgcaaaaggttgtataaatttcatcaagtgaagtttggctattgttgaaaactagaaaattgatcataactgacattacaaatttatcttggggattctaatgtttttcctttcaattaaaataaatttattacattcaaggaaaatatggcaacaaacagagactatggattgtaattgcctcctgggcttcaagaaaattaccaatatggagagatgacatagagatactaatttccatcaatttgggtggccattttgaagaagtttgctttgaacgattatcatccatgggcttcaacaatttcgtgtgctcaaaacttcatcttgagggaaaggcatctcttgaaggccttgctccctaacttaaatcttaaattgcaaaccatttaaacactgctttttctacctgtattatgttcagatagttgtagtttatgaagaacggtatgcgtttctactttctgctcaacaattgatcatcagggggaaggattgctcgtccttctttatatttagcagtcaatgaaatgaacatgtttgtttttaattaaaacacacacagattttgctagaagttaagcctctttcccatccacatggccatgttatgaaacatagtgtcattttttcttgcccaaggggatccaaatggcttttcaacttctttctacaattgatagtttcaactcttccatccttttgtatatgcattttatatgtgaacacctggctagttgtattaccttcctctatactagcaaggagttctgtttgatgttataattttggggtttctcctttcagttatgtgattacccatgcagaatatagaaatcagtatgtatattaaagacgaacagatatgttataatgaaggaaaaatagagtttcaacaggaatggaattgggctccaaaataatggagaacagggagcatagaagattagcataaatggagggagattagtttgatacagaaatctagagcatgatgtttaaagaggggaccaaaaagaccagtttttccaaaggctcatcggtgtgcatgggacaataatcatattggaaaattagtggttcgtggtgaatggaagtaagtggatggaatgaggaatttcttctaaagattaggctgaatcttattgatggagcttgaggctattggattacatcttggttcaattggttgtgtctgcatagcttagctatggaggagttttgagtaaaaggaggttatgagaatgtgagctaaatgacactgaatgaggcaatccacttgttgagggatagagaggccctcttcaaccatcctatctctaagaaaatctctctacaacagggtcccaaaatgatggagctataagatcccctcctagagtattatcattgttgttgctggttacttcctcttcttatggttcaatgcttattctctgtctttgcttctgtgggttagcttctgttgagagagagagaaagaagaaaaaccttaattctcattcatgtaatatctacttacaattgagaaatatatatgtatatatatatacaaggctaggagtcctaactaccatacatgtgacctatattaacaaggaaagattatacactataaatacattatattcaacactccccctcaagctggagcatatacgtcatatgcaccaagcttgttacaaatatatttaatcttaggacctctgagagatttagtgaagatgtctgctagttgatcatttgaattaacaaaacttgtagcaacacatcctgatgcgatcttctctctaatgaaatgacagtcaacttcaatatgtttggtcctttcatgaaagattggattggatgcaatatgtaatgcagcctggttatcacagatgagtttcatctgttcgtcctttccaaatctcaactctcgaagaagatgtctcaaccatatgagttcacatgttgccaaagtcatagctcgatactcggcttcagcgctagatctggccactacatcttgtttcttactcttccaagatattagattaccaccaataaaaacacaataccctgaagtggaacgtctatctgtgggtgagtcagcccaatctgtatatgtgtaaccaacaacctgagtatgacctctgttctcgtacaacacaccttggcctggtgtacttttgatatatcgaagaatgcggattacggcatcccaatggctatcacatggtgactgtaggaattgactaacaacactcaccagaaaagaaatgtctggacgagtaatggtgagatagttcaatttacctacgagccgtcaatatctcctggggtctcctaaagactccctttgtcctggtacaagtttgacattcggatccataggtgtgtctaccggtttacagtctaacataccggtttcttccaggatgtctaaagcatacttcctttgggaaaggaccacaccagaattggattgagctatctcaattcccaagaaatacttgagtttccccaagtctttggtctgaaagtgggtaaaaagatgttgctttagtttttgaataccatcctgatcactgcctgtaatgacaatgtcgtccacataaacaaccagataaatacactgccccaaggagttatgatgatagaaaactgaatggtctgttgtattgcgaagcatgccaaactcttgaacaacagaactaaaacggccaaaccatgctcgaggagattgtttcaagccatatagagaacagcgtaacctgcacactaaaccagactccccctgagcaataaaaccaggaggttgctccatataaacttcctcggcaagatcaccatgaaggaaggcatttttaatatccaactgataaagaggccaagaacacatagcagccatggagagaagcagacggacagaagcaatcttggcaacaggagagaatgtgtcaccataatcagaactataaacctaagtatagcctttagcaactaagcgggccttaaggcgatcaacctgaccatcaggaccaaccttaactgcgtagacccaacgacagccaacggtagatttaccagagggtaaaacaacaagatcccaagtgccattagagtgcagaacagccatttcatccaccattgcctgtcgccagcctggatgggaaagagcttcatgggtgctctttggaagagaaacagaggatatagcagaaataaaagcagaatagggtgaagataatcgatgataattcaaaaaattgtaaataggatgaggattacgagtagagcgagtacctttccgaacaacaatgggtaagtcattaggagaaggcagagccggggcaagcgaagctgaagggataggaagtgagtcagcaggtgcctcagcaaaagggagaggagcaacgacacgagggcgacgatgataaacctgaagtggtcgaggaggcatagcatcaggtggggagacaatgggaatgggcaagacttctgaaacaggaagaaactcagaagtggtggaaaagaatggtgagtcctcaaagaaggtgacatcagcggagataaagtatcgatgagtctcaagggaataacaacgataacccttctaaagtttggaatatcccaagaagaggcacttcatggctttggcggaaagcttgtcctatccaggagtgagaatatgaacaaagcaagtacaaccaaagacacgaggaggaaggaaataaagtggttggtcagggaagagaagggagtgaggaatctgatcgtgtaagatagaggagggcatacgattaatcaaataacaagcggtaagaacagcgtccccccaaaaacgaaaaggaacattactatggaggaggatagtacgacctgtctcaacaagatgtcgattcttgcgttcagctaccccattttgttgaggagtatgagcacaagaagactgatgaagaatcccatgatgagacataaacgaagtaaatggggctgaaaaatattccctggcattatcactgcgtaacacacaaatagaaatattgaactgggtttggatttcagcataaaatttctggaaaatagagaataactcaactcaatttttcattaaaaataaccaagtacatcgagaatagtcatcaatgaaagtgacaaaatactgaaatcctaaagtagacgcagtccgacaaagaccccaaacatcagtgtggacaagctcaaaaggagactttgcccgattattcaaacgctttgggaacgagacacgagtatgtttcccaagctgacataactcacacggaagcgatgacaaagtggaaaaacgagggaccatcttctggaactttgagagactagggtggcccaaacgattgtgaatgaggagaggaacatcagtggaaatgcaaactgcaggagatgaatccgaggtgcgtcctatgccaatcgtcttccccgtactccggtcctgcaatgtcacaaatttatcagaaaaggtaataaagcaattaagagtacaaatgattttgctgatggaaataagattaaaaggacatttaggagtataaaggacagaagtgagaggtagagaaggcagaggaagggtcaaaccaatacctttagccacagtttgagaaccattagctaaggtaacagtaggtaaagcagaggtagtagtaatagaggagaaaagatccttattaccagataagtgatcagaagctccagaatctagaatccagggtccaagagaagatgtgtgggtaaggcaggcaaaggcattaacaggctgggcaacagaggcaacagaagcctgagatgcggaagagctcggaggctgaggtagcgaagaatcagaggactaggccacatgggcagtgcgaggaggccgtccatgtaactgatagcaacaatcgcgagtgtggccaagtttattgcaataggtgcaatgaggacgttgacctctacctcgggtaccactgcggcctcctcgagagctagtttgagaaactaacatagaaaaatctgaagtgctatcaaatggcaaagtctgagtggaggagatacggaggaggcgaacaaacacatcatccaaggacggaactgatgaactaccaagaatctaatcgtggacaggctcaagatccggacggaggccaataagagtaagaaccatgaagaacttgtcaagctgtgtttgttgagccccaacatcaggagtaagaggcatcacagtcaagaactcctccttaagagaagcaatctggccaatataagtagatagatccaagtcctgttggctgatatggacaatagcataagccaccttataaagacgctggatatcattcgtgtataatcctttggcctgagtccaaaatttaaaacaagttttgtaggcccgaagatgaagaagaatcttgggatcaaccaattgccataatacactacataactgtgcatctatcttcctccactgtacgcggtcaacctcagggatatctgtctcctgtgtaatcaagtgatcctcatatccttgacccataaaccaaagttcaacagaggcaaaccaggaaagataattgtcactgccaaccaatttctccgaagtaatcataggagatccagatataacagaggaaaaaatggaagttttagtagccatatctacttatctggagaatgaagtatatttggatcgaagagagccctaatacagctgcagatcgcggcgtggcaccaccggaaaggtagaagaacacttccttaggcacgtgcagggattaggatggagaaaaagtagccgaagctcgccagaaaaactgtttggagggtcggcggaggcaaaaaaccccaaaagaggtacgtgcagggctcggatggcagaacctgggatgaaggaaggctagttggcgtcaggcgaggctggaggaggaggcgcgtggccgggaaagtcctcacgcaccggcgcgtgagatgcagtcgctggacagaaaattgcgcgtggccgacgcgtggatgatcttttggttctggtgccttcacaaaagttggagatctcctccaggcgctccttctggtatggtcggtgtcagaaaaagacgtcgccagaaagttcgccggaaaattttgccggcggtgagtgttttctgacgacgatccgactgaccggaaagtattgggagatggggaaggtgaccggaatgaaacacggtcaccggaaggtttcccggagttgatgacacgagaaactggaaagaattaggttttctctcttggctctgataccatgttgagagagagagaaagaagaaaaaccttaattctcattcatgtaatatctacttacaattgagaaatatatatatatatacaaggctaggagtcctaattaccatacatgtgacctatattaacaaggaaagattatacactataaatacattatattcaacagcttctaattgattggtgtattaaagtgtaggcccattagcaaagactctttggaccactctcttttccatccttaaggaggcctgaaaggaaggaaatgctagttttgatgaagtggttgttgattttattgaggaaagaaaaaggctctgccttttcagctggctttcttattcaacctgctttagaggagtattaaaaatgatgttttaataatgagagacggctatgttttgttagttttcattttttgcacctggccaggctttgttattgttgctgccatcatcattgttcagctccagcataatgtatcttttttttctttttttggatgcatatctaaacattcttcgaggtttatagggtacctcatccctatcggagatacttttaactgatattcaatataaaaagaccttattgtccttaggttgtcacaacacaacatgcaacatgcaacatacaggtatattattttctctgatcttgatcactagcacccaaacatatgttgatacaatgaattatttggtcaatacgaagggagttgaaaagaaatgtaaaatttatatataatatctgaaacagttataactttaaactctgcaatcatattcaccactataaaacatggaattaaggcctagcactgggatttgtattgagacttctgttctcatccagatacctgcattgaggtttttctgctgctgtagtgacgttcataatatggctcagttcatgaaatgacatcaaatttctgtccaatataagttctaatgtctgaatatttttttttcttgtttaggttctagagagct

SEQ ID NO: 13337 - DNA, 3541 bp, Vitis vinifera
  Intron number 4 from transcript GSVIVT01012457001 (locus G SVIVG01012457001) derived from phytozome v7.0 (chr-ID chr1 3_random; pos 1145317 to 1148857 reverse strand)
aaatccgctgctggcaaaaaatcccacagatccaggtaacaacatgaaggatcaatgtgtttttatgaaatgctacaattgaaattttgcttttatgaaatgcagtagcgaaaattttgcttttatgaaatgcaacgatggaaattttgctttaatgaaatgccacaaatgaagttttgctaacacatcaatataatcttcttccatttttgtaattacatttgacatgcattacatttattgtgggcacgcatgtcttttatgtgtacacacgtgtatatttctttctattgccatggttacacgttcctcttgttaagcaataaaaaatttgtggctaagcttaatttatgcaggacaatttgtgtcgaattgggtatggaagaagctggttgctgcttctttttcccccttccattgtgttggaggggtagggttatggaaaggagtatggaattgattgttgcaatcgtctatgatctgagctcctagaagcacaaaggatgagtgggtatgggaatagcttgccgcttctttgttttcccctttcatttggattgggttggggggatggggtagggatcgtgttgtgtgtcaacatattgacttgaatgatgcagtaccaaggccacatttaatgacgctttgcactcatgagtgtcaattcagcaaggcaagttaatggactgaggtttgataagagatcatgtcaaggcttggtggctgctcaagcaggcagtagataacatgtggggctagcatgtagggcacctcaacttagccaaaattcaagtgttggattttaggtggtcaatatttcccttcaaagaggtcttgagaatggtttccatgaggaattataatttttttagagtttttatttttttattttttaaaaattcattatacgtactcaagcacctataatgtgtcctagtattttggaaatggttagaatgttctttatggagaaggtagttaactcaaaggtggtgaggattgcttgagctatgtgatgtgaaaagcatgacataggggcttcaaacatgagtaagaggtgatggtgaccattgctaagaacatacacatggacacaataccatggggtgtggtacaacttgtgggcataatgacatagggtgcagttgtgaaacatagatgagtatggttgtgaaaccatgtcatgcacaacccttttgaagaggcctgctaaggtgtaaaaaggttgtgccttgagctaggtgcaaggccctttaaaggccaacctttatttttttaatttttttcttctcttaaccaaaataacatcattttgtattagtttttgtttttctaaaaatttgtaaaatgatcatgtggggaacccttttttttttttttttacttttttaaaaccaacatcaaaactcatcattttagttaaaagtgaagaaacatagccaaattaaagctcgatgatggagaaaagaggagatggaagatgagaaaaaaaatggaaagagtgaaaaagagatgcagaaggatgagtgacatatgacatatttggtggttattatagttattggattccttattcacagtgtactcataacccaccctaatattatgatatttatactcatgtttttatattttatttattttaataattttattattaatggataattaggtaactacactttaaaagttgaaactacatatttatctattttttaattttttttaaaattgaatgtactacaaattatttttatttatttattaactatttataatggtaatgataaaggaagttctaaattatgaaagtattggtttatatgaattttttttttcattttttttaatttttaactaaggtaatatttttatgttatgcaatattttattttactttatttattgggcactaatcatttgcttatttatttactgagaaatctacctatttaaaatcataactaaagttactgaattatttatttatttgtttgttgagtatatatgcatatacttgctctttatttttcaattttttttttgttaaatgttaattctttggctaaaatttgatattatatgtataggaaaaatccttgcatgttaaaatctcctatatcatataaaattataaccgttattatttcactaaagcctgcaccttgggattgtgagccttaagcagaccttgggattgtgagctttaagcacaccttgtgccttttaaaactatcatggtaagtcaacatcaaacatctatttaaagaaatagaagaaaaaaagagaaccttcaattgtgatagagaaaacaaagcctttgtacatggccttgaagaaacaaacaaaaattgttactaaatgttacataaggggaagagaagtttgcaaaatacaagatgaaaatttttgaatgatgaaaagactatcttcatcctcaactaactctctaccaacattttcttttggaacttcccaccatgtgcactctcaaatccaatctcccaatattttgattaattagaatttaccaaaatagaaattgaattattccaaggctcttctacccatacttgcttaaatttagtaggatttgtatcttatgcacaaaagactgatattttaaattccaatgatttctaatcatactccatattttttccattattaaccgatctagagcttgatttagagtaagataatttctctttggttggcttaagcttcttgtcaaatccttgcaaaggctagtgtaaatcttttaggtagaagcctattagtgattaaaggttcaccttaagtgctggcatgtgccctagaataccaatggagctttaagctatcaaattgaaacatactgatttcattctcctacaaagataagtatagagctattacttaatcatcaaagttcattgttaaatattcatggcctttgatccaactccttctaacacctacaatagattgaatgaaaatcaaacaaaaacaccatgaaacccgaagaatgacattgaaatgccccttccaatgttttagaacaaatcattccatatattagaatggaggtcgagatctaagaatcaacctaatcttaaccccattcaactggtaaatctcactcattttatcaaaactacacttaagctcaacaatccaaacttcttagttgaatttcaaattaagttgaaatgatgttgtaattttggaggttgggatctaagaatgaacctaatcttgacccctttcaacaggtaaaaactacacttaagctcaacaatccaaacttcttagttgaatttcaaattaagttgaaatgatgttgtaatttcattcttatcttaaatagcactagtttaattttggaattttattatgattgattggtggaggaaagttgaaattttggttgtaatgtaatcatttatgtatgaaataggtgtaaaaggtgtttattatggaaaaatgtcatctcttatggtttgcttaaccattttgttttgtagattctgagactggaaaacaaagttggttggaagct

SEQ ID NO: 13338 - DNA, 3936 bp, Vitis vinifera
  Intron number 6 from transcript GSVIVT01022867001 (locus G SVIVG01022867001) derived from phytozome v7.0 (chr-ID chr1 2; pos 18591442 to 18595377)
aagaagttagagggttcatattctctaaaattctggtttgttatcctgaaaagtcccttaaacttttgttcagtttgtaatataatattacctacttctacctaaacctcaaaagtggtgtgaagctacttcatggagttgtttttttatgtgagccatttctttgttttataatttttcttttttaaatttattttttagcttttattttattaataattacttttgcatcttccttcctctgactgctcaacattaatagaacaccaaacatatgagaagacaatatatctaacattgaagtcctgctagtctgtaactgaaccttgcctagaaggaccgttaaggggattaacaaaggggtataggaactctaaacaataacaagtgaagtagcatattggaaattatgaaaaataagggaatttacatcaaggacaaaagcgaattatcatattaacaaagacggtttggaaagagaggaataggttagcttttaggggagggtctttagctatacagaagctcaaaaattcttttgtttgtaatctttggagttgtgctcaggtgtacattggtggggagtccttgtctctcttaggcttttggagtggctagcgtccacttaagggctggtgagggtgtttgttttttgtgttttttgggttaggctgctgtgtatactccctgtatgccttgtgactttttgccttttaatctattgcttgcttatttataaaaaaaaaaaaaaaacaaaagtttatgtaagggaatttactaagggggtgctttttttttttttttttacttaattctaaatagaacttaaaactaaatagtacttaatagtgttaaacattaagttgtttgtttttttaatattttatttctattaagtattaaaaagtaaaggaaaaccaatatattacttttaacattcagaaaaagccaaatattttgcctttttctattcaattaaaaaatttaagaaagaagtaaagtcaacagaaagtgaaaaaacaatctgaatttgaaagtaaattgctttcagcaaaaagtaaaaaaaaaaaaaaaagccacctaagtctgtctagctcagcattaagtgaatttgcaaagtctatttttgagaatgggttaaagtgtacataagttactatggaatgttctttatagaatttgtagattgactgagcttcctgtaaggagagggagtttgttttttgttttccctttccttggttagccttttggtgtgtattgtgtgtacatcaacaggtctcctcttaggtgcttctaatatattttcttatttgcctatcagaaaaaaagaaaaaaaaagggaaaaaagaaaaagaaaaagaaaaaaataatgcttgtgtgagaccaacttccaaccattggttcatggtttctgagttttgaagaccaggaaatttcttacctctcttaaccctttactgaaacagagattgaaaaggagaaggaaaatttagaccatctgcaattaaggaagacaagtggcaaggaagcacttccttttgttcttttcttttcccgcaatatcttggaaagttaatctgtagcttattgatgttttggagttgtgattaggtgcacctatagttgctttgggatccttatttaacttctatacagttcagaacatgattcagagaattttagttgatcctgaaatgttacagaaacacaagtttggaaatgcctttatgtttttgtaataagtaaaactggaaaaggaaaaaaattaagcatattagagaacaatcctttttgggtgtttgttaggtatcaatgttagtgaagaccaacttctggctttagcttcccttttatattgttgggtctttgataggcctatgcccgttttggttttcctataaggagggaatccaactgtagtttccctttgacatccagtcttagaaaggatttcttgaagcttataaatgattggaagagagtctacttttcttttggtgacagaatatttcattcgtcattggttgttactcatttctattttattttctgtcagtttttaaaattccattaaaaacgagttttgggattaaatatttgcagagattttcttgcttcaggaataggggaaagagagaattcaccttgtgggttggaaccttgtgtgtagacctaagagggaagggtgtaactgtaggtatgatatccccaaggaaggaaagtggccatggaggtttccaagggagaagtatgctagatgacacaaggtgaatttgagtatctatgggtcacattctaacgattaggatgcgaacactattatcacgccattgcattgttgcctaggaaggttatagctcaaatcgcctttgatttctctctttactcatttggttgtgggtgacgaaaaaaaatccacttttgggaagacacttggtgtagtgagttacccttttgtctttaatacttaaatctcttttgtgtggcaaggataagagacttccatgcttttgttgattttgtcacttccacttcctctttttgtcttggaactttaccttatgctgagaccttttggattatgaaattaaggaaccagattttattatgtcttttgtagtctaagtgtatctattaccttcacagcttgatgtgatagtttggtctttgatctctccaagtttgtacggttcattcttctgagctcgtctgaattctatcaaatccatttcttgccttttcgaacattattgggagatctaaagcccctcctaaagaaagacttttgtttgacttgtagcttggaagaagattaatactaattatatgcctagaattggaggtctttcaaggccttcaatttgaagtggcgtgtcatactcaaggggagtgaagaatcaatgaataaaaaatggtagacatacaaaattttggtgacagatggacaagggagtttaggttattcgcttttcagaatagccttttccaataatgctacagttgcatatttatgggataccggtggaggtggtcattgggaggttcaattcggaagacccttccaagattgagagataaaggagctaacccaatttttagatcttattcaccctttgagagtgcaagaagacactttttactttagaaagaggatgggaggggaaattttagtgtcaagtatactataaatccttaagtgcttagggtaatatagtattcctagccaaagagatttgaggatcctgggctcccttgagaatgtgttttttttttcttttgcatgggaaactgtttggaggacaattgtaacagtagatatgttaatgaaggagggatggtccatggtcaacagatgcaacctttgtaaagacgatgaagaatcaaccaatcatatctttgttcattgtgataaaacaagagtgctttggacttttcttttagtagtctttagcttgaaataagtgttcccagtttcagtgagaaaactccttgagtggagatttaaggggctggataagaagagaagaattgttgtttggtatatggctccggttttcttattttggtgcatatgaaaagagtgtaactgatagattttcgatgaagaagagttctcagatcaaagattgaaggagttcttgattaaatcactattggagtggtcccatgtatcattggaaatggagggcccctctattctagatttcttagatgctcttccttgtggatagcttggcttgatttgtaggctgttcttgttcatgtcttttggtgctggtattgtgatgctctacgtacactgcctggatacatagggtgcacccctctctttggtgctttttagtccatgttggtgttgtctatcaatttccccccctcactactgtgtttgtcaatatgcaggaacgcaaacctgagctgtcatctgagata

SEQ ID NO: 13339 - DNA, 4799 bp, Vitis vinifera
  Intron number 3 from transcript GSVIVT01024321001 (locus G SVIVG01024321001) derived from phytozome v7.0 (chr-ID chr1 6; pos 852255 to 857053 reverse strand)
ccgagaggataatagttgcttccattgtgtttcaggtatgggacattttcctcctcaactgatatttcattttaccctctgaaggaacaaaaattgttcatttttctaattctgcatgattttttttaatgcttaattatcttttttattgtttgggctgtctatattttgatatggcatgaaaatgtgtttgtttctgataaaaaagaaaaaaaaaaaagatatggcagcatgattacatctaatgggattctttttgataggcaaaggtagaatatattaatagtgcctaacaaaaggcaaacaaaggtatgtcatgatgaatacaaaggtgccaaaatggccaaacaatgctaatggaaaaacaaaaacagctccctcatctcacttagagcttaaccaatcaatgaagtccaacatggacaaagagttatcaccagtctacattctaaaccacttccaaaaaatacacatgaaagtttgtttgattatttggtccctttttttcaatgttttcaaaagctctcctatttatttatttccaaattattcaaaataaacacaaggggcagctctccaagctttcatcctctttttctcgacacataaaccattccaacttaaaaaggcctttctcacagtagagtgcatcacccattttatcccaagtagagcataaataagatgccacaacgtgattgctagtgaacattgaaggaggatatgatcacttgtttcttcattgcctttagacaaataacatatattttaggattctccatcctctccttctaagttggtctaatgtcaaaatcctctacaagtagcttttcatttagagaaacttaccctcatcaggatccaaggattccaaatcaagcttgtagggaatgcctttgaatttcaatggaaaaggggggaataaaaagacttaactaagaaaatgtcacatcttgtgttctgctaaaccatcctatactctattccattgcaatgacaatgcctgcagattcctgaaaaaggcttccaccttatctaattcccaatcatggatccctcttgtgaacctaaggttccaacacccacccttcctaatttgctcccacatttcggctacccatgcatttctggtggaatctattgagagcagcgtatggaaagcctcacctaagggttcattcccacactatctgtccgtctaaaattctaccattttcccatttcccatcttgaaggttgttttgcttttaaagccttcccacttgctcttgatagccttccacacccccccataccttgcccaaactcttttagagcaccatcctccctcttctttcctatagttccccgaaaataaccccttgcaaagggagttgctctcgcaagcaaatctccacaacctcttgctaaggaaagctttgttaaggatggacgaccttctaattcctaaacccccgcttttcttctcttgacaaattgaggaccaatttgccaagtgcagcttgctcttaaggtcccctccctcccaagggaagttcctttagatcttttccaacttgaaactcacctttcttgaaataatgaagagggatgtggagtaaattgacaagctagaaagcatactcttaattagagttaatctgcctccttttgataaatactgtcttttccacataacaaatcgtttttgaaatctctccttaatcatatctcaaactcaagttgatttgaaaggagttcctagtggaaggccaagatatctataaggaagggttcccacgctagaacctaagaccttagcagactcttccacattggcaactttcacaataggaatttactcacttttctccaaattgttcttaaggcctaagattgtgtcaaaccacatgacaattcaactcaagtattccattttctccttaaggataagtgaatcattggcaaaaagcaaatgggacacctccattccatttcctccttttccacgaattgtgaaacccgagatgaacccctcttcctttgcccagtttaggatagacgaaagagcctacatatctagataaagagatacggggatgaagtatcaccttgcctccatcctctagaattttgaaagtaacttgaagggctttcatttgccaaaacaaagaaccaagctgtagagatgtaccacttgatccaatttatccacttggggcgaaaacccattttcttgaaaactactaataataagtcctgattgacatgatcaaatgtcttttcaatatccagtttactgatgatcccttattgacacatgtcatcctagagtcaatgattttattagtgatgagaacaacatttagaatttgccttccctccacaaaggcatatttgaaggccgagactgctttacccccacttttttaagcttgttggcaagggcttttgctaatgacttatgtaaacctccccttaaactgattggtgtgaaatcttgtcttcaatacctataaaatgccttttcaatatccagtttatagatgatccacttatcggcacatttcatcctagagttgatgacttcactagtaatgaggacaacattcagaatttaccttccttccacaaaggcatactggaaggctgagaccactttaccctcacatttttaagcttgttggcaaggacttctactaatagcttgtgtaaatcactccttaaactgattggtctgaaatcttgttttcaacacctttttttttttggaaactaacactatgaaggtggcatttagacttctttgaacagtgcccagcttgtagaactccctcaaagagcccatcacttcatgcttcacaaagttccagctgaattgctagaagaccatagagaaaccatctagcctaggggtttaatccccacacaatcagagaggggtgaaaatacattgtcctccaaaaaaggagcccccaaacgtaccaaatcttctctatcaaattttaaaaaatcactccattgatacttggtctccattcccctacttggaaagaaggcattgaaaagcattagccaccccctccttagtgtttgcatcctttgacaatgtaacatcgtttacctaactttatctaaatagttccttcttctatgagcattgatcatcttattgaaaaactttgtgttcttctctttaggagtataactaaaactgaaaaaaccaaagaattgatctaaactaatcatatcagtttgattatcaataaccataaaggttggttcggtttgagaattttaaaaactgactttgacggttcgatttcgggtttccttatctccttaccaatataactaaaccaaatcgacattttaaaactaaggtcaaaacgacattcaatatttgatgggtttttttataactttattaaatttcactattcttggactaaggtcaaattaattttaaatgcattcattatattttaagcttaaaagtttaaatatattttggactttaaatccaagttggtttcaattcattttaaaaacaaattatatttaagatctaaatcaactttcatctaaccaatcatctaaaccgaaccaaactgaccttaatcaagcttggtttggtttggtttggtttttccatcactaaaaggttagttcggttttggttcaaatgtaaattgaccatgtcggttcgactaatttttcccctaaaaatcaattgaaccacatcattttacatgcctacttatctccctctttaagtcataattttctagacttttgtctccaccaaacttcctccgttgccttccttttggccaattctctttaaataaatgaatgggttctctttcctttgtgtcctgataaccaatttgattcagggctactgctttgttggtggcaatgtttctaaaaacatctctattccaaactttaagatcatgctttagggctttgagcttgccgccaagatgtggctatatgaacccccaattgagtagctactccactaatttctaatcaggttcttgaacccttccttgttcagtcacatattttcaaaaaaggcgttccactcctcatgccccctatatccaataaaatgggagtgtgatgggacactggtcttggcaaaacacattgggtcaagccactgaggtgattttcccactcttcagaaatcaagaaatgatccagcctagaagaagattagttattcaacccaccacacaaagtaaaaggatcacctgccaaggggaggtacctcaagtgaagctcctcaatgaagattgggaaaatttatggttgctaattttggaggctttgtctctgtttttccctttgtagtttgttgaaataatttaatgggtgtcaatggtttgcaaaggttgaaggtgggaagaggaaacctagcaggattatgcaatgctgttagaaactgtgtccccttcagtctggactatgtaatattttagatgatgggccagtttgactttgcattatcaatctaagagtttttcagagttgtgtgttaaattctcattacttttcatatcattcatttcatacaagaaatggaccattcttgggcaaatcaagattgaattgctttcgtttttgaagccaaagcatctccttaattccatagtctaatttgagactataaatcctagttataatgaaaattctgatatcaaaattttcttgagggatgtcttgataaatgaatttaggagtttccatctccttttctttcttaatggttctcagtgtttatgaaacaggatctgaaggcatcttgg

SEQ ID NO: 13340 - DNA, 8188 bp, Vitis vinifera
  Intron number 3 from transcript GSVIVT01023127001 (locus G SVIVG01023127001) derived from phytozome v7.0 (chr-ID chr1 2; pos 22302157 to 22310344)
ctgagcaaatgtaagctgtacatttatactccgtgcttgaatagccaaaattttcttttatagtgggcatttgcactgtttagaggggaagcaaaattaaattattggtgcttctgcaataattttgttacccacttttgaagtcagaaaaagcagagtaggttgtacaatttccatgatatttatttgattttaaaaatccagaggattttatttcactggctgtaattgctaattgtttgtttaactttttttgcatctaatgcttggtcctttcaatatctactctaatgctcattatttttttgttttaatattcacatagaaaagaagagtccctgtatgtacaaactctgctgattttcagtctctgtatgaactttgaacctatcagaactgagatctatctactttaaagtatggaatgttaggtttttttaaatttagttctgtcaactccttttcattttccctcccttgaggtttcatctgcttaacgtttcagcttattattgcactaatggtcttctttgttggttagatgaattgttagcttggatttggagcaattagcttcaatatctggattttggagagtcaatctctgtttcaataggtttactaaattctccgtttctgatttagttaggtaatgttacacttcttagttgaattggattttcctagttcaatccctgacttggatgctgggaaatagagaaaaagaagagaaaatgaaatctgaacctcatttaactgttttttggatttgaaaaacaagagcattaactcaactaagacaaataccgttggcatttggttcttaatggaaaccctttgtttgtttgcttagaggacaaagggaaggaagataaatcaaagtttttagttttatttatttttttagctttttctgttctggatcagggaaattgaaaaactccatttgactgcaacaatgattgtgttggattatttttagattcagtttaatggagtttgtagtttttgggtttaatgattatatatatatatatatttttgataaagggtttaattttttttttttaatgatagataaggaaaagttgtatataaagaaaagatgggacactaaaaacaatgccctcaaagtttataggaagtatacaaaagaagccaaaaggctcaaaccagagggggatggataaaaacaaaaaaatcacctgcccttacttagagtccaaccaattaatgaagcttacaaacgaaaaagggctcaaatttatagacaccctaacccaaaaccaaaggttacatacaaaagaatttttcaatatttggagcgaaagctcttcattaccaaacgctaacagattcctttcattccaaactgtccaaaatatatataaaggggctgcttgccaagcctttttatgagctttacccacaaatgacccatgccacccaagaagagtttccttcactaaataagaaagaatccaagacacaccaaagaggaaaaaaagaagattccaaagaacccgagtctttgcacaatgaagaagaaggtgatcgaccgtctctacttcaaagaggcaaagaaaacacctatttgccaagaagtacctcctcttttgaagttggtccaaagttaagactttcccccaagaggcctcccaagtaaagaaagccacattaggaggcgcactcgatcttcaaatactaccactagggaacaaaggagaatctccgggctccaagatagaataaagatacttgaccaaaaaggtcccacacctcgaaactaaccaaatcactctatcttccacatccttgtgcaccttaaaagcttggatcttttgcagaaaatgctccatcaactctaactcccaatcattaaaggcccttgagaaaagaggggtccatccacccccatcaccattaaggctccaaacatcggctacccaagcttccttagactaagaaatggtaaataagaaaggaaaggactcacaaagtggctcatctccacaccacttgtccatccagaatctcactctgtgcccattacctacttggtaggccaacctaccactcaaataattccacttcttcctaatagctatgcacaatcccacaccatatctgtcactcacttcgcgggagtgccaccccccatcctcttcaccattcttttgattgatgagttgcttccaagggggggcccctctttcattgacataccaccaattccacttgctcaagagagctatatttattaaagagagatttctcacacccaaaccacctttccttttctccaagcaaaccatgttccacctaacaagatgcagtttctgcacaagagctccaccacctaagagaaaatccctctgaatcttctctaatctcaacctcacttgtcttggcatgcaaaaaagggacataaaatggatgggcatgttagacaaagtgcttcgaattagagtgagttttcctccttttgagatatactgtctctttcacattgttagccttttttgaaatctctcttcaacgctatcccacaccatcactgatttgaagggggcccccaaaggaagacccaaatagcgggaagggataccacccactttacactcaaactccaaggccaagtcctctaaattaagcacatttcgcaccagaattaactcacttttctccaaattgattctcaaacctgaacaagcctcaaaccacataagaagccagcttagataagtcatctggtcttgagatgcctcacaaaacaccaaagtatcattagcaaataacaagtgcgagatcagaatcttctcaccactcctacctctcaccctctaaccagataaatagctcccactaatagccctccttaagagacaactaaacacctccatggctctcacgaataaataaggggagaggagatcttcttgtctcaattcccttgaactttggaaaaaactagaaggagatccatttaccaaaacagaaaatttcacaatagagatgtacctttccacccatttaatccatttctccccaaagcccatctttctaagcactgcaatcaagaacttccaattcacatgatcatacgctttctccatatccaacttgcacaacacaccaccttcattgcttttcaaccttgagtccacggccttatttgcaatcaaaactgcatctaaaatctgtctaccctccacaaaggcattttgggactccaaaatcatttttccctttacttttttaagtctattagtcaacaccttggctagcaacttataaaggctgcccacaagactaatcgacctaaaatctttcaggtcttttgcacatcccttcttaggaacaagaaccaggaaagtagcatttaaagactttacaaatttgcccccttcatggaattctctaaaaaacccaaaacctctacctttacaacatcccaacaaaaaagccaaaacgccatggtgtagccgtccgaacctgaagctttgtcattgcctagatctgagagagttgcaaacacctcttctttcgaaaaggaagctccaacctctcaacctcattgctatctagcaccataaaggacaacccatcaatacagggacgccacccccctttttctaaatagaggttatgaaattccccaaccatactagtttttaaatcattctcctcggtaaaccagcaaccattcactttcaccttggacaactagtttcttctaatgtgagcattcgccatcttgtggaagaatttggtgttatcaccctcctcctttaaccacacttcccttgacttttgtctctaagagatttcttccctcaaaacccaagtcttataagactccctagcctcatttcatgcttcacactcttccagattcaaggctgaaactttctccttctcgtcctaatacacaacctggctgagagcttctccctttttagcctcgatgaaaccgaacacttttttattccaagccttcaatactgctttaaggctctcaattttgcgtctaaaacaaagctgaaagtcctagtaaaattaaagcacacccaccaatctttgaacccctccacctctaaccacatgttctcaaatctgaaaggagagagtctctcttcatacctcctcaatctagcagaatgggaaagtgatcaaaaatcggtttgggtaaaacaccttgcacaaacccattaaacaggctgtcccagttatctgtcactaaaaatcggtcaagcctgaattgggattggtttttcaacccacccctccaagtaaatggacccacctacagaggaatgtccctcaactccaaatcctctaacacttctgaaaatctcctcattgttgaagataaccctcctcccctactatgtttttcaggaaatcttatcatattaaaaaccccacctacacaccaagggtcgctccataaacctcttattgccccaaacccttcccaaaagtcctctctttcccttctacacaccagtgaacacccacaaaaccccatcacagttcttgaaatgacacaaaattgagtattcccctttttccaagtcaaccaaatcgaacaccctattatcccaaaacactagaatgccactagttgttccccttgaattgactgcactctagtctaaatgtcttcccaccctaaggctacgcacaagctcaatagtcatttctttaattttggtttcctgcaaacaaaccacgtccaccctttgagattttatcattgactttattatcttccttttatctctgtcatttgcccctctaacattctaggataaaattcttatcttcctttgcaccccgacaaagaagccccaacaaaattacccaattcggtatcaaccctagcttttttatagctcattgtccactccaacttcttgagttccctaacaaattttgaaggcaatgatttcgtctttctagacgccccatcctgtcccttttgatcaattctcccctccatcctcctcaaaaggtacaaaatttccttttcaaaaccttctgtcggcataccaaggcatcgactgaattttgcaaggcagctagagttccacccttcatcccgccttgcctcttccagttgaaaatcagtcatctctgccagtggcctcagtggcctcgcaaaaaccgacccaattaggacaatcgcaagtttagtcgcaccatcactgcctaccgaaccacaaggaagctctttttggtcatcgaggaccaaagtatctttagaagacactactcacagaggatcccagtccatagccactgccattgagcctttcgacccactggaagccccctccgacactaatatagcttcgtcaggccccaagaaaagagaaaaagaagattcacctcgaaaccccatagaaaaaagtgagcgggagtgagaaacagggtacctggaggcttccgccatcaacgccttgttggtgagcgtcggtcaacctgagagcaacctctcggtggtgaagtctttgtaggccagcatcaccgactccatcccattgctcccacgtcggtctctggggaagccctaggagaaaagagccgcccaaaaaggaaagaagggggatgggcctctttaatcttaggcccaataggcccctaaaagcccttagccaggcccacacccataggattgaaagggttagagcccacaccccagctcgctccacccgtgggcttttcatgcacccactcacttgggcctaaaacctcttttccctttttctccacacagctagctgtcctagacctaggcccaagaaaatccgagtctagaacagtacccttagcctacctgctgcaccaattgcacccctactccttccatactctagctgctcctttgaccccaatttctgaacaacaggttgactctccctcacgctttcaccggtgcgtgagccacccacaaattcatccctaacctcttgtcctgcacttctacaagactcagaccatggcactacttgagaaacccatggaggggcttcccaccacagacgaaccgcaaagcaagtttgaccgaccaccaccacctgcagtgaccctagcaaatccttcccagtggttctcaccaagatacgtgcccattgcagttgagaaaaaaaagttgtttcctcatctacagctacaaaaccctcacaactctccccaatcctcttgaaaacctctctactccaaaaatggaaagggagtcctacaatcctcacctaaacttccttggcatggctcccattccaaaaacaccccacttcaagtcctcatctttgcatctgaaactctctctcatgttgccccttaaaagcaccatatcagcctcacttttattctcaaactcgagcagcaaaaaggccctacccaacttggagatttttaaaccccccctcaaagcccatcgtgcatgtgcccaacccttcaaggatgacaacggaggaaccgagtctaaaatgtcgccaaaacaaccaaccaagcaatgacttaatcgctcttccctacaaagaagttctcgatcccctaaatgtagccataaagactctcctagctcccctgtcttcacccttatagcatctgcataaattcctttctctttctctttgaaactagacccaacctttttagagatgggaacaccaagaaaaactttgttcattgctggagtggagattcctagggccctcaacttcttataccctaatcctttaccctttggaaaaacaagacaatacttcttagcttccacatctcgcacagagcagagtaaaaacctactagcttcattcgatcggcactgcaacttgaactttcttcccccatcttcccaaacttttagacacctcgaacttgactctcctctacaccaagcttccacacctttcaacaagtagctcaaacttctttttccaaaccttatccaagagggtaagcctttgctcctttccaaaataatccctctaggtttacctcagactacttcaatggagatttcaaaggtcttggactccaccgcaaaccaacatttaccacctctcacctccgaagcaaccatggcatttatcccaacaaccttgataaagggtttaatgattatatttaatatttactgaatttaattttttccttcatggtcttagcaaccaaatgatgaataattactgtcaaaatttagggagagttaagaagtattttaatgtatttctaaagactagagaactctttcaaatgagtgcatcatgaaacttcatttcgaaattaacgagtttcgtatcttctagggtgggataaaacaaattgtgtaacaaaatgaggaaaagagtagttaaaagatgcaaaggtgttaaaacttcttattaagcgttgaaaagatgatctctactatggtagcttgattgctatgataaaatcaaattagcaaagaaatcccatggatgataggatacttcaaacaagcatcataattacaaggctaaacttaaaaatggttgccaactaactgtcaaaaactgtagttggtaaagttagaactttgttgaagttattcatagttgacttttgaaatcttgtaatgtcctgattaagaagagagctatacctgccacagccatctgcttccaattaaattgtctgtactctagtaggaactgggataagacatttcaatctaattggttcagtgtttatgactcagaattgaactggaatttaaaatctatcaaaaaaaaaaagaaaaaagatcactggatttaatggttctgaaagattcaggtttgtttttttcattgataaagtacattataatttgctagtgggcttgtcataagaggtggtacaagaaatccggactgaaaccctcatcaggtttggagagttcatgcctggctatagtgatggactaacccgccattgtgtaggctattcaccattgtaccaaaaaatttgacatgtttgaaattattattctcagttctgggaattattttcttctttaacaagggttgtttgctacagacaatgtaagatcttgttaccatcttgctctgttgtttttccttcctgttctgcttattgttatgtgatgcttgcttaacgaagtattttgttactactagttgctctccatcttaggagtgacgtcaatcagtaa

SEQ ID NO: 13341 - DNA, 4249 bp, Vitis vinifera
  Intron number 7 from transcript GSVIVT01027344001 (locus G SVIVG01027344001) derived from phytozome v7.0 (chr-ID chr1 3; pos 16211051 to 16215299 reverse strand)
cctattgccacagcagttgcttgaatcctaaacaggtacatctgctgatatgctggtgtttattttggtcattgatattctgaactactaaacctagacatatcactggaagaaatgtttaaacatcattaaaaatgatcggtttcatgtgtgtttcgtgcattttccaatcagtcctgacaaattggttctccgaataggcacatcacacaaatccctctggttttgcaaaaatatttactgcttgttattgagtctgctcaggatgcaaattggacaagcaatttggaggatgaatcattctccttttcattatgaaaaatggggcaatatcattggtgttgtttggatctgtttctgtttatatgtatatatgtatatatacactttgaaatctgaattgaggcctgaaattggaagatgacaggtatatgctcttcaatatggaagccactagaccatttccattcatttgattgctttagttttgtttttattgacttagggtttaatttctattactatcattcaagatttttccattattttgcccacttttggatgatttttttctttcggaagaagtcaattcaaatcaaggttgtgatacttgggattcttcatacgatcaaatttagggtcttaaggttgagatggtaggactaaattgaaaaacttgaatgcttccataacatttgaaaaacataggaaatatatgaacttaaggaaataaattagaagttgtactagtacgagtagaagcaaaagaaccaagataaagaccaaaaacagagcaaaaaataataataaattctggaaaaaataaatgaaataattgagcagaaaaggctggagggaataaaagaactgctccaacttgaaaaaccattgacaatatggtcaaacgtgcaaaaaattgtagataatgttttttattaaaaggaaaaatgttttttccttatgataaaaacatcaaaattctagtgtgtttttaaaaaagatttggatatgctagaattttcctttagctaagtaatcttttggttgttttgattgcatatccacaattccacgcacattctatgcataattaaccaccatcattgtatccttctagtagtttgattgtattgaacatgatcacagttcaaaataggtagtaagttgcacctttcaaggttggtggatggacttgagcctccatttatttggcataatactatgaaggtgaaatgcaaattcatgagagcagacaccttattctagtgatttagtccatatgtagcattgacacaaacaacaaaatgcaggcattctgatgctacaaagatggaaaagatagggtatgaatataaataaagttaagaatggcattacacagtgctgcctccaccaagctggtcatagaaagtgggatagtgtgggcaactgtcaagatgggaacctgcatattcatacctgctactccaaaacttctattattgcactagacaaatggcagttatgatatttgggttaacttataattatttcttgaaaactcaatttcatgaccacaaaaagtgtcccaagaaacctctctcattgtgaaaacttaaggtttgaacctgtggtttcttatttgtcctttttatctctctctttctccttccttccttattcccccccctcgctatccgcatcattcctctctccttgcctcctctctctctccctttctcattccccagaaccatgtcctaagcatatctacatagtgtttaatctttaaaaattattttaaataatgattataaaaatgatagaacccagtaacctcttccttgctccatctctccctctctctcacacccacacacaaaagactagtttttttttttctaagaaaatatgttattttcaaccttgacatagcccaaatttatagtcatgtccaaagtatattcgcatcatgtttgattttttatttttttttatttttatagacaataaaaacatgtgttagaaacaccaaaaaagagggtgcaccctacgtatacgaatagtatacacaaaacatcccaaagcaagcacaaaacaagtacaaagttagcctacaaaaacaaggcaaagctaaccacaagaaatagcatgttataaattcaaaatataggggttctccattttcgatgaatcatgggaccactttaaaagtgatttaatgaagaactcctgagagctcttcatcatcaaaagtccttcgattgagttctttccaagcacacgaaaataagcaaattggagtcaatcactaaaccattcttctcttatctagccccaaaaatttccattcaatgaagagatttcttactgaagtcggaaacactcaaatcaagccaaagactgctaacaaaaaagtccataacactcttgtcttatcacaatgaatcaagatgtgatcaactgattcttcactttcatttcaagggccacatttgttgactatgggtcattctctcttcattaacatatctacaattaagatctttccccaaatagcttcctaagcaaacaaaaaaaaaaacaaaaaaacacacgttctaagtggagcatggaatgcccaaatctctttggctgggaatactaaattattctcagcacttacggatttgtaatacaacttgaccctaaagtttcctcttatatcatctttccaaagtaaagtgtgatctccttacacttttaatatgtaaatgagctccaaaaaatggatcacctcatctatctcccaatcttggaagtcttctaaattgaacctcctagtgaccacctccgccccccccccctctctcctataaatctgcaactttaacatttttggaggatttaattctaaaaaacgtagggaatatgtctttcaacttaaactcccctgctcacctgtctcaccaaaatcttgtacatctaccatttccgattcggatagttaatctgaaactgaactcatcccaaccttttctaacatctttccataggttcatcccaaaagaatctctcacccctctagtagtctatcccccctcttgtagtccattccccctccatctccctgaattttccatgaataatctttctccacaagctctcctgctcaaaagaaaatctctccataactatttgctttgcaaggcttgattaagaccctccaaacttcttagccccagctttctgtacttcttatccttacaagatcatgtttgattttaaaaaaaattattttaaatgtccaagccactgcacttgtaggaatcctgcttgtgatcagcattcctccagggagttgggagtattaaagagaaatgggattgaaatctatgataataggaattcaagattccaaaatccaggttgggaattttgataataatttttgtacctgtcattttttaatgtcttgtctttcattttcagtgatttaattgagtaattaaatctcaagtgagaaggaaagatggagttgatccttgtacaatgaaatatttaagagatattgttcacagaaagaacattatacaatctaaatttggtgataagttaaatcctcgagatgcatcttgctttactctcacgatttatagtatcttacaccatatattttataaactcaagatgcattgaccttaccttctaatccttccagctgtggctatatgaaggaatagcttataatttatctttttcctaagaaaattacttatggtgatgatattgcattagatgatatgtatcaacaagcagtgaaagagcatatcatttgtttgtgttcttgtttttaaaaagtaaatttctacaagtctggtagcatgaattacatcaaccgtattcctaaagatagaaattcttgtgtaaatgtaatttcattttgtctgagaaaagagggaagaagatgaggtttaattttagaaggatggagaaatgaaaaaggttttttgcaactatactaaagcatgaaaagattttgattggttctctttgcttttcctttgaaccaaggttttcctttgtattctaaccttttgttggggaaagataaatttagaatgaaaacttttagattgaactcagcacaggtgtaagtaaccatgtagtttctttctttcttaaattttgtttttgggtgcataaaaatgtagataagtaacagtaacaagaacttttctaatatattcttacaggaatccagcactcgaggtcaatcctcaattaccca

SEQ ID NO: 13342 - DNA, 2504 bp, Vitis vinifera
  Intron number 2 from transcript GSVIVT01003174001 (locus G SVIVG01003174001) derived from phytozome v7.0 (chr-ID chr3 ; pos 5985857 to 5988360 reverse strand)
ctagttcccaacaggtttgcttctattttccccaactccttcttcattttttcgccccctctttttgggctattattatgtaatattaaagtttgttttgttatgcggtatctttgaatggatttcttgttagtttagagggttctttgagttgatgacgatttgatttatatttgctttcctgtatatcatttttgtggatttgcaggtttggtattgcaagaccttagtttttgtttgattttattatattagaaagtttcttaattctaaaaattgctttattcttagaaatttgtcatgtctagacaatcaaagcttggaattttaatatgaataaatcaatggtacacgagaaaataggaaatgaagaaaaaggcaatattggattgagttgtggatgagagaatggagctgatagtgtggcaaatgaggtcccgctgggtgagagatcaaagttatttggtgtctttgattgccattttgcttcaccctcccccctcctaggaatttgattttatggggcttgacatcaataggtttttctcttttgacattctaatacttactttaagtttgtgttagatggttcctccatttcgtatctggttgtttatgaggaggcaaatactagcatgaattggaggtagtggttggctgctttagacaacactagcatgaataatgtatgttttgctcatccaataaatgagaaatctatttttgatagttaaagagacaaaccataaaaggaaagtgataagaatattttagatcctagagagggagtgtacaaaatcaaggatggtttgcatctaataccccaattagaccaagaatacaaagaactaatggaagagtttatcatccctgattccaaactctctaaaccctggaagcattttctgttatgttctctctaaagagactgcatcaagcaaagtggagctaatttccaaaatttcatttgtttcttcttccccctaaatccaacatgctaacctgataataacaactccttgatcaattttggtagtccccacaaaacaccaaacaaataaaatatcaaatgccacacaatgatagccttaaaatgaatcataatatgattttttgagtccccatccttcttacaaagggaacatcatttagttaaaggccatccttattttttaagctaatccaaagtagatttttttttccaaaccaacttccaatcaaagaaactgactttagttggcgctaacaatatccaaacctcccttacaggaacaaagcccttccatcttattgaagaagccataaaaagatttaactaggaattttctattatttgctaacctctaactcaacttatctatgcaatctaccctcaaaactacagagtggataagcagaaaaaaaaaaaaagaactatttccatctccttgtctggtagatttctctgacagtgagggggtggatgaccatggctctctatttccttccaaaagtcagctacccaagatgcatgaggagaacttagatcaaacaaagctgctaaagaatccttcaagcaggggaaaaaaaaattgaactattttcatctccttgtctggtagattcctcggacagtgagggatctgatgaccatggctctctatttcattccaaaagtcagctacccaagattcatgagaactaatacgaaacaaagctgctaaagaatccttcaatgggtgatcaccacatcacatatcaatccagaattttgtcctagtaccatcaccaatcacaatagtcatgctagacttgaaaagcattgaattgtggtcttcagtttgtatgagtacagagttaggctagattatttaaagttatggttttcttttgcattccataatatcaaatttatataagaagatatatggataaggttaaactatttattaataattcatatctatcttttaactaattttattttgagattcagatacaaatttctattgcaacaaactcctttcttagttgcaaaccattatcagctttgtccaacataaaatctatggatccaatacctcttgcctcttgcgctcatgtccttgtgtcaaatggaagaattaatgtgtcatacaaggtctttttgtctttttccatcccgtttctcatgggagccattcctttcaacaaaagctgttcaaaacacagcctaagggtatgtaagggctattttcaattggcttgcaccttgataagtgtcttgctatggcatccataattgctttagaaaagtatccttcgttgctttaaaaattgttgaaaacaaaaaaggaaaaaaaaaaaaattgtaacatgcataaggaataaacacatgggaatgatgattcatagaaattaacacctcatcctttgaatgtgtggggaggaaaactcaacttccagcccatctgctgaatgtgtttccttcagataatgcatcatgggttgtctttcatatgctctttttcaggttgttgtggctg

SEQ ID NO: 13343 - DNA, 2068 bp, Vitis vinifera
  Intron number 12 from transcript GSVIVT01011504001 (locus GSVIVG01011504001) derived from phytozome v7.0 (chr-ID chr 14; pos 30103845 to 30105912)
cttattcctgcaagtgaactttcacagcatatcaggtattgtaaattcgttttcaggattttgcttttgcatttctttttctccctcagcttagtgtttgttgcacttagtccatgcaaaaatagagccaggaaaagttcccaaaattccatcactaatgtttgagcagaagattcttgatgcttaggatataaggatgggcacagctgaaaacctcgatgtggtgaacttggccagaagtttgcttcaagggcttgggggtggccctgctttagcatgaatcctggcctggtccaacccagaatgcaatgaacccaatatacatttttagttaatgtgcttattttccttctagatcacatacttgttatgggttttatgccatgttggatctaaggtcttggattctagtctaagtacattccattaagtgggtttcgattgtggtttgagatcaagccaggcagagcttgagttgggagtttgttttatttggactgaactgaggtgatctatctgacttgagatgcaagctagatggttccctttgaagaaagaatggttttctaatggtttgtgttactcttaaggaacagcattttcaataccagcatcttgactcagttgttaaaggcactgaaagaatggtttttaattttttgactgctaggtcactgagactgccagaactacttaaaatacatgaaagatgatattactatttagaataatctagttgtcaatcaattgtaactaaagaaaagaatgtacaactcaactcatttcagcagatccttcaccccaagattcccaactgcttggctttagctaaagaaattcagcattcagttctctccagaagcatatttatttttgtcattttggcaatcatatattttctcatctcctcagtcaaggttctatatgatcttccttttgatattttgcaaatttttatattttatatgcaacctggggtttctaaccaggatggctgatggttccagaggtttaatccattcattgagtccaagtttggaaacactgatttgaacataggatggttttctcctattaattgcatactcatagaaattcacaattggatctgctaatttctctttggagtgtcaaatgtaactctactattcaagaaccaaatagaaactagattcatcaggaatcaaggaagagaaaggattaaagattctggtttttcttatgagagggagctggggaaactggcttccctttcaaaaaggataatattcactaatagaagctggaagtggttgtctgagagctctctagcttcatattccatagccaaataatgttattgaagattcacaaataatttcaatattcagtaatagaaattggttgtcataggtttaaaaggtgcaattaaagcacaccttggcccaaggtgcaaccactccctggttagagcgtcttgcttgccaagccatgtgccttgttggagaggcacgtctcatcaactttacttttccttttaaaacacttttattcttgaaattcctaactatctattgaaatttatataattctgttacttttttgttgaatgtttcttttaaatgtttggaatcttaaaatttttgttgattggactatattttctaaaattgacatgcattctaggtcacattttactttggtcagacaagtgccttgtgttgcatcttgcacctaagttgtaggaggcttttgcaccttaggtgtgccttgcaccttttaaaactatggtggttgtttgaaagctctctaacatcatattccatagccaaggaatgctattgacgacacactaatatatatatatatatatatatatatatatatatttttgataggtaacacaataataatttctttctttgtacttttttttttcttatggaagccttgacttgtaatttccttaaatacagtgtttgagaatatgacaaagctaaaaatgattggtcaaaacctgttggtagtcatcaagtagtgttggagtctaaatatagcttttatctgtctcttacttagcactgctggg

SEQ ID NO: 13344 - DNA, 9732 bp, Vitis vinifera
  Intron number 4 from transcript GSVIVT01021666001 (locus G SVIVG01021666001) derived from phytozome v7.0 (chr-ID chr1 0; pos 8956495 to 8966226)
atttagaggttattagtgaagaattaaggctgaaggtacactttattatttggaattatgctgatgtctatcatacctgaactaaaactcccaacttttgagacttgtattgattacttcatttctattgcaatggcccaatgtgtgtcatgatcttatgatatgctgtggctgatttttctttcttattttttatagagtctgagacatattggttaatcatatggtggagtttgttacaggacccccaactcttctaagccctgtattgctgatgtagaatttcaagtaagctaatgagggaataggacaatagggcttgcgttcatgcctctccattgttggggtatatgcattaggaaagttgtgttgtcaccataagttgcgtgactcccaatccaatttggatcaaaatgtaggcctctgttagtgagcatgtgtggactatactttatttctacactttttcacaccattttgttgagttttgaagttaaaaataaaatatgatgtggtatatttcaactgttcttcctgctaaatgattttgacgagttaggattttgtgttcttgaaatttttgtattggtaattccatcacaaattgagttgtaacttctttttctagtgtttttgaacaccaaaagggtttggtcatttttataatttgaatttatatattgaattaataggatagctacagattcagaatgttgtactactgtcttctgtagtgaacttcttattttggtagaattattgaagggcttgcttatggtagtcgtaagtatataaagtgtagggttatctagcggcaggagttgcataatgaagatgaactaagtactatggttgtatgggagaggctaggaacctatttccttgattagcactagtcaattcgtggggtgtcacagaccctgcagggaacaactacggtagtctctagtctgatccctaccgcacaaatagatctatagactaatcaaatcaattaagctatcattgaagcctttgtttttcgtgcctgaaaaataaaaaatcatttgaaaggtcctccagaaatcagatggttattgactcttgagtagttgttagattaggtagacttcctaattgttgctgattctactggaggacgaactgtgagcatttgtggtctagagtggagtttcagcagagtgaggatttctgaagatcagtttccattgtcctggatgagatgcagagggcagactgatttgtgtttctgtacttgcttttggttcacaatgcattagcatcaagcaatatctgtcctgtgcaatcttcattggtgagatagactcttttagggtggtatggatcctttgtgggcaaaagacataagaaaatttagagagtgtttcccttgtgcattttttggacaatatgaaagaaaggaaccaaatgtctttttataacgaggagcaatcggatcatgctttttgaaaacttcttttcgtagtagtcttttcttggtgaagttgttcatagatgtaggtattatgtctttaattgatcttgttgatcagttgggctgtcgctaagggaggggagttgttttttgtgtcctctctttttgagctggaaagtaagtaggaatggcattttttctgttagatccctctaccgctccttcacgagggcctctagtaatccttttccttggagtattatttggaggtcttaggctcttatgagggtgagtttttttttgcttgggaagcgtcttggaacagaattttgaccatctaacagctcaaaaggaggagatggaacatgccgaataggtgctacttgtgcaaagagaaagaggaaagtagtgaccatctaatcctgttttgcaagaaggctacaatgttatggagtttgattttctctatttttggtgtgcagtgggtcttgcactcctcaattaaaaggaattagcttggttggcatggtgcttctgtgggcaagagaagggagaaggcatggagggctgcccctttatgcttaatgtggacttcatggaagggaagaaatgaaagagtgttcaatgatatcaaatggtccgaccaagctataaaacattcttgtttatatacacttgtgaattgggctagggtgtatttagaggatcattctttgtctatgtttgattttatagtggctatttgtgtagttaggggaaaggttttttgtctttctttttgtctagtttctttgggcgatgtttgtatacttcgtgtgtactgcttttgctgctttgagtcgtttctaatacaagctcttatttacctataaaaaaaaagtgtttgttgcatacattctatgtgctttggagtgtttttgttttggcactcatttataaaattttatcatttgcatatcaaaaaaggaaaaaaaattgtttgtcccattatttcccctgaataatgttaattgggcattcaacaagttatttgtgtgttttagaatgtctagaacttcatcaagaatttctctgtcttcttgacattttttcactctaggaacaaaaaaatctactttataaaatacagttagtctcaagtaccatacaagtgatcccagaaaacaagggcaagtctcattagcttgtgggtccagatgaaaggtccctttttacttttcttcgtccaatttgagtaaacaaagcaccaagcattatttctgctttagcatattccaaaattttcaaatacccatgacaaccattaatattgcaaaagaaaattttcattggactcttcttaaagcaacatttagatccatggaactttgtcatatttagggttgtactgtatctattattttttttgatagataaacaacgatatatataaaaagggccaaaaaaccacaagtatacagggggtatacacagaagcccaagacaagaaacagaaaaaaaagagagcaaccttaccaacccttaagtggtcacaagccactccaaaaagtctaagagagaagaggtctcctctccgatgtacaccctagcccaactccacagattacaaacaaaagaatttttgatttttagtatagctaacgaccccccctaaaagctaatctactcctttccttccaaaccgtccaaaatatacacaacggaatgaaattccagatctttttcatttttttccccacaaaggagcccctccaactaaataacacctctttaacagacttagggaacacccactgaactccaaaaatggcgaggacaatctctcaaagagtcttaaccactatacaatgtaaaagaatgtgattgacattttcctcttcacagccacacaaaaaacaacggttagggaactgccacccccttctttgaagcctatccaaagtgaggatcctcccccacgaggcttcccaagcaaaaaaagaaacttttgttgggaccttatccatccaaatgcgtctattcgggaaggcgcaaactgtggagccaatcaacatattataagcacccttaaccccaaaagcgccatggcccccccctttccagctcactgaatcctcctcaggagaagtcctgaagtccctcagcaaattaagcatatctcttatctgatccaactcccaatcattgaaatctctagcaaatctgagattccaacctccttgaccaaggctagagtcccacacttcacttaccatggcattcctttgatccgccaaggtgaacaactggggaaaaatttgggacaacgccgcattaccacgtcacttatcagtccagaacattactctagtccccttccccaccttaaattctatgctctcccaacaccaattagcctccttcatgatctccttccaaactcccactccaaaagacccacaaacttccttagtcctccatccacacccctcttgaccgtatttcaccccaatcaccattttccaaagattgtccttctcataggcatatctccatatccatttacccaacaaggctttgttcagcaagttaatcttccggatgcctagaccaccctcctcctttgggctgcaaaccaccttccagttgattaagtgagctttcccctccaagctttcccccccccaaaggaagtctctttgaagtttttcaatcctttttgcaacagacttaggaatgcgaataagggacaggaggtagatgggtatgctggccaaagtgctcttgataagagtaattctcccaccctttgagatgtattgtcttttccattggactagtcttctcctcattctcttttccaccccatcccaagttgaagaggttttatggtgagctccaaggggcagccccaaatagacagtaggtaaagcccccaatttgcaccctagctcaaccgccaactcctccaactcatccacttccccaacaggaattagaacactcttagcaagattaattctaagatcggaagctgcctcgaaccacgccaaaatccagcttagattagttaattgctcttttctagctttgcagaaaatgattgtatcatcagcaaaaagaaggtgggagacggttagctcctcaccccctctcccctgaagcctgcagctggaaagaaagcccccctcaccagcccttctaagaagggtgctaagcacttccatacccaagacaaagagataaggagagagagggtctccttgccgcaacccatttgaattcgagaaaaaaccaacaggcaccccattgattaggatggagaacttggcagttgaaatacaccaccacatccaatccatccaacgagacccaaagcccattttaagcaacaccttcatgagaaacttccagttgatactatcataagctttttcaatgtccaatttgcagatcaaccctttctcttttcttttatgctaataatcaatcacctcattagctattagagaagcattcaaaatctatttgcctctcacaaaggcattttggtctacagagactaccctttctaacaccttctttagcctattcactaggactttggccaaaagtttgtacaaacccccgagcaagctaatgggcctgaaatcccctaagtcttcaacacctcctttcttagggatgaggaccaaaaaggtagtattaagacatttggcaaaggatccatgctcatagaattccttgaacaaatccaccacctcctccttcacaaaatcccagcaggcttgccaaaaagccattgtgaacccatccgggcctggagctttatctcccttcatctccatcaaggcgaaatggatttcctcctcagtaaaaggcagctccaagacttcagcttcccgggaattaagttgattgagttgcagcccctcaatgtcagctctccaacccgactcttctaagagtaagttctggaaagcgttcacaatcccctccctcacctcctgatcctcagtcaaccactccccattaatcatggtcctatccagggagttattcctacggtgggcattagccatccggtgaaagaaaccagtattcctatcccctgccttaagccacagctcccttgacttctgcctccagtggacttcttccataagcacccatttattaaaagcatccttaacttcttttttcagctcagtttcttctacagaaaggctcttctcgctttccacaccatcccagtactccacttgctggaaagttgaatttttattgacttccagccttccaagcacctccctattccatactttaatttttttgcttcaactccttcagcttggaggctagtctgaaactggcccttcctctcacctcaatcccctgccaccacccccagagaagacctttaagatcatccactttaagccacatattctcgaatctaaacggggtagggcccctccttaacccatcacccattagcaaaataggaaaatgatcagatgtaagtctgtgcaatctgcattgggcgaccccactaaacatatccagccaattctgagtcattagaaatctatccagtctagcccaggattgattattcctacccccactccaagtgaaagcacccccttgcataggaagatcgagaagttctaactcaccaacagtctgggcaaaacttctcatagctccagtcggccttccctgcctactcctttccctttgggacaggatgacattgaagttgccccctaaacaccacggatcgtcccacaagcctctgattgcccctaactcttcccaaatacagtctctgtcctttttggagaaaggtccgtacacaccaataaagatccaagttagcccatcttccatattcctgatcttgcaggaaattgagaaatttcccacctccatctcaagcacttccagagaccttttatcccaacagatcagcaatcctcccgcagagccataggcatccaaggccacccaatttgaccacctactagaacccaaacttctcaccattccctccgacaatgtctgaattttggtctcctgaagacagaaaagatccaccctctggctcctaatcacagccttaattacccttcttttggaactgtcgttggcttcatgaacattccaggtcaaaagtcttaacttcatttaactttcgtaatctgacaccctcttacttgctctccaccattttgcttcttccccccttcatagttaatggagcactctaatctttttagttccctttcgaacttaaatttctccaaaagggttttgttgtgaattctttcccttctcttttggattttaatcaagaagtccacaatatctttctccagaccttctgtcgaaaaccccaagaatttactaaacttggccagatcactttcctcccagttccccccatgcctttgtttctcgtggcaccatttgagcagagcacatctcctttccaagttcttcaattatgcctttgttgacctccatcaagtcccagcatttgacagtctcacccgctgggggctccgaaccattgagtaattgaagcgaattttctccctcatctcactcctttccatccctagaaaggtcgcaatactcccccaatggagtccgatcggaaaaagaagaaggagaagaatagggcccagaaaccaaacaaccaaactgaaaagaatcgctctcgtacctcaacgcttcctcaaaaagggcgagatcagtcttcgatctctctttggagtggagctttgtctcacaaagcctgcgttggccatctttctcccaaaacaggggagtttcagagaatggactcctcgaagggcttgggctagatctctttgagttttgggcctcaccaaagtggtctctagactccacagactggggtgggctttgaccattgtttgaactggccggcccaaaacccacgatagtcttccaggccttggtccgtctaggatccaccacctcctttggcccgagggagaacttagccttaggagagggggatgggtttagaccctcaggcccaaagcccagcatggagcttcgaggctcctccaagaggcccagcgctctcacaactccctggggcccaaagggaaaccaagcaagcccctgagaatagtccaaggggcaccacgacccgcttgtctgcccccgtgtcccatcggcagactgcgtatggtccttgagccttgggccaccttcatcttccatcatgcgcttgccctcacgtggcagaacctcaccctcgacctctcctactgcttctaagggtttccccctttcttcagttggcagcgatcttagcgccgacctagtctcccaccacaaggctaagtaatagcgcatgttttcgacccaaatttccactgtattagggattttctctccattaatcttcaccaggatcctggcccactgcaactcctccatcttctccgttttagcatcgatgtccaaaaccatcccacactcctcccctatccttctcaagatagcccgatcccataaagagatgggtaatcctactattctcacccaagcctctctctctctctccctccattagacatcccgtcatttggctccacttctccaaacgcatgacgaaacctccgaccgagacttccccaacttttagggctttctcagcttctgccatcaactcaaattccaataatgccttgccactttccaatttagccaatcctaagttgcccttcagtccccacaactttgccatttgggtcccccagcttctcaagtcgtccctccttcctatcttggggtcccagcaaccaacaagacaatgggctagcttcttcaagttttgacttaagaccctattgtcgactttcgccctcaccacctcttctccattgctgcaaggctgcttaaccacctccgtgaaggattttcccaacaagggtttccactacttttccttatccttgtgtctcacttgcctttcggaagcagcttccacctcccgtagcgcctccaccataagagcccaatccccttttgctcctctgcctttgggtacaaagatactaaatcttttcttttcccgatcgacaacacccaaacggaggaagcatccccccttgttttcgccgcgcaccaacgagaaggtcctcccattctcttgccaaagtttctcccaatgtccagttctcgtgtccttggtgcagaaagccagaccttccaggagcggccctaagctcgccggccccaacttaatccatgaagagacacctctctttctttccacaatgaagatttgcatcttgcccttcttcttttctgtctcgacctcaaaggtctttgactccaccccaaaactacttttccgagcccctgactggataaagctcgctgcgtccttgttcgtgccctggaaccatcgctcttctccatcgctctcgctcactctctctaggtctttctctctcctccatcacttggttatcacaaaaataaaaattgtactgtatctattatttgtaaggcaattcctatagattgtggtgtctcagacactgtttgacatgaaaactgagtccgcatgcttctgacaacacttgcagacttaccaaagatctactatctatttgcttaggaaacacataaaatagtaagcacattatgcgcttttttctgtggaatgcattgtaaagttattactttctcttttgttaaaatctacatgtgaggactattcatgtagttataaattaatgaagtgtataacatttatattcatttaagtttctgcacttatacggacaaacccaaaggagtaagacaataaaggaagtgataaaagaatggtaattgtcatccatatacgttttatgcttcattattacattgtattttgatgttagaaattataggatatttgttgtactatttctgagttgacatacacatggcaaacaccaagcaggttttcctcattttttttcttcatctatcattgttcgcattttttttccatctattattgtttttacaatactacgagttttaattgtctatacatttcccttttcaaatatctagagattcactgtaaatcttttggttttccctaaatttcaaaccaaatttctcattttttttcttgacattaattgatattgatatgtttgatccatatttcttgtttttggagtgatgattaatgaaatatatgctcaaaactttgttatgtttttatgcatctcaattacaggatattgaatttattgaaaagaggatagagg

SEQ ID NO: 13345 - DNA, 6194 bp, Vitis vinifera
  Intron number 2 from transcript GSVIVT01033875001 (locus G SVIVG01033875001) derived from phytozome v7.0 (chr-ID chr8 ; pos 17084423 to 17090616 reverse strand)
gtgcctcctcctcctgccgtcctacgtcatggccattaatttccactgcatattgtatggccatatgcgcactgtacgccacttttccaattttaaaatttaaaaagtattaaaaacaaaaagttcaatcaacactaattaaaactcacatgctaaaactaatatagaatgatctacacgtaactatactttttatgaattttcttattccaaaaatatctccaaatgaagctatatttgaatatattaatgagattagtaatttttaaaaataatttgtaactcaaaaatagaatcaataatacaactaatctaaattgaattatggactctaccatttcttctacctggccattttttttttcaaatgttatcaccaacaaataaattctaaatcaaatgagagcaaaataagcttcatgattttatatttttcaataaatttatcaatttctaagaataatttgaaattttaaaaattaaaattaaatcaaaattagtttaaaatattctattcttaattgagtattaaatatatacatataattttttttaatcatttacaattaaaaaataaataaattttgcttacttttatattcattttaaatataacgtgactaaacataattattttcatatatatatatatatatatatatatgaaaattattttattgaactatctagagaggtgactagatagtcccctttaataaaaagtgattatatatgaaaattatttcaaaaaatttaattcattttataatatttttagattaactttatttattttccttttaaataaaaaattgattttataattttttatattaatattttatattatttttattttaatcacacaatcttcatagtttcaatattcctttgtgaaattgtaatgctcaattttactctattaatataatacttctaaactttggaacatgacatcaatttaaataaaaaagtatgtgtggacctcgtattttttctcaatgcattcccacttgatggcgataatcgctttctatttatttggtgaaaatttgatttttaaaaaaagacttggagtcccacttttttttgttttattttttaagggaaaaacaaaataaaaaagaaaaactctaaatttgactcctaaaggaaaaaaaacaggtccgtgaaaaaccgaagttgggttcgagggtcaagttacttattggaaaggtacggtgatgaaccgtaacacccccctaaacctgtatacatacggtctctactaaacgaattgaagaaattatgacaattaattaattaattatggataccaagaaaaataatcaatgtacaagtcagggtgaaaattaatatacacaaaaatgatgatgaaatctaattacaagaatatacaaaataaatgataagagaattatgcaaaatgatttattaaattaaataaaaagttttaaagaaatttcaaaggattttattaaaaatgattttgaattaatgattgcaatttatttacttacaaaaaaaaatcagtttattttctcaatttcatttgtatttaatttttaaaaaaaaactatttacacttattgtatcaaaataatttattacaaaatttcaatttggacacaaaaattatttttactaaaaaataatgaatttttacaattttatttacaaaagtatttaaattcattttcatttaaaaaaagtgatttttacaaattatttaaaatgacataactttattgcaaaagaaattttaattaaaaaaagaaaaaaaaacaaagatttaaatcatctatcacttttgatcccattttaattaaagaaaaagaattcatttgaaaaaaatatttttagacaattttattaaaaattaaattttgggacaactttatttacaaaacaatattttgacaatttttattaaacaaagaaatttttagacgaatattatttaaaaacaaattttcaaattccattaaaaacatttcttttggatttttctaaatgcatttttttgaatttttatatataaacttttttttattaaaataatattttaaaattattgttttattaaaacaactttgtcctctcatttaaaaaaaattctagtttgttcaatgttcaattctcgcatactcaataaatatatacgaacaaatatttacaagaactaataaaaataaaatcaaataaaagtaggaaataaaatatgtactcaaataaacttacaataaactccacgtgtgatcaatttgtactcggccaacaaggttgtagagtaggtccatgcaaaaacaagaataacataaatgtaaatatccaaagatgtacaaaacctcaaacaaatattcaaacccaaattccaatttcaaattagtcccataaattttgccaattaaaataagcccaaattactataggttttaacccagaacatccaaattaataactaaaaatacaaacacaatcaaccaaatctaaaattggataaattaaaataaattctactagtcttaaatttaatattccataatgcaagcttaatttaatatacaccacaattgtttcatgtccaaattaaataattcacgatgatcaaacccataacaaatattcaaataatctaacaaatctcacccacattatggatcccaaaattcacatcaattaacaagtccacataaaatatacatggttatgtgaaataatatttcaagctcaatccaataagttcaaacaattaacaacttaacaataggcccaaatccaagtaaacaatatgcaagtgatataatccaaatatcccaaattaatcatgcaatatgcccataaacccaaatttacaaatttcaaattaattcaacaatccaaatttcacaaacaactattattattaaaataagataaaataacaataataataataataataataataataataataatggaaaatgagtgatacggggaagtgagagaaagagaaaaagggaggaggtcgcaggcccaggggactcgcccgcggtgaccggccggtgaccttgccggcggcagtggatagctttttggaaataaaaaaaatatagaataaaaataaaataaataaataaataaataaaatgggagaaaatggggatgaagggggtgccggaaaaggcactggcgtcacgccgccggcagtgtgagagttcaaggagggaaagagaaaataataataatagtaaataaataaatgaaaaaaaaaagtcgggggatcacccgagtgtgccgatgggggagagaagagaaaaaaaaaaatgggagggaggaaatgcggagatccagtgaacggtgagggaagggaaaaaaatggagaaaagcctgggagctctcccaaaaaaaattccgggggttggttgtcttcccaattggaggagagaggtcggaggagagagaagagaggagagaaaaaaatgaggggaaaaaatggagggagggggggccggtgaaaggaagtcttggggaagagagagaagagtgggagggaaaaaaatttgagggagaaatgaaaagtggctggtggtgaggagtatgggaggagagagaagaagtgggtgggtgagggtagatggaggagaaaagaagagagataagaaaaaaaaataaaaataataataatgataacaaataaaattaataaataaaaaaataatttataaaataatgaaaactaaaaattaaagggtggatctaaaataacacatgtaatcgatatttaaaattgaactcaaaattaatgtaaagatcaaattgggacaaattttgaggtttacagtatgttatatatatataatagttatatattcaacgtaaaaaattaagagctataaacaaatatcaaattctagtagattttataatattaaaattatttttaaaactaaagtttttagttttaaccctatgaccattggttttttttttttttttttttgttctttcaaaaattgacttgtttagagagactttagtttagccaaaaagagggatttaccttgatgtgaagtgatgttttaaattttttactttaatatattaatttctaaaataaatttggtctttgcacaaaaaaaattagtgttttctattttatgttttctcttttatcttgctgcaacaaataaaaatttatttttcatttccttagagaaaatatttctcttaccttagcttatcgattaggaaattctataaaaaatattttcatcaagtatctcaaatccttaaaaattttcctcaaaaatttataaatattttaacctatctacttaaaactgaaaaacaagttgataacttgatatttcttttcaaaacatttacttttatttcaaaccaatgggttagtggtaccaactttccattgtatgtatataaaacataataaagagccattagttctttaataagaactgaagtgggaaatgacttaaacgaagaaagctagaatcaatctttttatcttagtgatgatgtagagtacttttcagacaactttgacgaagaaaggtatcagaacttacaaaatgtaatagaatgacttcaaagcaataactataatctcaactataaaatctaaagtggatataaatgatctatcatattaaagtagttttgtaaaaaattaatcatatcaaaagaagaaaatataaagaaaaaatagagagaaaaaaaaaacagagagtatactcataaatatatttgtgctatgcaagtaaatacatacaccatgtcaaattatgcacataaacatacaaatcccattgcctcacttcctttatgaaaaaataatcgtgccccatttaatatcttatgagaagcctcgtacattgatatttttattgtcatcttataaagagtttttgtataaaaagggaggtatgaaataaagagagacatcaaaaggaaagaatcataaaaatcataagagaagaacaaactctctcattctccaacttttataaattcaacaaaagtaagaatttatattttcaatttaattgtacaatgtttattttgtttttatttttcgttatccaataaaggataaaagataaagaaagaaaaataaaaattatttaaataatatttttcacttttactccttaatatcacttatatatatatatattaaaataatttttttaataaaaatatattttattattttattataatattggccttcatattttattaaaaatgatttattgttaaggattggtgtgatctcaagttatataactatttggaggggtgaataggtagcccctttaataaaaaaaaattatatacataaaattcattttacaatatttttagcataacttaatttattttttttaaaaatgaaaaattgatttcatcatttttatattaattttattttagtcacacgatcttcatagtttgaatatttcttcgtgaaattgtaatgatgatcaaccttactctattattatattgcttctaaactttggaacaagtcatcaatttaaataaacatgtactgctaaatatgaaaggaaattattacctatacattcaatataagcataaaaaaattaagaggataatgcgtaggcataacccattataatagccaagtttttaagcattttgataaactttttaagttatttcatcactgattagctgacgggcaatggcggagacttgtcaaatcattggtgtgtctacaagaagaaacctgcaacgcgtgtggataaggtaggtgttttgaatttggagccgctgagatgtcgcatgactgggactccagttcaaagtggctgaacaattatctgatctgtcgacatcgtccactacattttttctggtttatctatttatttcttttattttaaataataattttccagacaattggttgaacaattgtccatctgtcaacgtcgtcaactacattatttctgctttatcaatttattttaaataataattttccatacaaattaattcaaacaatacgatatttaatataataaatatagattgtgaaggtttaagaataggctacattgaaggctaagtagtgcataagtgaggtaaaagtgtagaagcgatcgagtggtgactctggtgagggccgtaggcagcaggcagatagatccaaactgaagact

SEQ ID NO: 13346 - DNA, 10806 bp, Vitis vinifera
  Intron number 4 from transcript GSVIVT01001040001 (locus G SVIVG01001040001) derived from phytozome v7.0 (chr-ID chr1 1; pos 6760245 to 6771050)
catccaagcaagttaatcaacctgccttgagtaatgtaagtatcaaattttgcaaaatgttcatcttggtcattaattctttttgccttgctattgaatggttacatatttaaacttatttttagagtctgaacacattttcatttttaagataataggtaatttaggaaattatatgggtgcattttgttaaaaactttttccttttctaagtatataaaagtaggtttagtgtgtacatttttttttgtatatataaataatttaatttttgcaaggtaatatattttaggaatattgattatactctatattaccatttaatgcaatgaatacattggaataaaggatattctcaaaggttatagtgcaaatttcagaaatggttgtttttggctaatccttcacctcaaagatctaattcttccttggattggtgttttcaagttttagcacatgatcatgcatggcatgattgttttaactaacctattataccatataggtgtttaagcttcacgaagagttcaagaaaacaatcaacccaaatttaggtgggttgggtcgggttgatgctaacatgagcacaacccaacccatcccaacctcaaacttgatgtacttaacccaagcccaacctaacctcattttcttagctcgggttgagttgagattgaatggattagattcaaattagttagattagacctgagttggtcaagttgatcaaaccatatgattcaaaattcatccataatgttttttaagaactcttttttctatatattgataccaaaatttaatagtaaatgagacaaaatttcaagataataataaaatagtaaaaatgaatttatatatctgtttataaaaaatggaaaaatatataatattataatttgacatttttccttaaaaatataaaaagaaaactaatattatgtaggataatatacattataaacattaatattaaattaggtttgggttaggctcgagggttatctaaaccttggattgagcctaacctaaattgagtttgggttaaaaaaacttgacccaagcccatctgataaaaaaatgatcagctctagcccaacccaatataaaaaatgattgtctaagctggtccaaatgttgcatccccagagaaaacacaaataaaaatggaaaatagaagtgtttatttttagatatttctccaattttattacccttccagtggaaaataaaataaaaccaatcgaggttgttctattagagccttttggtggtgggtgtatatgtcttgtataccttgggtcgctcttttggtgtctttttataatatatatacttctttatctatcaaagaaaaaaaagttgttctattattatttttcatttttttattacttttaaaagttaaaataaatcttaatttcacattttcaacaagcatgctggcttacacaataatatttatgccacagagcattacttatcttctatttcctattatatacttgtttgtttgaatagaagaagaagattacaaaaagctttattatgtaaattaataagttatttcatattcaataaaaaatatacaatactaataatatcacaagattcaaatttaacaatttcatcaaaattatctcctatgagtgttttttatttgtttttgtgtaaaatatttagtcaagaagttttaataagtaattcaatagaactttgaacttgaatttgtccaatgctttgatagccttttccatgattgattttatagagtggctttttgtctaggtaggggaaaagttttttgtttttcttttcacctagtttcttgggcaatttttgtatatttcatgtgtattgtttttgctgcctctaggtgtttctaatacaagctcttacttacctatcaaaaaaagaaaaaaagaaaaaaagaaaaagaaagcttcgatggccttatttgaattaagtgaaaaagttttacccaaatataacctcaaattgtatccactatatgattaataataatttttttttttaattttaatcttcatttcaaaatggtggatgctcattctgatggtcattgttaggatgagtggaaattaaggaaaagtggaaaagtcattttggccattgaaggagaattagttcttttcaaatcaacgtgaaaaatgacggtttttattgggtccgaacccatatcaattaattggttgtggttaaaatctctattcactatcattgcctaccaaatccaccaaggatttcaatgtcatcattgccctattgtgcaaagccaatatcatttatatatatatatatataaaacttacgaaggtcaagtgaataataatattgatattataaaaattttgttatacatgaaataatatatattaaagtagaacttttgttatacataatttttttttttttttgtattagattatttttaatcgtaagttattttaacaaatttatctaaatagatataaaagctctttataagccaattcaaaatagggtcaaggagattgatggagttgatgagagactcttaactagcttatatatgtagtatgatcttgttttatttgttcatatgttttttgagtttgcattttactattgaaccaaggctatgaactatggtagagatggagtttgatttgatttgattttactttttgaacatagtggaaaatatgaataatatcaattcaattctttctttcttttgtttgttttgaaagaaaaatatatttttgaataggtggagtgtagtaatttcttgcatgcaattttcttatatatgggaacatttgttagaagatctaattaattatattttttaagaaaaagtttgatgttctaagtgtgatgcttatgctttgatggagagattttactttatggcatttggtaacatgacaaggcataaaggtttgtttggagaaatcagtggtgacaactaattagaaaaaaaaaagtttttattttttattttaattcttttttggggagggtttggtattagtcactctattattacttagaaaacattatcaaaagaatgcaaatagtgaatgcaatatttagggctattttgggaatatttgaaaagccaatttgacattgattgtttttttttgatgggcaaagacacaaaaaaaaatatattaataaaaataggggctaacccaactgctaactcaaagcatgcaagaggtatacaataggcgcctatagacaaaaaacaaaaggaagagggatataaaaaactaacccgccctcatctatagcctaaccactcaaaaaagttaattaaagaattgggcccttcatctatacacaacttagactaagaccataaattacaaacaaaataatatttcatcatttggattgaaagatccttattttcaaaagcaatcctatttttttcctttcaaactgtccaaaaaaggcacaagggggctactctccaaacctttactcacttcttacccacaaacacaccatgtcacccaagaaggatctccttcattgatgatgggagaacccacaacacaccaaaaaggttaaataacaactcttataaaaccctagccttggtgcaatgaattaggagatgatcaatagactcttcaacagcacaacaaaggtaacatccatttgaaagagaccaacccctcttctttagttggtccaatgttagagctttatcccaagtggcttcccaagcaaaaaaacttaccttagtatgaacacatgggctccaaataatgcttttcgggaatgggactgtgttgctgccctccatagcactataaaaggatttaacagaaaaattaccacccttagcctcctttcactgcatcctatcctccaaattgataaccaccctattcccttgcaaggagaatatgaatctctccaccatctccatctcccaatcgttaaacggcctagaaaagtgtggatttcagcccccatcctcccccatagcatcccaaacctccgccacccacgcctttttagaagtcgccaaagcatacaacgaagggaaagaaagacttagagttttgtctccgtaccacctatcctcccaaaatctctctctttttccatcctttacagaaaatatgaatttgtttttcataaaaggccattcctttctattttccttccaaagccccacaccatacacctcccttcttcaaccccatatttcctactaataacttgattccaaagggtccccctttcttccacaaagtgccaacaccatttacccaagaggcctttattgagtttagaaagacatctaacacctaaggcaccttttcttttatccgaacaaacaattgaccacttcataagatgagactttttctccaacccccctttcctaaccctaaagaaagtccatttgaattttctctagccttaatcttactacttgtggcatacatagcatagacatgtagtatatgggtatggttgacaaagtgctctgaatgatccttcctcctttagaaataaattacttctttcacatggcaagcctctttcagaacctctcctccaccacatcccaaactgccatcggattatgagcaacccccagaggaagccccaaataataggagggtagcacccctatcttgctgctaagttctaaagccaaatcctccacattgtcaacccttcccaccagaagaatttcgctcttgtccaagtttattctcagacttgagatggcttcaaaccacattaataaccagctcaaaaagaccatctgctctacgaaagcttcacaaaacacaagagtgtcattagcgaacaacaaatgggttatttgccttaaccctgcagcctgataaaaagcccccgctcgtagctctattaataaggttgctaagggcctccatcccaatcacaaagagatagggcaatagaggatctctttgcctcaatcccttgctactatggaagaaacccaacattgtatcattgaccaaaattgaaaaactcgctatggatatgcaccatcttatctagcctgcccacttctccccgaagcccattttttgcatcacagtcaacaaaaaattccaacttatgcggtcatatgccttctttatatccagcttgcataacaccccgctctcatttccttttatcaaagaatctatagcttcatttgctatcaacacaacatcaagtatttgccttccttcaacaaaagcattttgggtcggagacacaatcttacttaccacctgcgcctccttttttatttgtattaaaaccaagaatgtaatatttaggcttctaacgaatttcccccactcatggaattctctaaaaaagcccataacttcctccacgaagtcctaactaaattgtcaaaaagcaatggtgaacccattcggcccaggagccttgttcccattcaactcagacagggcagagaaaaccttcttttcactaaaagcttcctccaacctgactatatcctcatccccgattcgttcgaagtccaatcctgccaagctagggttccaatcacccgactttgtcaacaaattttggaaagtcttagccaccccctcctaaatctcattctcctttgaacaccacactccattaattttaatcttcctcaaccaatttctccttttgtgggcattagccatcctatggaagtagcttgtgtttctatttccttccctcaaccaaatttcttgacttttgtctccaggagactttcttcataagcacccatttcttgaaatcctcccgcctcctttctagcctccacttcttccatagataactctcttgatttctcctgctcatcccaaaaagaaactttttataaggccaaagttttattaaccccaatttttccgaacacatccttgttccaaattttcaagttggttttaagggccttcaacttctctgccagaacgaaactacaagaaccactaaaatcaaaaccttgccaccagctttttagcaactccttaaacccctcctttaaccacatattctcaaaccgaaagggggtcagtcctctcctcacccctcctccatctagcaggatggggaagtgatcaaacactggtcttgggagggtgtaatgaactacccctctgaaatggctcccctaattctcagtgaccaaaaaagggtccagtctagacatggattgactgttcaatttgccactctaagtaaacaaaccaccctgtagagaaagatctctcaaatccaattcatcgatcaattttgagaagctcctcatgtttgaagacaccttccctctcctgttacgttcacaagggaatctggtcatgttaaagtcctttccaatacaccaaggatcattccacaacccccggatggcccctaactcctcccagctttctctacacctctttacagtaggcccataaacgcccgtgaaaatccacatgaatccatcctcacaatttttaaaacggcaagaaattgagaattggcccacctccattccaaaccagctccaaaactttgttatcccaaaagactaccacccctcaagttgcacccctagcattcactgcaccccactctaaaaatcttcccactcccaggctttgcaccactctaataaacatttcttgcatttttgtctcctgcaaagacaccacatccatcttttgagacttgattaaagccttgattaatttccttttattaacgtcattcacccctttaacattccaagacaaaattttcaactttatgtaaggtagacctctttggcccctcctcttctgtccaacccgttccgtttttttcctctattataattaatcgagtattctagcttctttagctcgtgatcaaagttagtagtcaccaagcatattttctttttgcccttttctcttctactctttatcctttgaagcaaaattagagtttcctccttgaaaccttttgtcaagaacgctagcaatctactaaacttggctagacaactatcttcctagccacctcctatccccctctcttcctgcgacgacccctcaacctttggactttcacacctatcgcctactttcataaaggataacatcttccccctcctcacccccatcatcctgtcctgtgagtcacactcaaccatcaaaagcctcaatgacatttgtaccctcaacgacaccaaattcccttcactaacgacgtcttccccccttcccaggccaaaagacccacctttcaccaaggtccgtccgaaagaagaagaagaagaagaaggagaagatataccccgaccccctgcgagaagagagacgtcgccataccttgaagcagaagaagaagaagaagaagaagaagaagaagaagaagaagaaggagaagatataccccgaccccctgcgagaagagagacgtcgccataccttgaagctttagacaagagagcttcatcagtagccgtcgctctaatcacctcctccagatacatcaatgccaagtctcccctcagatccccatcgaggacatcgacccctcgcttctctccttttctctccatctcggttctctcttgagccctagcaagaagaagaagaagaagaagaagaagaagaagaagaaggagaagaagaaggagaaggagaaggagaagaaggagaagatataccccgaccccctgcgagaagagagacgtcgccataccttgaagctttagacaagagagcttcatcggtagccgtcgctctaatcacctcctccagatacatcaatgccaagtctcccctcagatccccatcgaggacatcgacccctcgcttctctccttctctctccatctcggttctctcttgagccctagcaagaaacaccccttctgaagcctttgggtcaataaaagagtttcccccacaaggcccaacttgttaggcccaaaatcctctcccactttcccttttcggcccactccactgtcttttaggtagatgggcctcacagcccctaactccctgccccctctctttagagaacccaacccattcaaaggttgggaccccaggctctccaacccacccaatccacttccctcaccatccacctgactacccaaagcttctaacccacttctcataacacccgaattgcatttgcatgacatgtagcaccttaaagtcaaaccgtttctccttatacatccctcctccctagcctccacagtccccacaacctgcacccctacaaaacgagcaacaacagaagctgcagcacccttcaaaagtccactcgtagacgacacatcctataccctaactgtgcctccacctaagcaaatctttccattggacttttactgtaggtagtgcatgaacttacatcttcttcttccctagccattgtgaggccatctacatggctcccttgcgacgacactatgtgcacaaactacggtggaaattcccaccacaatagaacgaagaaacaccctgaccccactacaacctagactgagctaggtaaacttctcccatccaacttcaacaagattcaagcccattgcaactcagccatacaagccgtgtcttcattctccgtaataaaaactccgcagccatctccaatctttttgaatacctcacggctccacaaatgaagaggaagacccaacaccctaacccatgcttcattagcatgaaactccttttgaaaacaccctacctccgggttccatttctctaaacacaaaaaattctccttagcctccaacattgtctcaaactcaaacagaaacaaccctctccctaacattgcaattcttaaaccctcctttggaagccacgagagtttcacccacctccttagaacatccaacttaggaataggaactgcagagttaccccaccatcccaccaagcactgattcaactgttccaaccttctctacatgtcactagcccccacttcaaaccacactgaatctcctaatcttacatgtttaggcttagtagcctccaaaaatgaccttgataccacccccttcttcagcaaagcttttggggtgagtggagactttgcatctcgaagaggctccactccaaggctcctcaatttctccgccagagtgttccacccccccagcagtccctttctttttggaacaataatacaaaatctttttagctcttaagtcacgaacagagcatagaaggaatcttacaacctcgttcgaacgacgttccaatctatatttccttcccccattttcccagttaagagcccactttctatctccattatccctgcaataggcctcgactccacccaacaaacatcgcaagctcgcatctccaaacttaatccaggacgtgacccctctgcatctctcccaaatgttgcctatcaactttcctccctctacctcaaccacaatctcaaaagattttgcctccactgcaaaccagcttctccctccccttgaaacctcactcatcttccctttaagataacaccccatatccatccctcataacctttgaacatcattccccttcccaaaatttatgtcctgtttgacacttattttaggaagtgtttctatcctttcaagctcttaaaagcgttttttgggtaaaaaaataggtgtttgacaatattttaaaattttaaaattaaattaatttaaattaattactttgcttagatttgctcttcgtccaaactaaattaaaattttgaattgctaaagtttttatactgaggattcaggaatatagaataatgccaattagaactcacacaactgattaaatttgtttatctaatggtatcttttgaagcagaagatgggagataatgtaagaatgaaaatgttgttttctttttatttctctattttcttagaaattaaacaaaggattagagtttctctttgaatgcttttaacttgtcatttgtcgatgctattgctgaaattttgaattctaggatttcattttggactatggctcaagctagaatatttgtaaatttaactatcaaagaatattatcttggacaattatatatatataagagtttcctctatcagtttataaccaatgtataataaaaaagttttatgagttttgaaactatgtttagttcttggaaagcataaggaaaggggaaaaaattattattttattttattttatgtttagatactgtggaaaaaggtaaagaaaaaaaaatatactaaggaaaatagaggaaaatgctaaaaaatttcctttctatttttctgacaaggtgggaaaagtttggggatcatacattcttgaattatttgattttctctctctcaatttttcatgaacaaccaaataagaatttttatttatttataatatttcctttttttcttctacttttcatctttattttcttttctttaaactttcaaggaccaaacgtagccaaaggggatttattatgcttgttagagtcaaatttttaagatttgagatatgaggcgaaataagtgatgcaacaggagtgttttgggaagaaaaaactcttcagaggtagtcagcagtttcactgaaatatccaatttccagttctatcgaatgttgattgtttctccaaattgtttttcttcagcaatgttttgtttggcctgcttgattatttttctttatatttagaaattgtgcctcataatttacagtattgattaattttatgtgtgtttaagcagtttaggaaagcagttgagctgaagaagagtagagg

SEQ ID NO: 13347 - DNA, 4754 bp, Vitis vinifera
  Intron number 5 from transcript GSVIVT01031480001 (locus G SVIVG01031480001) derived from phytozome v7.0 (chr-ID chr6 ; pos 18101977 to 18106730)
ctcacatttccttcttggtggaaacgactaaacgagtgcattaaagggggataatacttccaaaatggatatcaaatttgcagctcaagagtatttgaatcacgggacggatggagtcacattttgttggtccttattctctgaatggaatactgaacatttcatccgagaaggacaaagagatcacggggagcttggccgctgcctgcctgcctccgcttggcccccctatcacatgtttacaaggaaagctaatgaccacaaaagttgattccctcacacaaccatccaattgattttcaaaatttgatgacttataattaatagatgaattaatttatgccatagactaataaaataaagggagaattatcttttggggtagatggacccccaaattaacaaaaagttcatataactcttcaaattaagttgaaggatatgaaatagtaatggacaaatataccctttaagaacacatataaaatattttataaaattaagttaaataattttttttcaataattttttttttcaaaaatattaaattaaaattttttttttcaaaaatattaaattaaaattttttttttcaaaaatattaaattaaattaaagtatttaaaaaaaattaaattaaatattttttttaaatattaaattaaataaatttatttttaaaaaatattaaattaaataaaagtattttaaaaaatattaaattacataaaagtatttttaaaaaatattaaattaaataaaagtatttttcaaaaatattttttttttctcaaaatcaacaaagggcatttttggaaatattgaaggatgatatccttcaactcaattttcatactttcattaggtattgggttcaatttgaagagttatatggaccttttgttaatttgagggctcatctacccccaaaacataattcttcctaaaataaattaagaattatgatattttataattaacccatcagtcaataatcaagtatttattaattaaaaaattatatgcatgtgaccaatgaaattttattaactcttattaatagtattgctgcatttaaagtgtgtattggttaaacatggtgacctgggtacaatggaagtgcattctactttcttgattaatataactaacatatttatgaaaaaaattaaaaattatactaaagctgcgcttgattgccaaaaaaattgaaggaaaggaaatatggagcaaaaaacaataaaaagaaaaaataagaaaaataaacacaaatttaaagttaataaattacttttatatatttttcaaaatcttttaatttattttcatttattatatataaattaaataattttaaaatatataaatttttatataattttttaaatatatttttatctttccttaaaatttttcaagaaccaaacatcaattaaataaaactaacaaggttggtggaccaacaaacttagtgttggttattaaactcttgtggaacactagttgaacttttcaattttgatagtgcatttaagggcaaaaggactatttcattagaaattttatgtgactcaaacaaataaccatgaaaacaaatttattttcaaaaggttgtttttactcaccaatcttttcattgcaataaacaatatatgtgggcgcttgctaggagtcaataatttccatgattaagtagtcatatcaacacatgccaaaatattgaaattggtggttgatagtgtgaaagagtgatttatgtgggcgcttgctatcataaaacgcaggcgtactagcaacatcgcgactcttatcttgagataattggacggtgtcttcccctttttgtgcatgactattacctttttcttatctccttccacaaagtcctccttttggtaggaaagaaagatgaaaattcttccacaaactctcctagaataaagagacgtgtatacactcacctatctttatttgaatcatcattcttcacagtactccgtgatttgtgtctcaagctaggatatcctatactttttaggtatttgatatcaacattcaaagaaaaaagaatagatgtgtcaaaaaaatataataaaaatattgaccaatttatgaatttttaaattatttattttatatgaaatgaaaaatgagacaaataaattcaaagaaatatataaaaatataatattacttttatgatttgttttctttcactttttttctgcccttttatttgtttattttcaacatgttttctctcaaactttcttaaattcaaaggaagttctaggtattttttggttatttgatagtatattttattcatggatagtttaatgagaaaggaaataaaaagaatcctttcttaaaatattttctagcaatcaagtgtaagtcagaaatttcatttcatttcctttgaatttttctataaaacaaaaaggtcaaggagaggcaaattttatattgggttatttgctctttcccatgaaatgttgtaggctccttgtcaccattgtctccattgtgaagggcactgaaactttgtcaacattgcttaatctttctctcaacactacagcttcatcttcaggacttgcaaggattgattttcttgcatgtggtgagagtagtcgagacatcgagatagagacaaacaagcacatgcaagatttcttcttacaatcataaagttaatcttcatttttttcttggattttatttatttattttatgtttagacatattgaaaaaaataagaggttgaataccattacttttaaataacccaaggaacatgataaatataggaacaattaaagatactaaagaaaaaagaacaatcaagagcatcaacgggaaaaacatccttactacgaacccccactgatgaaaggtcatcaactctcatgactatataattaaaaaaaaagaaagttaaaacgatcatactaagatagactacgatgttgttttcttttatatattgtgatatgacatataattttatatatatatatatatatatatatatatatatatataagataattgaacttataatcagtcaatcaataccaatttatgcacttttaatgaagagcgtctcatttacttattttttattttatggttctcattaactttcacaaacctacgttgagtcttttgaatgtttttgcatgtaatttaattatgattaattttatttataaaaattttaataatttaagttttcaaataaaactgatgcacctgaattacattgtggttaagttttatttatagaaaacttaaccccaattaagttcttaattataaggatcaagaaatatattttgtcaagtttcatttataaggaacttaaatgacataaattcttattcaaaatgtgtacttgaacttagtcaatcatgattaagtttaattttatatagataggaatcattgcttacaatattacgactttgtcatagaggtaaattttttcaactttttttgggttagtcacttatttctcttaacttattttacatagctaataatgaagtgtagttgattgtttatccctttatcctttttttaatatgataaaactggtgaaataggctttaaatttgtttaccatggaggaaaaaggaaaaagagaggaagagggagagagaaaaagagaatataaaaaagggttaagcagactgcaaagaagaaactgagagagaaaaaaatgataaaagaaaatgtggggaaatagagaaaatttatatggaaggatatttttgtaaaaatgactcgtatgtcaagttttgaaaagctgcaagccatttctacatataaggataaaggtattgtttgaatcctttcaaccaaataaccttttacatcttttcctttcacaccatctcactctccaaaagcaaccgatgatgtatattatgatgtaatctcggatccctattcttgttggctctcccacttataaccaatgatgaaaatatcggtaattagggatatatagtacttggattttatgaatatattagatatatcgaaaacatattaacagatattttgacataaaatatagtaaaaattaataaaaattctgaaaatatataaaaaaaaattatataagaagtaaaaatagatattttaaagttatttttaatatatatatatataatttttcatatttgataataatatcctctatattgataaaaaatataaattttataattgtataaattaagttgcattatagattattttataatattattataataatatgtttaattttaaaatatatttaatattaaaattatgatccattttaatttaaatgtattaaatgatatcaaataaataataatatatgcataattttttaaatatttatttttattatatttaataaatatatagattataaaaaaaagacaaaattatgtttttatattttggtaataaattaaatcaaatataaaaatgaaataattataatttatttacttaataataaaaattcgaaaaaggtaaaatatttaggaatatcggttgaaataggaaaaatcgaaaaattgataaaatatcaataaaatattaatggatatatcttcccgttgtatccagggtgataggatgtgacattttaatccttgcttataaccaaagttaatacatactccttaccacttcaatcattccaaacagattcctgctttctcttctctattcacagagaggggaaa

SEQ ID NO: 13348 - DNA, 11682 bp, Vitis vinifera
  Intron number 9 from transcript GSVIVT01013670001 (locus G SVIVG01013670001) derived from phytozome v7.0 (chr-ID chr1 8_random; pos 2308725 to 2320406 reverse strand)
gataagaaggcccctcaggtactgttttatcattttatgatatgaataattcctggctttcctgttctccacttattaggccattgcttaagcttgattagtgttaagacttcagccaaatcaacctgatatatgttgttggcttagtacctaatgacttaaggttttgggtccaatttttttttatcagaaacaaaagaagtattaactatggataaaaagaacattagcagaatgaagagtcctccccacaattacaaaaacctgatcaaaatatgattgaactcctccactatacaaaaaggtctagtccacatacaaatacatatagatgttatctcctcaagtcctgactaaactccctcattgttttccaaaccctttagggtcaacttggtagcttgacatgacattagagccttgatttagggagatcatcatgttgatgtttccttcctcatttattaaaccaaagtgcaagcttaaagatggttatccgtgaggtggggtgttagtgttttatctcaatcagcttgatatacattgttggctcattacctaataactgaaacttttgtgtcaaatcggtagtttaaccattaatttaatgtttgttatttgtagtcgcaagtgtttgttctaagttttctttttgctcaattttgggatcagatggttactgtgaataagagaagttcaaaatatcaaatgctgcctcatatccattgactagggtaaactgataacctgatgcatgcaatcctatcatttccattttataagcaaaacaacatattgaggtcttagtttctgctttttaaatctttccatgaatctcgttaagtatgaattacatctgcataaaccaaagtaatttttccacactgtcatttgttgtctatagctttgttcattgtctatcaaagcttcatcatatgactcaaaaacttgataccatgattattggcttaactttgaaatatcacttttgatcttatatatttccaaatgcttctactccatttattcgacatcttcatccttgggatcttgttgaacaaattacgtgaacagaccacaacatttttttggtaatgtggacatccactatgtaagactgaagaaccaaggataaatgtctccttccctaggagcaatattttgagtaagccccggatttggacctgcgacctccattcctaaacaggaatgcttgctagttgagctgcttgtgggggctttaaccagattgcatagttgttaaaaacttacgatatacgatataaaacaatggtacgatacatttcttatagaaattgatacgtattgcaatccgtatgttactttaaagtgtatcttacaatacatatacgatacgcaatagattacaaattgatcgtaaaaaggagaaataggtaaaataatcttatatgaaaaactaccttcttattatcaaatgctatattagaagtcaagtttctttttacaatgaatattggaaaactttcatttgagtggtttaaatgttgacaatgaaaatgatggtgattaatgaataaatatttttacttaaaatattagttttttttataagggtgtatatatatggatcaattaacaacacaataagcgtatatacttagttagaatttggaactaaaaattatagctaaaaattgaagaagtttgcttttgtggattatgtgatgaatctatatattaaagtcattttgttaatttaaactttccaaaattttaacattcaatgttttcatgtgatatgatatagtttaactctttagatcttactatcttgcataaaattgattatatattactctatacttcatactttcaacagatatacacacatatacatatttttatatttctttttcactatataaaatacttacgatacacgatatagaaaaatagaaaaatgatacatgatatgttttatgagttaacaactacaaattttgtctaattagaaacaaaaaaaaaaaactatagattttactttgatgagaattcgatctagtcctaaattattccctatatttttgtctttctccactgctttgcctctattatttttttaataggaaatgacaaagggatatattgatagaaaaaaggagtacaagagaaggatgaagaatcctcccaccaaagaaaactaaactacaagaatataaaaacaagaaaatacaaagtaaaaacaaacaaactctctagattagaccaaccctttggaattgcacaccgctaaccaatcaagttgtaacacattaaggggagtccccttaaaaaccttggaacagaaagcctaaagagaagcaaggaaatgaatagaatcccaaagatactttgaattccttgctttatcctaaaaaatcatcgcatttctttctcgccacacaacccaaattaaagcgatgttcgcagcttgccacaaaactatccctcttttagataaaccaaaaccattataattgatggacaacatgtcgaagatgctcctcgggggaacccaatccatcttggctaactgaaataatctgtgccacaaccccatcgtcaaagagcaatgtaggaaaagatgatctgttgattcttcatgcacatattacaattatcaggactaagagctttgtagggtcttctcaattgtagcaagtcattagtatttaccttcttgtgtgctactaaccagacaaaggacttgactttaagagggacttgagaattccaaacgaacttttagtaggaaaagttggaggagaaccagaaaattgggataaggttagaaagaaagatttgattgaaaaaatccctgaagaagataaaggtcaggatctcgcatctgaaactaaaggtgatagatgcaaaccatcaagtgaccgcatgaggccttctaaatcttctttctcagaatcgaaaaggttacggtggaaattaaagttccaagagaaaggacgagtagaaccgagaattgaagaaatatgaaatttttatccgagactactctaaatagttttggatattgggatctcaaaggttggtccccccaccacaaatcttcccagaaccgaattctttcctcatctcctaccacgaactgagtaaacttggaaaactcgtgaaaggcttgtgcaatagccttccaaggacaacgatgtgaccatctgactatagtgttagcatcccaaccattagagtgtgatctataaatacttaaaatgacctgatgccatagagctgaaccctctctagggtacctccacaaccatttccctaagagagcgagattccttagagaaatattcccaaatcccaatcccccttttgccttcgaattacatactacatcctaactaactagataatctcttttaccttccccaatccctaaccataaaaaatccctttgcaatctctcaatttttgcagccactgaagtgggtatcttaaacaaggaaatcaagtaacagggcatgtgggtgaggcaagattggataaaagttatccttcctccaaaagataaataagtcttttgccacccatctaatcttctcgagatcctctcaatcactggatcccaaaagccacaagccttgggattccctcccaaaggaagacccagatagagtataggccaaccagaaatcttgcaatcaagcaactcagccaacctagaaagatgattccgatcaagattgatgccataaatattactcttgtcaaggttaaccttgagcccagaaatatgaccaaacactagcaatagactcttgagagtctgcaattcttcctccctagtgttagaaaagaaaatggtatcatctgcaaattgcaaatgggacaccttagttctgtacctacccaccctgaaaccctccaacgaatttctttcctctgctcttaataacatcctacttagtacatctgcaactaaagtaaacaaaaaaagggatttagggtcgccttgtcttaagcctctagatgccttgacccaccctttagcgtttccattcactaagactgcataagatatcgtggacaaacaaccactcatccatttcctccatctaggactaaaccccttcttctccaactcatgatccaaaaaatcctaactcacatggtcgtaagccttttcaaagtcaattttgaagacgactccttcctcccttgatcgtcttttctcatttactatctcattggctatgagaaccgcatccaatatgtgtctcccttgaacaaaagcgccttgagtataatggatggtttcatgtagtacccctcttaaacgccctgatagcactttggctattatcttgtagagactagtgatcaagctaataggtctaaagtctgagattttctttgtcaagctttttttgggtaatagaactatgaaggaggcattagtgctttgattgataatcctacttctgtgaaactctgcaaacactctcactaaatcctccttgatcacatcccaacaatcttgaaatactgcaatggtaaagtcatcaggccccagcgccttatccctatctaactgaaaaatagccttagaaatctcttcttcagtatcacccgatggggagaccacaatatcaccctggctaactgtaaccaggttggaaacctccttaggcaaattgggtttagacttaatggggttaaaactcttggacatttggtttgaataagcaaattgggcctccaccacatcatggataggattgccaacagatttttgataaaaagtgccaacatcttttttagaaaaaatttcagaaattactcgattttccataggagactgagaatgaaagactgaagtaggaagatctagaccagagggactcgacaaaggaagtgccaaaccacaagaagggagaaaagaagactcgggtgactaagaaggtgaagacgggcatacctccatgttttccactaccgacattccacaattccccttaaaactgagccctttacctctgatttcttgattagaaggcaaatccgtgactgatgaaccacgaagatcagaccccacttggcccaaaaatccttctttgtcttttttgaaatagggtttgcgcaaagccgctttgcctcttgacgatgaagtcccttcccccgaataccgctttcgattccttgacgattgacagtgaaagagaggactcactctaaatcctcgttccacctgagatcccgccccgaaatcctcttcctttggacacttttcgctatctacttggaggaaaaagggtagtccatagcttccttgaaccaaatttctctttcttcttcacagagcctctcgtctgaacctcagaagctttccccttctcactgcagcatcttcttcccttcgtaacaaacccgtcttaacagaaggcttcattcctcctattctttggcccaactatgacgggccttttaagttacaacccactattgcggcagatagtggactagggttgggaagagactgggcctttctctcaaaggcccaaccattctcatctgagaaagccttgtccccgccggccctagcttcgactagaccttgagaacttacaaataacgggacctcctttgcagaagattctgcgcactggagcgttgaggacgatcgcgctacagtcttgtgggcttgaataaaaattggaccagcaggaggcccaagacttttcgctccaatctgggccctaacagaccgggctttaaacaaggcctcaggcttagtgggcccgttattgtttccctccgctgggcccaggagacgataacgtgatcgaggaaaaggcctccttctgtagcactcattatccctagtgctaccacatagcccctctgcattctttggcctttgagagacgcaacctcccgctggcatcaactcgtccctgctatgggttgactcagacctgaaaaggtcgtcttcttcatcttcttcggtgactgaaactgcaactgtgaatgaccaggcctcatcttccacctctagcaatgcaagtagcacgacatttggaagcatctccacccacaacttcaccttcgacaagtctacaagcttcaaagagtcctgtgccaccttcgttaccctcccccacttcttcagaatgtatttcaactgaccttcgtcccacaaatgaaaaggaagaccttttagttctaaccaacccctgctgaattttccaaatacagccgtattttctcttggcaaccatctccttagaaaaatataccttcctctcattaataaacttccctgctcttggaaccattcaactctctttgcagaatccacaaagaaacaccccttgtaagcggaaataggggttacagacaccattcctttcatactcatcatccccgcaatagcttttcctacatgaacccaatcttgaactttttctttgctttcataaattacagctctgacccattttccaactggcaatagagctccgttcctaggtccttcctctgcaaccatatctgcataggactgacatcctctataaatgcccttactcgcctgaaaatcttcaatcgtctccttcgaaactcttccagcttgatcagaaaaatctagcactgaagaaatcgccttccttagggcttcctacccattgcctttaacaccctcgggaacaacaaggattaatgatgtcctttttgtaacaatttctgtaattttcgtgaatcaccctctactattgaaacaaatctccatcaagtgagtcctagtcttgctcctaatcttttgaataaaacccctggaagcctccaactccacaactttcttcaaatgctccgacaaccattccaattcctcctttccaaatcctactgaaacaacaaaccctcgactcctctttgttattgagatccaagttcccccattggcttcaaactttacctagaaagcctttttctccatttcaaaaaacttcgccatcatttcttgaaaattactttctttgcctctattatcctaattgttaaaaaccaaagtgtataatttgtctcctgtagtattgctaagatatctcaaacttactcccccacttggttttgcattatgtgaaaataactgctttttttttttctttaatttcttcatctcttaccatatatgttgactcctatccaaagggggcacaatccacgtatgcgtgttgtgtacaagttgtgaaaaagtagggggaaaaaaaggaactacaaattaccacacacttctaagtggctcacccaatctatctacaaagtgaaaattggagaggttacattcctcattgcttcattagaccaaaagaacaaggctttgagaaatattagacaaccaagtttcctagaagtataagcttgtaggatttgggcccacaatgtatatcatgcattccaacaccccctccctcatgtgtgacttcataccacacgtggagagacataggcacatatagccttgcagataaacaaatcactaactgtctcatcttcctccccatgcttccttgcaatcacccgattccaaagggaattcgccttagtaaagaatctccaataccatttgccgagaaaggccttattgagaatggataggcttctaatacccaaggccctattcctcttctgcatacaaattgttggccaattcaccaaatgtggcttattcacttgggcacctcccctccccaaaagaaatctctttagatcttctcctatctggggctcacctttctaaggatgataagtaaagacataaagttgattggcaagcttaaaaaagtatgttttatcagagttagtcttccttcttttgataggtattgcttgttccctatagtaagccgtttcttaattctttcctccagcacatcccaaacccatgacgatctgaaagttggtccctatggtaggcccaaataaatagtcaagagggtgcccaccctacagcccaaaacacttgctagatcctccatattcattaccgctcatcttgacctggatcaacttttctccaaattgatttttaatcctgatgttatctcaaatcatatgaaagactaacgcaaacactccaaatgttcttgattggcatcataaaggatgagagtatcttcaacaaacaacaaattagagtatcatatccttcttttttttcttttttcaaattttccctaagcctgtctttatctacttagtttctgtacacaagctatagcaattctctattgattcaatcctttcctctgttagtgacaatatttgaagttcttaattgaattctactctcttgagctagcttcttcaccttgtgtcatcagttgaactgtgcaacacacctttgcctacttacactgtatccaggctatgatgtggtgcttttcaccctgggaaatctagataacccttgtccacttctcactaagcttgaggtccaatagaatgcatttctagtagggaatggcccaacacattctttttcaagattatcattcatatcttgactgtttttcgtgttagccttctgcctatcattgttctcccttatccaggcttgaaatcggccatttaaaaataacaaattagacagcatagatgaagttagactgaccaataacaccattgcttaattcttttggatttcaatcattcacctttgttctcaagagcaactcaatcttgattgcatcaaagtgcagctattagccactaattctgcttcctggttgatggctatgaagtagttttccagcttttagtttcattcaagtcctggttgaggtaaaagtaagcctacaataggtcatgtagatatcgtgttgcatttatccccttatcatattggtcaagaaagtaatatatgatctatgcccttgtggtttggatttccaaagtcataccattagcaaaaaaggggatttcagaacaggtgccccaggtgaattggcggatgtctaccatatgtctgttatacaggcatccccctctaaagattaatgctaatccaaactgcgtaacttggtcaacttctattctgaggtagcatctatcagtgacccatacaacatttaggcctacgtttaggaggaaaccttaagaggtttgagtttctgttattcagttgcagagaaagcttccaagtgtttggatgtatagaagaaagattccagttgttgggcctagggtgagtagggtgggtttatatggtttgggtttggttggttaggaagagtcacgtcatcctgttttgcctggcttgtatccccatttaaagcgtgtctgtctctaaaatctccaatgatgttgccactgttctagagaaaattctgagcatggtttaggcatggggaggttagatgctatcctctcagtaggggggaggttagatgctgtcctctcagtagttgggaggtgcatcaagccctgaaagagacgggagttcggtatgggggccattttatttgagtttacaagtaaatggctttggaggatccctaagtactgaactcctctttggaactcttttattaaaacgaagtataatctgcagtttaatggatgtgatgctaaactcatagtgaaaactcttattttgcccttggacatcttccaaggtttttctgtgttttctcctctcatctccattcatccatgaagttcagaaaattcagattttactttcctctcattcgttctaccctccctagaagtaatgaatggtccactttcccatcagcttcttcaatttggaagacagaaggcattggtttcttcaattttcttgcttagaagttgcaagagcatcaatagactcgataccattaactcacaccaaatccacccacaaggctattgccactgacatttgtttattgtgcatggagaaatggacaaataatcagtattttttcttcattttcctctatcatgccagatatggtcaaatataattgatcttcttggattggcttggttgttcatatctagtccatttgtattacaatatgcatgtactgtatctttgtatccctacttctaaactatttagactcttagtagaaagcctaaaagggacatgcttccattctcaaaatccaaactgctcaccaggtatgctcctatcaaagtaatgatatgttgaccactaagttttcatcttctcacaattggaacatactagatgaaagagttcctattcaatttgatctgttacttatcactttctaatgagctgtggatgcttctttactatgccacagtgtacccttcagttttctcctcttggatcaaaactcatctatgcttagcctgcagctaatctatgactaaccttacccttgtttctcttagtcaagcttctcacttgcttgttttaagtcctggttagggagtttcaaatttgatggttatctcctttgatggtttggttactgggttaaagtgtaaagttctcaggaggtgtgcttctgtagatactattcaggtcatctggttggaaagacgtgcataattttttcgaagagaatatggggaatgctaaaaatatgtggtacaaagcctgttccggtttgaactgctttttgagtttctatctccaggtaattcaatgacattacctctaggccattgttttccgctaggggggctacttctttggaaatcagagtaaagtgagtgatactctttaataaactcttgctcttgctgaaactttcagttcaattttgataggtggtctctgggtaaactaggccaggtgggcatcagggagactattatgaggagtgtccttgttcaagcttattctaagcttgcttgagtcgagtttgctatagaagcagatattcaagctcattcaagcttattctctatagcactcctacggagtaactaagtgaagccatgtatggagtttatttagtattattattattattattgctactattactattgttattattatcatgagatagatgtaaatttccaggaactttagttatctaatatgagaaaggacaaagttaagaggagaagactcttaggtaattagtgatcttggttcagctttgtattttcttgtgcctgctctaggtgtgatatgatgtcaaatggaagaggaatttggaatctctaggttgagtgtattagagtttgggtgaatgctctgtttgaaggatatttctgcctcaatgtaacctacaagttaaatagttgcttgctgcttgctgatcctattgcaatttgcattcacacaaaaagaagcaagacatgacatcattaagttagataaaaggcagtagcaggcgccacaggactatagagggttgtcgatttacccttttagtttataattttgtgatataaaatggatttccgggtggttggggttgaagtttgtggttttttaaatagatgccaaccttccccacaccactccctccccttctgtaacttgtcctagatagtttactcaacacataatttcttgaaattattcaagctggtcaaagtcttttcaatgcatattgttttgaaaggtgctgcaaatgttaggtttttggcgcaattgttttcttgcatttgaaattttgctttgtttctgcagttgcagcttccacctgagattgagtcagccttgct

SEQ ID NO: 13349 - DNA, 8900 bp, Vitis vinifera
  Intron number 1 from transcript GSVIVT01034887001 (locus G SVIVG01034887001) derived from phytozome v7.0 (chr-ID chr1 8; pos 15976944 to 15985843 reverse strand)
gatcaaccaagtctaagcaggttgccgttgcgaaggttagtaggaggaatcatgatgtgttctttacatacacttatattttttttgttttcgatttctaattcttgctgagtttagaatgaatgatgcatgtttttaaaaggtcactaagtcctttttattttttttatttttttattttttatcgtggttacacttgctctttattgcattttaatgcacaagtatattattagaacggggctgctgcaaaatggtcgtgccttgactagaaatgatagtagagaatctgcaatatatcagttcatggaatcctgaaaaactgacctttgacatcccactacactgattttaccgtttcaaaggctatttaagaagcagcaaatgatttgttgtgatgtttgattatcagtgtgcttcttttcttctctgtccttgattgctatttcacctcttttgcaatgaaactgatgattaccttttcttgcacctcatattggtattttcttttgtagagcacccttttcaggatggctggtatttagcccctttggcatttaacaatattagggttgttttggaagagcacctttcattcttcttgagagagtgttagtcatttatgtgctaatgttggtcggtgttcaaaggcatatctctttactatattattaaagaatgacactcctatggccttttttagagctttagggccttaagatagggtgctcactctctcctttcatctttgttttagttatgaaagctcttagccaatttgttttgatggcgatatggggtagttttaagtggtttcaagattagaaggtgggtggggtggatgataccttgctttttgtttatttatgtgatgggtagttaagatatcttctatggtttcttatatgctttgagcttgtctttgtgttgaagaagacaaatgatttttgtggatgagttggtggcaatggagaaatttgcatctttgtttggttgtgggataagtagttttccttcgacttatttagtactttagtcataagcttcttgcaagtcttgcataggatgaggttgagtagatgagtcaaaataaggtttgctccatggaggaaacaatatttgtccaaagggggtgggttgattcttgtcaatataagctttcaagttagagaagatttaaagagatttcctataggggcctcgactagaggggagaaagttatatttcatgtaatgatctgtgggaggctttgtggggtaaagttttgactctagattgtctccaaaaaagagggttgtccttggcaaacaaatgcttcctttgtcattttcaggagttgattaaccacattttgctgtactgtagtgtagcaagggccttgtggcagtttttgttttctctcattggtgtttcttaggtgttgtcttcttctataagggagactttggtggcttggcatgggtcttgtgttggaaggaagtggaagaaagcgtggggagcaacccctttgtgtctcttttggacaatttggaaggagagaaatacaaagtcgtttgagaatgaggagctttccatcctaaggctgaaaaacttgttttcttggtccaggatgtatatagctgtaggtcctatgcccctttgtgactttattgattggttgagtcgtcactaagggagggagtagttttttgtttccctttccttttttggtcatcttttgacaatcgttgtatacatcttgtgtactttggtgtgctttctttttgacacttttaatgcatcttttgtttacctgtatatgaaaaaaaagggttgggaattaaaaggctttctacttcgagtaccaccttgcttggtaagtggacttggagataagcaaatgagaaggatagcttttggaaagtgttataagaggaaagttcaaggagatggatggaggttggagtacatagggttgggagctcaatctcaagaggaatgggcttatgaccaagttttagctggataggtgggttgggagaaccttttgaaagaggcttttccttctctttattgtcttgctatagccaagaatgcaagagtgacaaatttatgtggaggggtgttgggattattgaaacctttgcttttgtaagcctttttttggaatgagaattagtgttggtgggttgatttactgattgctaattggtggtattttgcaaagggtaaggctgggatatgttagttttgaggggtgtaaagaaggggcctttttttggtgaattgttattataactctttgtctatcatgacattgaatcttttcgtgcaaaggaggagtaaggctcgaatgctcctccgagttttttttttttttttttcactttccctgcttcaaaagctgcttggaagaagattctaactatagacctactcataaagaggatatggtccttggttagcaaatacaatttacaatttatgtaaaacgcacaaggagacaattagccaattcttattcattgtggtaaagcatggttgctttgagatctttataattttgaggttttagtgagttcttcaaggatagttagagattttttataacttggcattggagaggcttggataaacaaataagaaaagtatgcattagttgttctttgcttgttctagtgctaatagagggagggggtctacaaaagaggaagaactatttgactaaatactgaaagatctctctctctctctctctctcttttaaattccttacaaatctcttttagagtgaggctcaagctttgttggggttggagtcttgcttcgtgttgcatttccttgatttactaagtgaaggtcggtaatgtgtccttatttgttcttttcctcttcttttacttttcttggtgatttttgtgtagttcttgtagatatggattgcatccactctttggatacttgcattatgaatctgtagagagttgggaaaaagatgtgtatagggctcattcactaatttttagtagaagcacaagatatcatataatatttcccccttatccttccatttccttttgagaaaaaccaggaagggattatgggtttcaatataattgtgttgtttaatctcattagagaaggccttgcccctttttagttttaaattttgttgcctcgtcattcatatttagctccttaattgagcattagtgggctaggttttccattatgagttagaaaggctgtaaacttttgccaagggtaagcttagggagtggaacatgcaattgtttttattcatctcatggcaataggcaatcaatggtattgaatcctaaaaaaggtgaatcctagtacaaatcagctatgagctaccaaacgttgaactgaagggtttagtgactttgaagacaggaaagctacagctctcaaggacctttgctttagaaggtttggccacttgcaataggccttaaaatcccaatggggtgggtttgtgggaggttctggttcaagtctcaatagggactaaaaaagaaaaaaaaatacctataacaaaaaaaaggccttgagatccctaagatctaggggatttgggaagaagttgatcattctcaaagaggaagtgagctaaaggcaaaatggagtaaattgggtgaaagaagggattggagttcaaaattatttcatggactggctagtgaaagggaaagaagttcaccaaattcactctctttgagagaacaatatgttagacaaatcaagaaattatttcaaaagaaagtatgatatttttcttcttttttgaaatagtgattctgttagatattccttcaagggtctttaagcattatggctcaagggcttcttcaaagaagaggttagagaggtgatgtttttgatagaaaatgaaatactagggtaggtaagtccaaaattgctttcttccaatgttgtcttgagattcatgaggatgcttgatacatcagcttagcatcaagacattgtggccatcatcctagcaccaaactgttagggctatttgcctagcactaaaatcttggggcattatcaactataccacaaacttcacccttaagagtgcttgtttgtaagaaggtcaaatagatttgtaccaaggactttgggcctatcaacatagtgaccatttgtacaaaatcagtctaaagttatctttagaaacatctatatggttctctatgaaaccatttccctacctaaggtctttttcaaagatagacaaagtttgcatgtgatattggtgatgaaattcttgtagagaaacaatgatctagaaaggaagggcttgttcataaagtttacttcaaaagagcctatagttgtgtcaaagtgagagtgtttttttttatcattttctgatatgtaaagtttttagatgtaggtggcgtgaagttgatgagaggttatgcatcctcaacattctttgcattctttatcaatgggaactgataaggtaataggttggaccaaggtgtttagagggctgaggtaggaagatcctctatcacccttatccttactgttgtggttgatgatcgattgatttttccttgtttattgcatcaaaacacaatttattacctaattcactattctagagtagcttatgtctgataaaaaattgttctaatacaaactataataatataatagtttttaggtgtcgtccactatgatagattattttcgacaattaaggcttgatgaggggaaaaacaatgattgtgataaaattaaattggattggcaattcatgatgaaaaatcaaaataacaatgatttcaaattgggaagaacaataaaatgtaaaacaagagaaattaataaagaaaaaaaactcaaggggttaggattttctagaaaacaatctttatggtgaataggtgttaagttctatttttcatcaagttagattaaaaacctaaattctcatctaaactaatttttgatttaattttctagatccaatttttcttcaaattaggtgatataatccaagagatcaattcaaaccatatatttaattcatcttaaaccatcttctaatgattcatacaatgcaactatttaatgtcattaaatttagctttaagaatttaataaatctatttagtttgcaatgtaatagtcattcgagattatttgaagagaaaaatccccaaaattcaattaatcaatcaattggatcaaattactttgacaattaaagctcatttctctaattcactatagatcttgcttctaaatcctccttcctccgagaaaaaggagatttagccactcatgcttggagatttggtctgacaaggcatgtttggctagtgagaaattgagggaaaatgaaagaaaatagagaattctattaagagaaagaatttctaagacattctacaatcaaaagtgtccaaaaaaaaaaaactccttaatgagagattcaagttcctatttagatgccaaggtcaagtggacacttagcatcatctaacaggtcttttggaaccttctaaattcaaagaaatctggaagtttaacatttcacatgaaatctagacattttgcatgagatattcccatttctcatgaccgtgtgaaattctaaggtgagtggcagcagcgtattgaaactctttttggaccatttcacatgttcatgcaaaatcaattcagtcatccttcttagcctgcagcaacatttttctcctctggttcaactcgcatagtcatgcgaatgcacaatatatggtttttgaggtcctctttgtcatttctttcattttcttcttttgatttcaagctaactacctctgatcagtcccaaatctcgatccaaactaataacattgcttattcctcatcatccacattattcgcccttttcaattcaatttatctcttttgtcactcaatgcatcaaaatcacaccttgaaatggctccaaaacttcacaaaaatcattagtaactcttgcaaaggcaacaacgtattaattgaacattctaggcataattactactcaaaaaatataaaattcatgagaattattatctaaaatatgctctttttgagtagtaatcagtggatattttgatttgcatggtatgcaaggttgaagacttatgtctagtggaggatatctcatcttcaatgtatggatgctccattttcttctaatatggttccattcaagaagtatccaatttgaatcttattctaagggcgtttgttctagttcagttttaagattaatgttaggaagagtatgctactggaaatgaattttgattagaatggtatacaaggttgaagactaatgtctagtagaggattgagtcaagatatctcatcttcaatgcatggatgcaccattttcttctagtatggttccatactaggagtatccaatttaaatcttattttgagagagtttgttgtagttcagttttaagattaatgttaggaagagtatgctactagaaatgaacctcacttaggagagagttgggagtcctacattctctttcgggtgtgagcctagtgattagatgggtgcattagttgcatggcactaggaggtagctctagagtgccttgattgtggctggtatctaaacatctagatggtttgacaagagcatcactttttctaggaggtagaatcacattaattcaatcttgccttggaatatttctacctcttttatgcacatctttggaatcttagttgtgtggctgctaggattgagagaatttggtgggatttcctcgtcattgtttgatgaaaattacagagatgtgtatttctttttattatatatatatataatttttatcaggggaaaagagaaggttcggtgggcaggtgagttttggtgtgggtgggggtgttgtggaattggttttgacatgttaagatgccaatttgacctaaaagcttaagttgttgggtggtgggaacgaagcttttaagtaaaattggtatattaagttgttggatttcttcttcttcccccccttttttttcttttcatttttatttttcccatcgtaagcgccaaagatttattccctgcaatgacagtgcccatgtaccatgtgtttctttctagccctgtagtgcaagatctttggtagttcatccttccgatggcaacatccaatttgtggtctcaaaggagatttagaatatgtaggttatttctgttcagggatttggctgggatgataagaacagaatcgtgtgccttgctgcatgctagctactccttttggttatgagaggaatgctggccttttggaaggtagctggagacctttgactggactcggaggaaggaaggatattcttcctgagctcttttagatttcattaaccaagaaatttgcaggcatctctcttggcatgttttctttggattgaaagacaccctgcttgctttagttaagtgcatttggtatcagtggtgattgtataggtggatcaggaattggttctcattccttatccttgtgaagggtatctcatcctgattggaaatatttgcatattcttttccttatgcaaatatttcatccttgtacgctccaatcactttgaataataatatatttctcagttttgtatattgggggaagaaacaaaaagtaaaggaaaaaggaagaaaacaaggggtatatagcctctgaacaacatcagagagtgaagttgttgctttctcattggctaatctaccatttgttatgttgggatcccacgtaagcatgggtatctgaaaattgaattctgacaccttctgtattggaatctttggcaagtttgggtgggattattttcattttatagtaatcatgatgccaatattgttttagccttctcccaggtaaatttttggttttattttttgtggggctttggaatgctgctaaggaatttaaaataaattttgtttggagaagtttgtgctaatcttattgattggccaactaactgatcattttgcctgtggcgcttcacatttttaagtaactaatagacctttcatctcttctggtggggtctagtgattggaatatatcaagcaactccaaagttgaagtttagcaatgggggtacctccacctttcatcattacttgaagactctatcccatcttttggtacttggtgtttgcctgcagtttctttttctatgtttctattttttttttcttttaaggagatagtcctctccttttatacatgctctatattcagtatggttgattggaaaagaaatgacatataattatatcaaatgagtattttgagaaaacaagtaggaaaactagaatggatagaattgaaaattaatgttttcatatggatgtagtagagatagtacctgattaggataagatctaagtagacttgatggtttggtacaattaagatttaatagttgtgtcttcaaggagtgacctgttttcattcacagtactaattgacatttgtgtttaagacctcttctttttgatccccagcattcttgttttttgcttttaggtattcattttcggttactctcctatagttgctattcttgatactagttgacactctctgtgaatttactaattgctaggataatatgccagcatttacctgaacatcataaataactaaatataatgtcacatacagtattttttgttcttgattattgaggaatggtattttcatttttgaaattgatattgatgaggtaacagaatgatattcattattatattggtaatgtgatgttgaattgtcttaatggatcaatatttttagtagcactttaatggattgatttggtataccaggtttcagaagtgagctcacttttgggcagggctgg

SEQ ID NO: 13350 - DNA, 4210 bp, Vitis vinifera
  Intron number 12 from transcript GSVIVT01024260001 (locus GSVIVG01024260001) derived from phytozome v7.0 (chr-ID chr 16; pos 325174 to 329383)
gcccttacagacctcctgcagagactcctcgtgtggtaagtggatccatatattaacttcttgaatcaattcctcaagtttctatctgagctctgcctttaacttccatatagattaggcctccctatcattattactttcttcatcatcatcatcatcattataatagtcgaattagaataatattaaaaggtacctaacaagagggcataacccatgtacttagagtattcaaggggcactaaaaggcaacaaaagcacctcaaaacctttttacttaaatggtttaaaaccatagttacctatcaaaaaataatagaaccatagttacaagctgaaaaaacaatagatcaagagaatgaagttttgcaaataaattcttcaacaatgcttccaaactcttttttccctcgaaaaaacatctgttttgtctttccctaatggacaaaaaagttgaagagtaatagttcttcaaagcttcttttcttttgactcttctccacaaaagtgccatggcaacctgataacacaaacatctgtgagccactcttcatggaatgggctagcacccacaaaaccacaatcatgaaaaatggcaaggaccataaactgtgagccactctataatgaatatgaacatgattttccaactcctcatcccactggccaaggaaacaccatctggctagtgaccatcactattcaatgagttgctgatcgtgcatgatgagtattttctcctgagcggcctcatgaataaagtaatttagatagtataacaatgaagtcaaacagggtgaaggctagcatacatgaagtatatgaaggaccggccaatcaagattggcaaaaacaaaaaaatagaaaaagtaacagcaaacatcaccgctacaaacactcaaaccctccttatcctatgcacagattctccctttcccaagggcaccatgtcccacatataccaagattttaagaagacgtctttgcgctttgcaatagaaagttttatcccttctgactgaaaaaaagaaaaaagagaaaaagagatttaccccttttaaggctctccaattcctctccttccaaatacacccaaaaaaattcattggaataattctccaaaatttccttcttttctttcccactaaactacctctcatgatgaaaaaggacatttaatttttttcttttttgataggtaaaataaaagtgtttatatatataaaaaaaaggcaaggtgggggggcacaatagagtgtcccaaactacataggaagtatgcatcagtgttgaaagaggcacaaccaatagaaaaaagggactacaaaaaacaacactcacctttagtaagaacccaactgaacaacaaagttgattaaagaaaaagaaccgtcatctttgaacaacttagttcacgaccatagattacaaacaaaagagtgtttcagtctttggttggaaagctccttgttatcaaatgctattatgttcttttccttttaaactgtccaagagatacataaggggggttgctttccatatctttttacattttttacccgcaaaagaatcatgtcaacccaaaagggtctctctaaaagagaagagaacccaagatacgccaaaaggataaataacaatttccataacctttgcctttgcattataaacacagatgtggtcgatggattcttcttcgttttggcaaaggaaatgtttgtttgttaaagaccaccccctcctgtgaatcagatccaaagttaagacctttctcatgtggcctcccaagcaaagaagcccattgtaggctacacccaggagttccaaataacttccatcgagaaggagactaaacttctcggctccaaagtagaatagagggctttgactgaaaactttctcttctttgactctatccaacacaccctgtcttcctcatcactatacacccactcctcataaagtctcaaaagaaatcgttccacaatttccacttctcaatcattaaaaggtttagagaagcaaggagtctaaccactcccttctattaatggagtccaaacaatcaccattcatgccacttttaaacgactaatgcaaataagggagagaaggtaccacataatatttatctttgcaccacttgttcttccaaaacctcaccctgtgtccattactcactaaaaaagaaattctattgctcaaaagatctcaatccttcctaatgaccttccataatctaaaaccatatccattcctaacttcacaagagtgccatcccccttcttcttccctatacttctcactaataacttgcttcccaagggctccctctttcattagtgaaacgttaacttcattttgaaaggagagtcttgttgagtgctaatagacacctaacacttgggctccgctttcttttatttgaacaaacaatcgctcatcttactaaatgaagctttcaaatgagagtcctaccttcccaaaggaaatttctttgaatttgctctaacctcaatatgattgtccttggcatgcaaaatacgaagttaataggcatactggaaaaagtgttgtgaataagagtaagtctaactcctttagagatatattgtcttttccacatggccaaccttgtacgaaacatctcttccatcctatcccaagttgttagaaatttaaaagggacaccctaaaggaagtcctaggtaagaggaaggaatcacacgcacattataaccaatctctaaggcttaactcttctaagttttccactctttccactagtgttatctcattcttatctaaattgattctcaactccaatatgacctcaaaccatataagcaaccaactcaaataggtcattttttttgggaagcatcatagaaaataagagtatcaacaacaaacaatagatgagagacttttacctttgcattgcctctacccctcacccgacaactagacaaaaaacctccgtacttagccctcttgagaagacaattgggagcctccataacaatcacaaataaataagtcatttaataaatcaacatagagcacttgttattgcatataattgatttgacacatggttttgtttgcttttgacacattctattttacctttctaatgttttaattagcttgttttgaagcataaaagaaattagctctcaaaaagtttatgtatatgtatgaataagaaactatacaccgaggtacataagatgtatacaatgggtaccaaaaggcttttctagaagagagagaacataaaaaacgactccctcccttagccagatccacctaatctataaaatcaattaatattatcgatcctttaatgtggcgtaactttgaagcacaaagaataacgccgtttttcataattgagtttctaatattattttgttcctcaaaactattggagaactagtcctaaaactgttagcaaaaattgatttctgagaacagttttaaaacatgttgccaaacacactgtaagttgttttttatgctatgaggtaagtcccacttcttgctttactctttccatttacaactgaaacatgaactcctaattcacagttggggtttgtgtttcaagtattttgtgccttttttgggaaaaggttatcaagaaggcacctgtttcttcataagaagttcttccactgtatcatacatatttggcatgtttaccaagataaaaaatttaacagcttcatgggagctcaacttatggaattgccaattatatttgtatacacattggtcaaatacccaaatctacttatcttttgcactagtgtaccaagcttgccactcttccacttcttggtctggatgtggtctaaccaaatgcttattggagatgaaattttgtagatgggtccacatagccttcatacacctgcagtgaaatttttttgagaggtatatttgagtgcataaaatgaactgagaattcatgaatagcacaaggaggcacctcatatagtgttggttgccttcttctagtcttctgttttttccctgattcattcagcaatagaaaacaatgttttgctgcaattttcctggattgcaccgcttttgtcttgttgcagtcagttatttgttggacttcaacttcccatgagttgaaaattatcttacttgtttcattttttttcttttccttttccatagcctgttgctcaaa

SEQ ID NO: 13351 - DNA, 3093 bp, Vitis vinifera
  Intron number 3 from transcript GSVIVT01009265001 (locus G SVIVG01009265001) derived from phytozome v7.0 (chr-ID chr1 8; pos 6812466 to 6815558)
agctatcaggaaaggagtggcgccagattcttgaggttggtccatttaaaactcttcattattctgccaattataagaatttgttaattttctagaactgaatgattactattatgccacaatggcgtgacatgctactcatcttatgatactatatattcatgctggcaaccaaacaaatactgacattggctggtgggcaacttgattctaatatttgaaactcattactctctgatataatttgcagagtgcttgctctttcctccatcatgaatcatgacccaataagtgaggtcgaagcctcaagattccagcaactgaagatttttcgccttccatgggcaatctatctgatttattcaggtttccttaagtattatttgcaaaggacttttggattttatttttttgagtggttcattttccctggcagtggcggagccagcatgggcttagtctcaaattttaaaaataaaaattttccttctattaattaattaagaattaacaaaaataaaatccaaaagtgtaagtttgccccccataaaaaaaaataactttgtgtgagaaaaggcaggattagatagagttaaaaaaaaaaaaaaaaatatatagataagtccggatgctaaatagattttataaactatttggttgttttcattttgaagtttatttaaatctttaaaattaatttttatttaaatcccaatatacatcataaaataaattttaataattttttttggtaattttgtacttgatattttattaaatattcttttataagtggattgtctttagtttgattttgtgatcttttaagtgtttagatttttagatttaataaggtaaatagtaatttacaaataatgacatgattattttaatttcattcaattgttcacatggagtatttcatgtttaatttttatcataggagattatatggtttatatgatattttgaataatagacaataattgttactttttattaccacttatgttttatttgaagagacttatgactccaccaaattttgaatcattaaatcactaatgttttaatgatggtggaatatttatatttccatattgtagataacccataaataaaaattttattactgttaagtgatttatatttaattatttgaaaaattcaaagaatttattagtgaaattgttgatttttttctaaattttttgtagtaaaaacttgctaaattatttatatataaaaaaaaacagtgacatttcttgccattttttaaaatgcttttgaaaaaatcttcgaattttttaataaaatctcaaacttaaatattcttaataagaaattattttaccaatatttttcacattgttgttatttaatttgatagattgtgtatttttctttcctttcatgattaatgtcaatcattgcttactttattgaatgatgttaagactattgtttgtaaaatatctatatatattataatccacaaattttctacttgcccttcctgaccccttttatgacttatcatctggtggagatgaattatccaatcctagataccttgatatccagtattctttttttcaggtttttgctatgctttttaaattattccacatcattttctccttttttggtttgctggatgcattgacaagttgaatatttacacttctatcctgtgacagagtggatgaaaatatgcatttccttagcacatttggtaggaatgtagctgcaacgttgtgtcctaaagctagattcaagtttaaaatttctgttaaatgaatatcgtgcttttgaaactttgagaacatagtggtgtattaattttattaattgattttttggaacttatttgactaccattaatttccttagttcatgccattttctgagtgagagatgatgtactcaaactctatttataaccttatatacctgttcgtgattttttttttccttatttccataacattggcaaactatttataaataatgggtgactcaggttattctataaaagaaattattttctactttttatgtgctacaacttttgcaattaatcctatgtttgtggtcagatttcttgaagttatacgggctgctttaactatttagttacatgtatccgtgcccccacctaagaatgtattggcaataaggcaaggtccattaccctgaatttccagggcatttttacttcaaattcctctggttgactgtacaactgtactgagcttaccaaatgacttccccagtttgagaatgctgatacactgattcatcaccacaatttacaaggtcaacctgcaccaccacaactggcatattctgtccacatccatacccataccattgtatagtacaagcgcataataagcccaatgtttcttcattttaatctgaacaaaagattggggatgcagggaagaggaggggagggagggaagaggaggggaggggaggggaggggagggttgtgtggttgcatgttccatatgactcgttttatggcaatttattttggccagtaacatgttattgttctaagtgacattttgtgcttgctgttcctttagttgcagaaatcaaacatgtacttggtttttacttgtagtgtaattggcagttttctctgacttataccataattattgtagaagaaaaggtgaagcataatgtctcaaagaattttccatgtgaaaaaagaaggccataaaggttcattgccagtgctggtcccactgaagcatgttcctgtcttctggaacacaaagcaaaaagtctcatagtcctgctgaatgataatcttttattgctgatcatattagtgattttttgcttgtcatgtagttcacaagtattatggttttgtttcctttgagcaagattgttaccagcttaaccatgctaacaaatcattcatttccaagcttgactgtcgtgattcagtatttctcctctctgtttgtttaactgaattcaaaattttggactatactgtgatctgtcctccttacctttttgtccatgtttgaaggattacaggcaaacacatccagaagtcacagttct

SEQ ID NO: 13352 - DNA, 17842 bp, Vitis vinifera
  Intron number 7 from transcript GSVIVT01029314001 (locus G SVIVG01029314001) derived from phytozome v7.0 (chr-ID chr1 1; pos 16970344 to 16988185)
tcaaacattgttgcacaaaatcttttggttgataggtaagaattcatatcaagtctatttgaaattatattgtttctgagtgcattttttttttctccatttgtgtttttttgttctctctacttaaaattaaatccagactggattggttatttgaatatggaaccattgcctattcctgcattccatgtttcacatttattgtttattgttgaaagtttaaggtaacacctttttctattttcaaggtgggacataagtcatgtcacaatttaaagtgctaaacaaaaacaatatgtcaatgtttaattaatctattattaaatttaataatagattaattaaacattgacatattgtttttgtttagcactttaaattgtgacatttaatatatcaatatatctctttgtcgtttcctatcaaaaaaaaaaaaaaaatctattattaaattttgtaaatagaaatagggaaacgggccagaaatatttcgaccaaggaatgtaattaaattaaaaaaaataaaggaatgataagcaagagaaacatggttgaaaaattattataacaaaagtaacatgtggtgacatgacatcagccttaccagattcctgcttaatttttaaagcttcgggtatatctgaatgtatatttggcatttctcaagtagcaaattttcttggaaaacattcctatcatgtcatttctctaacccatttcttgatactcgtggtatctctagtgatactaagctgacttattcttacagtaatatgtcatgcattaccatctcaacttggtaataaattagaaatattgaattgttctagcatgagcttcctttgttctgttgcaagtttcaacatgtgcttcttctaagtttgtgcttctagtagaaaaaaaaaggttattgcatgtagaaaaattgacatctaggaactaaacttctgtttacatgaatattttaaaactgtcaaaaactcatgttggacatgatacgccatggttttgagcctagccatatcagtgatggttgaatatacgacatggttgtgggtatgggcatattcaatattatccagcatgtctattctccagcattcatcaaataggattttacacacgctagagatgtgtctgataaaagtaaagaggaagctgctccctggttcactagaaatttccaggataattcttaatctgttcacctgtaagatgaaaattcttaatacctttcatatttttacttaccatgtggttctagttgctggtgtgaagaacaagctcagttcattcatgtgtgaaagcatttgatcagttcatgacaattttgttacagtaatgggtggcttaattccttctgccttaggttgcttcttttttaaagatgaaagaaaactctgaatcgaataagaatcagttgtaggtccaggtttaatctttaggatggcatatgaccatgtatggccccacttatctcctatgttataaccaaggagggaaaatttgcccatttttggtaaaatatcagcaaaagattgggattttgggaggcaccaacatgaaaaatggagaggaaagatggttgggtggaaagtcaccgattttttctatttttcacaattttcttcggatttttatcgctgaaatattggcaacccacatcagtgctccttaaaaaatttctaagggaagggaggtgagtctccagcatgaaatgggtggcacttagtcaccagggctattttgcccttcataatatatatctatgcaaaaaaatgaaagcctaaaataaaaatttagtacataagttagttttaattatcttattttccaatttcatttaactgatttttaaaaatataagatccatcatgataatcttcctaatgagtctttctttttatcttttgtatggtaattgttggagtgcatgatatacattgtgggcctaaattgtacaagctcaagcttttagaaaaattggttatctaacatggtattagagcctcatttggcgggaggtcatgtgtttgaaccttatttccccactttattaattaagtccaaaggaggctgtttatggtttgtttatcgagggtccgtgtgtccttatgtgccttttcatgtgcgcaaatggggttgcacatgaaggagagtgttggagtgcattgtatacattgtgggcccaaattctacaagcttaagcatttagaaaaattggttttctaacaataactaaatataagagaaatatagacttgtaaataaaaatatgaacatttttaaacaaaataaatcatatatatatatatatatatatatatatatgttattctttctttttatatcattgaatacaactaaactagatagatcatcagtttagtattaacgtgctttcaagttttgcatattattgttgaatgtcacaaattttattatgtattttgtttttacaataaaacaacttcatatatctattagttcttattttatcatttctttgaggtttttttttttaatatttttatgagttttaattaatttccatccgatcgacatttttatgactccgaatgcatccctacctcccccttaggtgcgtgcacacatgaagaatagcagacacaaacaaaaaaatgcatcctctttccttaccagacactcacatgacacacacacacaaatgcatcccttttccttaccaaacactcacatgagcatgatggatatattaatatgaccttcatcatagtggacacacaaaagtgcatccccttccctaccaaaaactcatgtaaacatgatggacttattaatgagaccttcctcatagagcacacagacaaatgcatcccctttccccaccaatcacattcacaaatgcattccctttcctcaccgaacactcacatgaacataatggacatgttaatgagaccttcatcacaaagcatgtgcgcgcacacacacacacacacacacacgcacgtgtgagcacacacacatatggacaataatggaccattgaatgtgatcttcaatgaggactgcacacacaagtgcatcccctctccctaccacacaaatgcatatgcacacacaataatggactaatgaatgagactccaatacaggtcacacacaaatgcatcccttccctttgctacccactacatacacacagatagacaaataataatgtaccaatggatgggacctttaatatagaacatatacacaaatacaccccttctccctaccacacaatcacacatgcatagacacacacacatgcacataaatcccctacacttgtacatatgcacacacaaaggtacaatctcgaatcaatgaatttgaccttaatatagaacttatacactaatgcatccctttcccccccacacacacatgaaacaaacattaatgtccttatgaatgagacccttaatagaaaactataaaccaatgcattcctttcccacaacacacattgatagggaaaaggaacttgttccaaaccccaagccttaatttggaacattaaagatgatttaagtttctcttggggatgcatttgtgtgctcacacctatgcacacctgcatgtacataaagtgccttttgcttaggggtttgcttgtgcacacctccttgatgtcttctgcttgtgtgcatagctcaactgtgcacaatattgacttttttttttcctcaaaaacttttctttcttcttaagctttctttatccaagctattaatggactcccatggtaccttatttcttgttttctaatgcctaaattgcttctttttatacccaaaaaatctaagaaaaaaatcaaatgcaatgattaagggtttagcaacaaacttacacattagatcaattttaagtaggcaaacacactcattattttaaaaggttaaaggcgatcttgaggtgttttacccaaatgaggagaagtgcaagcttcgaggtggaacaaggtttataactcaaatacactcattgttttacaaggctaaaggtagtcttgaggcgttttacccaaatgaagagaagcgcaagctttgaggcggaacaaggcataaacttaaataataataataataaaatcaattgaaaattaaataataagatttgtctctcatagactctaactttctctcacacctttatcagataatcttaaaaattatcacttgaaaaattaaataataagaaaaccatacaattcataataattaaattagttgtatgttattttcaatagtttctaatttagttccaatttgtctcttataaaatctaaatttatctcatgccttcatcaaataatcttaaaaattaccatcactatcactagtaggatcctctaggtgaataataactatatccaattactctattgtcttctccattagtgttaatgtcaaccctttttcttcttcatctattgattatattgatttttttttctttatctatcaataataagaagtgatcatatataagttcagtcactacagtgactaataattcttttatttattcttctaaatcttttcttttcctttccatttaaagggttaattggtagctaactaagtgcctatcacttaaaaggtttaaccctagtcatggatgcaagacaaaacttataaattatactaaaacttcgtaaaaacaaaaatcattaaaaccaatgaacattgaacattaaacctcttaagacatgtatacaaaatgcctataaaggccctaaacccattaaaaccttgtaaatatttgaggctataaagcctcaacagggtgagacttaagcttttatacctatattgaggctatagcctttaggctaatttgcataaccttgccttgaggccagcctcaagatgtaagcctcaataaccttttaaaatactacactgatatcagtttaaatgactccattaaagtgctaaatttgagttcttatcacaaacttcaactagcttgttgctagtcccttagcaattaaaagcaaggaaaaacaaaggactcaaactaagctcaaaggtatgatataaaaaaaaaagagtcaaaagacacagagaaaaaaaaaagaaaaaaaaagaaagaagaaaaagaaagagtttggtttataaggtagtaataaaagctgcatgagttatcccaaagtctcaccaaaggttcctttcttcatcaagcacattaagtttagcttacccattagccacccttattaatttgcaataattagcttagagggcctgcaaattttcttgcttgagttagtttacacaaaagaacttccatgccaaccttccaaccttatcactgttaagttgcatccaacttcatgatagtaaaagcctttgggtgctgcattttattccttcattttctttgtctttggatttttttttttgctttttctttcttttatttttctgcattttcttccattcttcttgtgaagaaaaattgtatttctcattcatattttaaaagtatacaaccaaggaaatatatatacaacaatagaaaagaaagaataaggaaagatccctacaaatcagggattatatatacatagttgtataacttccacaaccatttattgctgctttatcctctacatttgtatattacagctgtaataatcttcaacaatcttcaatagctgtaataatcttcaggggaaaagcttgattgtcggattggaatcgatgacttaagcccctttataaagggcattaaatttcaagggcgtgacttgccatttcagataagggaaaggcttctctgtcgtaggcgacagaggcacttgcttacaccagtagaaagtctaattgtatcactgggaaggggatctatcttgaagaaagaaaacaacaactactctatatggtaaaatatagtaaaaaagcactttaaacgctcatcctcaagttggtgaatagatattattcattcctagcctgccaacaataaactgaaatgttgtaccactcaatcctttaattagcacatctgcaagttatcgattgatgcaaatagagtacaaattagttcgccatttgacttctcttttataaaatgtttgtctacttccacatgtttgatggggtcatgttgcacagggttatgtgcactatcaattattgacttgttatcacaatacaacttcataggtccttcccatacaatcttcagatcttccaaaattatcttcaaccatagaagctcacaaactcctaatgccatagctttgaattgaacttctgcacttgaccttgcaactacattctatgtcttgcttttccacgttacaaggttactttcgaggaatgtacaatagtctaaagtcgatcttttgtaatcaactgatccaatataatttgcattagtgtatgcttccaatgtcaattttttgcctcttataaacaacactccctttcctaaagtaccttttatgtactgtagaatcaaatgtgctgctcgaagtgtacttcttttggattgtgcataaattgactcactacttccaaagcatagtgtcacaggatgactcaaatgagcctccccatgggcttatatagagccaggaagcttctggagactcctagagtgggaagagtgtggaaggttttagacatgcctggagaaattcgcacaactctacactatggtggaagacatgagaggagtctacaaccttctagagaattccagaggtctcttgtatatccttgtacataggcttgtgcctagaatgatgtaggacattctagaatatacttgagttgtaaggaaccctccaaggttctagagagttccattggtgcctataaataggtgagggcctcatttggccaagacaccaagcaagtgagcttccaagcacttgtaaaggcttccttgagttaataagagcttccattctttaaagagttgtctactaagcttcttaagctttcgagtcgtgagcatcttagcctagcaagctaagcattgggagcaaggttgacttagcaagatcaagcatcttgacttgcctaagtgccgcacaagcttagtgaacgactaagtctgtgacaagtggtatcaaagcgcggttacgaagtgggcatagcaaaggaagcatgtcgggctctaacatggaggagactagcgagcaaacctgtggaagggagatggagcatattgcacggggcagaggcaggaaggataagtcttgtgacgccttagccaacttggaggcaaggctagccaaggtggagctagccatggcggacacccgggaaggggtggacttgattgagcaaggcatggagaagggcttagaggatctaagggagcagatccaagaccttcgtgagggggtgctaggctcacaagttcagccggtgtcacacgaggagttcatgtccttccaagacaaggtcatgagcatgttcgctagtgtggagtcaaggatggaggccttggctgcacgcatggagacccgagaccaacagattcgtcaagagctgaccatctacaagactgtggtatcagcacgagtcatggccactcatggggcaccaagagtggaggtgcccaagccacacacgttcagtggcaagagggatgctaaggagctggataacttcttgtggcacatggagcgttactttgaggccattgcattgacggatgaagccactaaggtatgcactgcgaccctttacctcaccgataatgctactctatggtggcgtcgacggtttgccgacatagagaaagggacgtgcaccatagacacatgggatgcctttaagagagaaatcaaaaggcaattctatcccgaagatgtggcttacctagcaaggaagagtatgaagcatctcaagcacacgggctcgatccgtgagtatgtcaaggagttctctacgcttatgcttgagatacccaacatgtccgaggaggagctactatttaacttcatggacaacttgcaaagctgggccgagcaagaattgaggagacgtggtgttcaagacctagccacgaccatggtagtagcagagtccttggtagattatagaaggggagactcctccaagcccaagccaccatccaagggtaaccaagccaaaggtgggggagataagggatcacgcggctacgcttctaaggaaggatcaagcaaaggccctagtggcaaggatggcaaaggcaaggataagcggaaggagttcactctcaggaccaattgcttcctatgtgatggtccacactgggcacgagactgccctaagaggaaagctctaaatgctatgatcgaggaaaaggagcaggaaggtgatgctcaagtaggatcgttgcagctcctaaatgcccttaaggccaagccgatgcctaagacgcctcaaagtaaagggctaatgtatgtagaggcccttgtgaatgggaaggccactaaggccctggtggacactggtgccactcataactttgtctcggaggatgaggcaagaaggctggagctccaagcatccaaggaaggaggatgactcaaggtagttaattcagctgccaagccatcacatggagtagctcgcagggtgaccatgcacatcggctcatgggaaggaagggtcgacttcacagtgacacccatggatgacttcaagatggtgctagggatggacttcctgtacaaggtcaaggctgtgccactacctttcctacgcacaatggctatccttgaggaggagaaaccatgcatgatccctacggtcaccgaaggtacgctcaagacccctatgctattagctatgcaagttaagaaggggttaaagaggaaagaggtgacttacctcgccaccctgaaggaagaaagggatgatgggtcgggagaacccatgccaaaggaaatcaagggagtccttgatgagttcaaggacgtgatgccgcctgagttgcccaagcgacttcctcctaggagagaggaagaccataagatcgagttggagccgggagccaagccccctgctatggggccatataggatggcaccgcctgagttggaggagctaaggagacaacttaaggagttgctagatgcggggttcatccaaccatccaaggctccctatggcgtgccggttttgtttcaaaagaagcacgatgggtccctacggatgtgcatagactatcgggcactcaacaaggtgacggtaaagaacaagtatcctatttcgctcatcgctgacttgtttgatcaacttggtagggcaaggtacttcacgaagctggacctaaggtcgggctactaccaagtaaggattgcggagggggacgagccgaagactacatgtgtgaccaggtatggctcgtacgaattcttagtgatgccttttggactcaccaatgccccagcaacgttctgcaccctcatgaataagatcttccacccatacttagacaagttcgtggtggtgtacttagatgacatagtcatctacagtaacaccctgaaggagcatatagagcatttaaggaaggtcttcaagatcctaaggcaaaacgagttatatgtgaagaaggagaagtgctcatttgctagggaggaagtgagcctcttagggcattgcatcagagatggcaagctgatgatggatgatagcaagatgaaagtcatccaggaatgagatccaccaaccaaggtaccacaactcagatcttttcttggtttagttaattactaccggcggttcatcaagggttattcggcaagggcagctccactcactgatcttcttaagaagaataaggcacgggaatgggacggaaggtgccaacaagcctttgaggatctaaagaaagttgtgactgaggagccggtgttggcactacctgaccacaccaaggcttttgaggtacacatcgatgcctcagacttcgctattgggggagtctttatgcaagaaaggcacctgattgcatttgagagtcgcaagctaaatgacatggagaggcgttacacggtgcaagaaaaggagatgacagccatcgtccactgcttgcacacttggtggcactatcttctggggtctcacttcatagtgaagaccgacaatgttgccactagctacttccagacacagaagaagctaagtcctaaacaagctaggtggcaagacttcctggctgagttcgactatacgctggagtataagccaggaagtgctaatcatgtggctgacgccctaagccgcaaagcggagctagcgtccatgacgagtcagccccaagaagacataatggatcttctaagggagggactgcaacatgaagggaagactaagcggttttgggtggaggacgacctactctatactaaggggagacgactctacgtgcctaagtgggggaacataaggcggaatctgataaaggagtgccatgacaccaagtgggctgggcaccctggacaacgacgcatgaggggactacttgagtcggcttattactggcctcaaatacgggatgaggttgaggcctatgtgaggacttgtcttatatgccaacaagacaaggtggaacaacgacaacctagaggcctgttggaaccactacccatagcagagcgcccatggggtaacgtcaccatggacttcatcatcgggctacccaagtcggaggacagcgactctatcatagtagtagtggataggttctctaagtatgcaaccttcatagcagccccgactgactgcactgcagaagagccagcgaagttattcctaaagcatgtagtaaagtattgggggttgcctaagttcatcatcagtgatcgcgatccgcgtttcactgggaagttttggacgaagctcttcaagcttatgggttcggagcttcacttctctacaagctttcacccatagacggatggtcaaacagaaagggtgaacgccttactggagttgtacctaaggcatttcgtgagcgccaaccagaaagattgggctaagttgctagacataacccatttctcatacaacctgcaaaggagtgaggcaaccaataagagcccattcgagctagccatagggtagcaaccgttaactcctcacactctaacgattggctatacggggagaagtccagcggctttcaagttcgcgaaagggtggcacgagcaagccgacatagcgtgctcatacttggacaaggccgttaagaaaatgaagaagtgggttgacaagaagcgacgttacacggagtacaaggtgcttgtcaagctccttcctctacaattcaaatccctaaggccggtgcataagggccttgtgaggaggtatgaaggacccttccccatacttgggaaggtcggcaaggtgtcctatagagttaagctaccaccaaggttgaagattcatcttgtcttccacgtaagctacttgaaaccctatcacaaagacaaggatgatccaagccgagggttgtctaagagggcacctacaacggtcgtgacctcctatgataaggaggtagaacacgtcctcgcagatcgggtcatcaggagacgaggtgtaccgcctgctacggaatacttagtgaaatggaagggactaccagaaagtgaggctagttgggagccagcagatgcactatggcaattccaggaacagattgagaggatccgagcagaaggcgtgacgaggacgtctacggcttaggtgggggagagtgtcacaggatgactcaaatgagcctccccatgggcttatatagagtcaggaagcttatggagactcctagagtaggaagagtgtggaaggttctagagatgcttggagaaatccacataactctacactatggtggaagacatgagaggagtccacaaccttctagagaattccagaggtctcttgtatatccttgtacataggcttgtacctagaatgatgtaggacattctagaatatacttgagttgtaaggaaccctccaaggttccagagagttccattggtgcctataaataggtaagggcctcatttggccaaggcaccaagcaagtgagcttccaagcacttataaaggcttccttgagttaataagaacttccattctttaaagagttgcctactaaacttcttaagcttttgagttgtgagcatcttagcttagcaagctaagcattgggagcaaggctgacttagcaagattaagcatcttgacttgcctaagtgccacacgagcttagtgaacgactaagtccgtgacaatagcctatgtttggcttggtatgagaaagatagattagtttgccaactaatttgtaataggattctctatctaccatcacatcttcaagggccttaaaaagcttgtgattctgttcaatgggtgtctttattggtttacaccctagtttctttgctttagttaatagatctagcgcatacttttgttgggatataaagatcctatgtcaagagtgagccactttaattccaaggaagtattttaacttgccaagttctttaatcttaaattcttgcaataaacaacttggctatgcctcaattccttgcaagtcatcttttgttaccactatatcatccatataaactaaagaagctataacttcccttgaagtagaatgtttaatgcacgatcaccctgactttgtaacccaaagctttcattattctagtaaacctgccaaaccaagccttgggagattgttttaagtcaaaaagtgcctttttcaacctgcacacctcattcttctctaactcaaaccttggagtaacctccatatagatttcttcatcaagatcaccatgtaaaaagggattctttacgtcaaattgctgcaaactccatctatgattagtttctaaagataataagattcttacaatattcatttttgcaataggagcaaatgtttcaagataatctatcccataggtttgagtacaccctatagccactaatctcgccttatatcgttcaagtgatccatctgcctttgccttgtatttcatagtgaagactcgtttacattactagcttctttcctcgaggcaattccaccaagtcccatgttttgttcttctcaagtgcatccatcttaacctttatagcttctttctactctttagttctcaatgctttagagatagtttttgggcaattagcacttcaaggtttgggtcctcatggagagtcctaatgacacaaagtgaggcaatgtgaggtggataagaaaacttttatgaccactagacaacttctcataggacacaaagtgagacaaaggatttgcaggctgttgagtacacttcctaacgccctttctagttaagataggaagatcataatcataaacaacagacacattactttcataatcttttgaattagaagttacctcaacattatcaacactagagattttttatgaattatgaacctacattggttgaacaaggggtttcttcctccttgaatatacttgcaattggcaagtagcactttgagtctgtttatcctttgctgttggaccaggagtacttggatctaactcatttggtaaaagaacaagaacgaaggatgatagtgaagacaaaggattttgattttgtgaggatgggaaggatgcaagatcaagcaaaaacaaatctctatccttatcttccatgaatgatgtctccccttgaagataaggatttggaaagttgtttttcagtttcaacgaatgttatatctacagagacaaagaaccgtttgttggaggatgataacacttataacctttctatgtagaagaatatctcagaaaaacacacttaagagcccttggataaaatatagtttttcaaatgaacatgagcaaaggatacacacctaaagaccctaggaaccgggtgatttgttgttttgaagtaagggaaaattttctaatagtttcatggggttattataatcaagaactctagtaggtagtctattaataagatgtgtagtggtttagataacttctgccctataattttttggaagatttttttttggaaaagaaaagcttgggtaacaactagaagatggccattttttcgttctgccacaccattttgttatggtgtgttaatgcatgaagactcacgattgactcctttttctttgaagaatggtgacaatacttgattaaaataatccttaacattattagatcaaactctttttatctcaaccccaaattgatttttcaccatgaggaaattttttttgaaaggtggaacggagatctggtttttgttttaagagaaaaaactaggacactttgagtacaatcatcaatagatgagacaaaccaacaagccccagagatattatgaaccgtagaaggtccccaaatatcattgtgaataagaggaaaagacattgaagctcttgtattacttattggaaaagaaacacacttatgttttgcaagttcataaacatcacaatgaaattaacccaaatcaaatcctttaaacaaactaggaaacattactttaagaatactaaaagaaggatgaccaagacgaaagtgatataactgtattctatttttatttgaagggtaggacccttagtgtatttcgcccatcaagttccttaaaaaagtagagctcattcctcttcttaggaagtctaatcattgtccccatactttggccttggaatttacaaagtgcggaagaaaaggtcatcataaagttcaaatcctttgtaagcttgtgaattgaaactagattggtagatagttttggcacatgtagaacattttttaaaacaaggttctgatttgtaactacattccctcaaccagcaattgtaaccaatgttccactagcaataacagttatttatttatttataatcgaggaaacttccttggtcaagcccttaggactctccatggggaaccaaacatcggggtgctgacccctataacaaccaacactaagtaaatttagggtataatcagtggcaaaattcaaattcaggaccatgcaccaattattgggaccatatttcccagcaataacaattttcttattactaggattgggtcatatgctttgtagccctgattgtgttgaggtcgaatgtgcttgtccttgccctcctccttgattactctttgttgtccaagaagtattttgagtatttgagggcttacaatggaatttccagcacttctccttgttgtgtcatggcttcttatagtaggtacaccatagagggtctttattaccggatcttgatccttttgattgcccattatttcctcctactccactagaataggtattcgattgctggtttgatttcacagctctgggatttgcatattttgtaactaaggttgaaccatctgttggttaaggctccatcataactcttcttcacccttcttctctaggaattatggcaattgtttcattaagtgaaggaacttcttcatttcctaacacttgcactcgaataggatcgaaatcaacgttcaattcggcaagaaagttgtaaatcctctctctttccataaaacgtttaagaagggttgtgcatcattgctgcacttcatctcaattcactgataaggatctaactcttgccataggttttgtaacatatgagcatgttcagtgaccgagcggttaccttgtttagtagatgagatctttgtcctaatcttatagatttgtgcaacatcttgaactttggaatagtttgcctgcaggaatcccaaattttctttgttgttgtaaaaaacatgcaagtattgttgacttctaacatcattgaattccataactaggacatcaccatggagtcttcttcatcccatgcaatgaacttcaaatcatctggtttcggtctcatcctatgaagatgacttagtttgcccttccctttcaagaaggtttgaacaaactgagaccacttcaaataatttttgccattgagacataaacctggttgaatattctgcaactctcttgttgtagtgttgatgacttcatttgttgttattggattagagacttgctgattggtagattttgaaacctcagacattttttttttcttttggacagaagtggaagaaataaaataagaggttgaggaaggattgcaaaaatgtaagccataataggaaatgctctgttttcagattaaaaaatagagtagaagttccgctaaaaaaccagaatttgcaggtttttaaagaaaaaacccagtaatgaaggccggaaaatcagtgatgaaggctgaaaaaaaaaaatagaaaccctaaagagcctatttggctttgataccatgttgagaaaaaatgtatttctcattcctattttaaaagtatactaccaaggaaatataaatacaacatcagaaaagaaagaataaggaaagatccctacaaatcagagattatatatgcaaatatacacacaactatatatacagttgcatgcacggctgtataacttacacaactgtaaattacaatttatagctatatatcctctacagctgtatattacaactgtaataatcttcaagaatcttcaatggttgtaataatcttcaacatctcttgaacctctttatatatatgtatatatatttatttatttaggtaatcaatgcaaccattcaatcttggcttatgtaatggccttcaacttgtgactcttagacttgttggcctaaaggcatcaggcgatgaagcatccttggggacttactaccaagcgctgaaggaatacacagtagataccatgccgcttgctaaggattctcccatttggatgagaacctcaacttttgccttaagagacctcgacaattagtttgaacatgagcaataacttattttccttctaaaactctacacaacaacttatgaggtttttttcccaaatattcagaattaacttagcagtataagactaaattgtagtgtgctcagtgtgtaaaagatgggtatagaaccctttgggagcctacaattgggtaattctccttattcaaccctttgagcttctttccagtcaaattgaggtttccaataagctaactgaaattgagttcctcagttcaatcaggaaatcctaaggtgagaccttgatcctccttcaaaacaactctacatcacaaccaaagttaaataactgcaacattttttgggtctttaaggactataaactgaaaacaaattgtgccaacaaaaaaaagaaaaaaaagaaaaaaaaaaaactgaaaccggaaacaaaaaatggaaactgaaatgatcctcaaaaaatgaaatgttcctctctacactttcccacttaggaataatgcttacagaacatttgtataagtgaatatggacagaagggatctgtattcctgggcaagggggctctattttagaggttttcaggggccaccactaatcaatccacaatcattgctcttcccgcatgtgccagaaagggggttgaatttctggcagatggagtcctctggtttagaggtgttattaggtatattggtttattctttgctattcttttttataatgtttgtatttctcccctccacccccctgaaaaaaaaaaacaaaaacaaaaacagtacatatgcttacatgcacaggattggtatctgtactacaatgtttgtttacttactgacatgtttgcatgcagatgatctgcaagttgaagcactttacacattctttttaacttttccccttgtaatgttatttaggtgtatacttg

SEQ ID NO: 13353 - DNA, 10222 bp, Vitis vinifera
  Intron number 8 from transcript GSVIVT01036815001 (locus G SVIVG01036815001) derived from phytozome v7.0 (chr-ID chr1 8; pos 17385656 to 17395877)
tagtacaagagaaccagatccacctcttattacaggtatgtacatgcaagaaaatctctgacaaaccatgcataggcaatgtgttgcacttattcatgcttgtggcaattaaaaaggtgtttcagtagatttgatccagtatgtattaattcatgccattgagtggcctcatgattgtgcatataagtaccatgcataggcactgtgttgcacttatccatgctcatgggaattggaaacctctttcagtagattggatctaatttttataaattcatgccagtgaacctgtcaaccctcatgattgcgcatgtaaatctgtgtgtgtgtgggcatgtgctgccataggtagcttggctgagaggtgtgttcccctattcatgattgggatgttccaggattgagttttggacttatctgatgcatgattcttgggatagaggttgtgtatctgtggttttcttgctcttatgattgtgaaaaacttatgatactttttcttataaaaacaaaatttctctaagtacgtcatcttacatgtatgttatgaagcatatatgatacacaatatggtacatgataaaatgatacaagatattgtctatcatatatgatgcaattgtttatatagtttttaaaagaaaaaaaatagtcaaatttaaaaatttattttggagaagtcatgttaattgtatgaaatgcactttatgataaaaaggaaaggaagaaatagattgattgtgaaaacccattccattatatgtagatattatttgctttgggcctaaagagccctcacaactttggaatgcgtttacgttagtaagagaagctcatatatatggtataaaaactttttctcctattggatctaagatatcacaatcattctcttatacagacataatattctcattgtgtcctaaaggattgcaagaccaaatagataaacaccccttgtgagataaaaaaaatagagtctcacatcggagtcggtgatcgtctttaataccatttacaatgattggttccctcctgtgtaaatattgtttactttggaactattaggtcttcatagctttaaattatgtgtacacaaattgaaagaagctcattatacatatatatatatatatatatatatatatgtagtgtctagaacttattttcttaaccgatgtgggatattgcaattacctctatgtagatataacctcttcgttgtgtcctatgggattttaggttaacatatacaatcatcctttatggggtcagacaaatagatttccacactaggggctctctaatgacttgaacctgaatgctagggttccatggtcatttcacaagggaagcccgaaggcttgacatgagagtcacccaacaagttgaaataattaacaacatgctaatcaccaaacctatctaaaggagtgattaagccaacaaaatatcttaacaagaaattgtatttctattcaaaatccatgaatcaaactatgatgatctcccaaaatagtaatagcaaaataaaccactaataacaaaatgtatccaattaaactaatctcacagctaaagaaataaatggacttctcgaactcctacctatgtcactccttactagaatcaagtgtacctaaaagtatttagtgaaatgagtagcttgaaagcacaataacaggtaagaggtccagtcaatttatttcttaaaaaaggaaaaaaaaaaaaggaaatatttgcaacatgaacctaatcatgcaaaataaacatgcattacatgtgctaatttctagaaccgtctctaacaaattttttcgataaatgtgcatatatggtcaagaattttggttgttaacaaaaagtgtctttcatagtgggacttacagaagtcactatcctcatatattccttacatgttcgtggccgaaactgaaactaatctaattatataccataggttagtaactattctattgtttgggttttgatcatcattaccccctaagggaaataaaggttaacatcttttcacttgttgatgagggttagatagttagaatgcacatgcaaggtaaaatataaaaaattcaaaataatgcctaatttcagtacttcaaaattatgtaagcatttttatgatttacaaaagaatatacttgatcatttatagtaaaaaaaaattcacggaacaacttacttgagcttaataattccaaatgaatggagttgtaaaattttctatgaatcacttgagaaatttaaaaaaattctttagatttttgcctatcaaagttaatgaacaagaaatctcatgtgcaatatgaggcctcctccgccaacattaaaaactttcttctagcaaagttaaagtggtaggtaaaataaaggatattgaggccacttagcacccatccttgaaaagaagataaatgacttttgtgttgctagtaaatatgccaatgatttatgggattaagttagatagcaaattggtgtctaatattgatggcctgatctcattattaagggacccagaatcagatgattttgaatatgcctttttctagttaatttcccaaaaaaaaaaaaagaattctactctctctaagggttttgaccaggattttcttttctccaaattgatatgatagaggataatcttctataaacaactttgtctctaaccaaaaagatcatacaaaaaaactttttagcctttgtatcaaaagcatgtcatcatcgaaggtcattctattccttgtcttccacaccttacaaaagatgcataatggagctgctctctaaaccttcttgtgttttttgtccacaaaagaaccatgccccaatagagtttgtctaaccgacaagggaagcaagcacctatgacaccttaaacagagtaaagagcaattctcataaaacctttgtttttacatagtgaataagaaggtgatctatggtcttttcatccttatggcacatataacatctatttgctaaggatcaccctcttttttgaactagatccaaggttaaagctcttctccacattgcctcccttttctccacattgcctcccaagtaaaaaagctaactttaggctgcaccctcaagttccaaatgcttctcaatgggaaagaaatggagccacttggttccaatgttttgaaaaccatattggactgaccagttcaaccatcaagtggacacatctttggtttgattctcacttttggacaatttacatttcgaactggtggagagtcgcttgaactggtggttgaactgttgaattctgcgaaccagcgggttatgtgggaaccaggtgggtcagtcacatatggcttgggcatattttaaattcagtccaaaacaagcacgagtggggtaggctcaacaaactgagttgtcattcatatggttgatgagctgtgttgaattgtaagcccatttcacaacactttcaatttaaggacctcattagtttcttactttttctgatgtaggatgggtaagtttagaaaatgttatagaaatgctcaaaaattttttattgcaatagtgggatttgaacactgaacacatttgtgcatgaagaaaaggaaatcactaggctaatttagttttttgttaaaaagagttgttgcaaataatataatcttattattattattttttaaattatttagttttttaaatatttaacttcatgtttatttttataattataagtatgaaaatagcataataatttttaaaattataaaataatgggatatataacttttgacatataaataaaattagataatagattttttttttgtcttgaataaacctttacccttaaatactatacatattttatataataaaattaaagatattaatatattttgttaatccttatcatgatttaatttgatagtattgaaaataaaaaatgacatcttagtaaggtttttaattatttaaatatatttccaaatttttatcattatttttaattttaataaaatataaattatatatttatgatctcatgctgacactatagcttggccactattggacaattggttcggtcaataaactgtgaactagtaacttttctagttctaaaaacattaattggaacccttgtttcttggggtaattacatgattggaagttgtagagggtagtatctcttttttcaagcttatatacgaaaaaaggtatctttgtttttaaggcttcaagagaggggtgccaaggaagtgcgaggattgtttattctaaaggggctccaatgatggtaagttctcatttaaatttttttattcctctttggagccaaagaatggcgtaggctttactccaaaagaagtatggggcttgttaggatccataaaagtgggtttcttagcttggaaagctgtttgggataaaattcttcctttacattagctttaataggagaggttggtctttggtaaatcagtcttgatcatattctcttacattaagttgagactataaactggtaattcttggatgtggaaggcggaaaaggagaagaaagaaaagatggaagatgtttaggttttcttcttgttaactgtcctatacctattcacctatttatattactgcatctaaaaaagagaagattatccctaatataaatataacaagaataaactctaacatagcaatagtacactctaactgtacccctcaaggtggagcatataaattaaatatgcttggattggaatgcaagcattgaaaggtatgatgaggcaatgatttcataaaattggtgactaggtagttatcagattaactataaagcataacactgtacttaggcttcaacaaatcttggataaaataacaatcaacttctgtatgtttggaatgctcatggaagacaaaattagtagcaatatagatagttatttgatcgtcacattattttcatgaatgggaacatcaacacctaagggggtgaaccataacatttccaaagcagcatgagatatatcacaatgctgaatttcaactctagaatgtcacaactgattgtgcttcttaatgtgccaagtaacaagattacctccaagaaagatatattagggcaaaagagcctggaggagccacggtggagcttttccttaaagaggaccttaatagctgaaattcaagaataattattagcaacaatagtagggtctcactagcaagaatcagatatttaaaaccacgtaaattagagttcaaatctcatagcaaggaagcaatcacaaactcctcccaatgcctattttgttactctaaatcagtagtcaaaggctgattttgcagtaactgatctgacaaacttttgagagtgctatgatattcagacaatatatttctggattgctcagtcgaaagaattttatcctacaactcaaactcgaggagcatcactctattgcaaaatgacttcagaagcaaatcagaaatctttttaagagaattacaaaatttgatgagtagcaatgtggggttccatattatgccctacgtaaggaccaatttgaacaaaaaaacaataaccaaaatagtcccaaatccagaaagtccaaacattgaggctaaaattctgaaaatcataaaacaatagaaaagtttagacaaacaacttaaacctcttagaaaatatcactttagttactagaaaaattagtagatccaacattagcatgacatcatcacaattccatcctgtagactttaaatatatagatatatatatatatcatggtttggaaaatttaagggaaatcctaggatggtgcttttataccaagttggaactataaacttgtgattataggaagtaaaaggtggaaaagagaataaagagaagatggaagaggtttaggcttttgtcttgttatatttgttatacctttccacctatttatattcttaaatctaaaaaagagaatactgcagtaatatccctaatataatatagcaatatgcagaaaacttggtatatttctatatctctctatagagcatgtacaacatcgaaattatatatgctaagaatcaaatcagtcaaataaaaatctagctacaatctaggagatacatgcctaagaaaaggaaaaaaaaaaaaagtcaaaacagaaagtgggaaacaaatccctgtttgaatacaaaataaaaatcccaacaaattagggatatccatatggaaattaacattccccctcgagctgggctgtagatattcagcatgcccagcttggacttcatttcttcaaagttgaccctaggaagagctttggtgaagatgtcggctgtctgaagagctataggcatgtattcaagagtgataatccccttatcaatctactctttagtgaaatgacagtcaatctccacatgcttagtcctgtcgtgatgaacaagatttttagcaacactaattgcagcttgattgtcacaaaaaattctcataggactatcaataggaaacttgagttcttccaatagtctcttaatccacatgccctcgcaaattccattggcttttcagcactactagcaacaatagtttgctttttgctctgccatgttacaagattgccctagacatatgaacaataaccagatgtagatctacggtctataggagagccaacccaatttgtgtcagtgtaaatcataatttctctgttaggattctttttgaaaaataacccttctccaggagcccgtttaagatactgaaggattctgtagacaacatctaagtgttctttggtaggattattcataaatctgctaaccaaactaacggagaatctgatatctggttttgtgtgggaaagatatatcaacttccctatgagccattgatattgtcctttgtcaactaaaggactatcttaagaccatcccaatcttttatctcaaattccttggcaaggagatttttcaaactaactttcccttcatcataatctccactaagacttatgtcattggcatacacaataagaatagctatttttcctgctatagagaacttaacaaacaaggtgtgattagattggcgctaagtataatcattcttcttgatgacctttgtgaatctgtcaaaccaagcacgaggagactgtttaaggccatataatgctttttggagtttacataccttgttagagtcattatttccttcgaagccaaggggaatctccatataggcttcctccttccagtcaccattgaggaaggcattcttcacatctaacttgtttagtgactagtcgagattagtagcaagatagagtaagactctaacagtattgagtttcacaattggggcaaatgtctcctattaatcaactccataagcttgagtaaatccttttgcaatgagtcatgccttcaacctttcaactcttcccatcccaccgtattcttatctttcaatagatcaacaatttcccatgtatttgtcttttccaaagcactcatctcataaaaaacagcctttctccaatctgattgactgagagcctcgtgaatagttctaggaacctgcacttcagctatcttcatggcaaatgccctattgctgtcagaaaaggcatcagagaatgcactaaccgactactctatccactatcacactatgtgtctcttaagcacctatcaccagcccacaataattttattgtgagtctaaacaccactatcatccctaacaccgtttttgaggcattgacaaaatggggatggaaggatgctataagagacgagagagtgcattagaaaaggataaaatatgggagattgttgaaagaccgaaagggaaaaacattgttgattgcaagtggattttcacactgaaatataaggttgatggatctcttgagagacataaaacaagattggtagccaaagggtacactcaaacttatggagttgattatcaggagacttttgctccagttgcaaaaatgaatactgcaagaatcctgctgtcactggctgcccactacaattggtaactcctacagtatgatgttaagaatgcatttcttcatagtgatttagatgaagagatttacatgaacatcccatcaggatttgagggaaacataggtaacaaggtgtgcaagctaaaaaaggccctttatgggctaaaagaatctcctagggcttggtttgggagatttgcaaaagtcatgaaagagtctaggtacaaacaaaaccaaggtgaccacactcttttcattaagcactcggctgtagggggagtaattgcgcttctagtctatattgacgacatcatagtgactagaaatgatgagagagaaaagcaagaagtgaagcagagattaacaacagagtttgagataaaggaactagggaaactgaagtacttcatcggtattgaggtggcatattccatacaagggatcttcatctctaacaaaagtatgtgactaatttattggcagaaatagggaagattgggtgtaaactagtctttaccccaatggatccaaaccacaagttgggagaagctaaagaagaaccagtggtggataaaagaatgtactagaggttggttggtaggctcatatatcttgctcacactcaaccagacttcgcctactcggtgagcgtgatcagtcaattcatgcatgatccaagagaacctaatcttcaagctgcttatagggtactgcattacttaaggtaaccccgagaaaggaattttgttcaagaaaaacaatgctcttgctctacaagcatacatcgacgctgactatgcaggttccctagtggatcgaagatcaactacagggtattgtactttttttggaggtaatctggtaatatggagaaataaaaagcagaatgtggtagcaaggtcatctacagaatcagagtttaaggccattgctcaagggttgtgtgaactactttggctgaagattattttagatgatttgagaatcaagtgggatggtcctatgaagctctattgtgacaacaagtcagctatcaatattgctcataaccctacaacacgataggacaaaacatattgaaattgataggcatttcatcaaagaaaaattggaggaaggagtagtgtgtatgtcctatgttccatcagaacatcaattaactgatatcctaacaaaagggcttaacagttcaatgtttcatgatcttgtattcaagttgggaatggaagacatctattcctcaacttgagggggagtgttgagctgtatatagaataggagaattattttcctattatgttagtttcctatttctgtaaatagatagttttattagtttcctatttctttaaatagatagttttatgatttaggaataagttagtttcctattatatctcttgtttcctatttcttctcttgcaatctcctatataaactgtatgtatagtcaatctaatagacaaaacttattatttttcatcccatatttcatgtcatcatagtttcttttagtagatctaatgcacatcctctggtaagcaaagatgtctttctcaggccaagcaacaattctaaaagagtatcctaattgatctcaaactctttccctagagaaaagaaaatctgagttgcatcattacttgataatgcaatgtcattgaccaacttacacgagcaaggttgtagtcatatcacctttatactagagacacaacgatttgcctggccattggagccaaaaatttaaggcttctcaattgctaagggaagggtctccagccgagtaaggttgtagatatatagtacacttctaagctttttgttatctttagtggatcgagggttggggctatgtttattggatagatagatagccaaatgtttttttttatatttggattgagttcatgggtctatagggagtgagcatcccttcactgatctcactcaaacctccaataaacatgaatttcagaggtcaggaagctctcagacaggttcttaaatgtttaattttctactgtgattaacatgggaaagttatggcaccaaaggcatcggcatagattaatgttaattttagctggttttgatttcaccatgtgattgctacatttgcctgttctttatgatgaaagttctagaacttacaattgtgtaatttgaggttctggaaaaatgtgcag

SEQ ID NO: 13354 - DNA, 9150 bp, Vitis vinifera
  Intron number 5 from transcript GSVIVT01024608001 (locus G SVIVG01024608001) derived from phytozome v7.0 (chr-ID chr6 ; pos 8460047 to 8469196 reverse strand)
atcaattgttggttaaagcgagacaagaacaagaggtatgctacatagtagattctttgattttttttttttttggtggttgatttatgagctaaattttgggaataactacccctttaccattaactaaatgtcctgtatttctttctggagaaatcattttttctgttgccttttctctattttttgagggaaaatacttgtcgtacaaatgcatctcacaacaggccatgaaaatggctgtttcatatggtggtttaatgtcacagtaaggaattagtttttggaagatttgtaacagttagtattactctatcttgaatcatgcatattcttgcctaatttccttctccattttataaaggttcattcattatttcttaagtgatcaatttttaagtttttattattgattcacatatagtttagcatttatttatttttatttaattattgtatgacattttttaatctgtttttcaatttgtatcatacaaacatatttttaaagaacttacgatacactataagatataacgatatgatacattttttatggaaattgatatgtatcgcaatccatttcttattttaaagcgtatcttacgatgaatatacgatacacgatataatatgtgatattaggatacaacgatacgtacatcttcaactattttctataattttttagagaaataaaattaattttttttggttaaataatttattatattaatattaattgtttaaaatctcctaaaagatataaaaaggagaaataagtaaaataatcttatatgaaaaattatatttttgttgtcaaatgttacattaaaagtcaagtaagtttattttacaatgaataaattttcatttgaatggtttggatgttaacaataaaaatgatggtgattagcgaataaatttttttacttaatatattattatttttatttcttttttggtgaaagaggaatgatgatgaacttgaaaagttggaattttgaagatgacacacacacacacacacacattcactatttttattgatatgatatggtttaacctctatatttcatactttcgataggtgtacacacatatacatatctttcctatttatttttcactatataaaaaaacttactatacacaatatgaaacagagttaaaggtgactcttgaggttggattctgggtaaagagggtacttatcaaaaaaaaaaaaaaggtctaggtaagggggtcatgctaaggagctatgggtgagggtgttgggtttcccgttacacttgtggacttgggtggtgtttaagaagattgggagggtgtcgaatgtaatggagttggttgttgtttttggttgcaaagtgggtgcacttccaaccacttatttagggctccctctaggagctatccataactcggtggtggtttgggatggggttgaagaaaggttcagaaagattagcaatgtgaaaaagacaatatatttctaaggttgtgtttgttttttggcttaatagaaaaaactaaatattttagctttttccattcagctaaaagtaactcattgacatcaaccaacatcattaaactaaacttattgataataagttcactttaattatgttgattagtatcaataaggtacttttagctgaatagaaaaagccaaaatatttggctttttctattcagcaaaaaaacaaacaccacctaagactaactttggtcaagagcacgctaactagcttgctaatctattttatgtcactttttcggatgtcgaggagagttcgcttaaggttggagaagattcaaaggggcttgtggggaagtggggctttagagaataatcctcgtttagtgaagtgagatattgtttgtttagacaaaagaaaaggaggccttggagttagacatcttaactatctaaataaagctcttctttgccaatggatttggcggttttctaaggaaagggatgccctttggagaaaagttatttgtggtaaatttggggatttggaaggggtttggtgctctaaggaagtgagggacagttatggtgttggtctatggaaggctataaggctattgtgggagttagtctcttccataactctcttcgtagtgggcaacgggagaagggtcaagttttggagagatagatggtgttgtgatgagcctttatgtgtgtcctttccctccttgttcactctagttagttgggtggcagagcactcttttgagtggggtggttggaacccaaacttctttggacactgggagattgggacggtggaatgcttcttatcaaggattcaagacaaagtggtggttgaggagagggaggatgaggtgttttggtaggttacaaagagtggatccttttttgttaagtccctctattctatccttgaggaagtaagggtaggccccttcccaactaatattgtgtggaatgcttgggttcctcttgaggttagtttttttgccaggaaggcaacagggggggaagttgactttaaaccaattgcaaaggagagggtggtctttagccaatagatgcttcctttgttatgctcatgaggagtcaattgaccatatactcttgcattatgaataggcaaggctgtcctgctcttgttctctttatacagggtgagttgggtgattcatgcttccattagagagactcttttagggtggcatggtttgttcattggaagaaaaaggatgaaagtgtggagagcagtgcctttgtgcctcttctggacaatttggaaggagagaaataaaagatcttttgagaatgtggaactttctgttcaaaggctaaagttcgtgtttttgtgcaacttattatcttggacaaacttgtttataaagcatacttctatgcccttagttgattttattgattggttggggacagattgagggaaggagtattgaagaaactaagaatcatttaatcgtatattcaaccgtgtattttttacataatcggttcctatttaacgtatacacagagagaaaaatatggaaaaaaaaaaaatcattaattttaaaccttgttttgttatcatcaaaattgagattaatcaaaccttggtttcacacaaatgtctcggtgtagtcgatgtcgtaggtctgagtaaacccctttgcaaccaggcgggctttgtatcgttctactgtgccatccgccttgtatttcactgtgaatacccatttacagcccactggtttcttccctcttggcaaaatcatcacttcccaagtcccatttttttccaatgcccttgtttcttccatcactgcctctctccattctggaatctccaaggcttcttgaatttttttaggaatttggattttatcaaggttagtcgtaaaagcacgacactttgtagaaagaacattataagacacaaatttcgagataggatagagagtacatgaacgaggttgcttcctaagagcaatgggtaagtcatttattacttgatcaggattggagccagactcctgaggggttggaactatcaccggttctgactcttttagtgcttcggaggtgagtgtctcattggacttcgattttggcctccttgagtagacgagtgtttccctatttgtctgtatttctgtatctccccctgagtgcaagtgtccttctgtattaggtgaatgggtagatataaggcatggagtggattcgaacacagcaacaacgaagtagtctaaggttaaggagggtctagcttcactcacggactcctcctaaagcgagtagtagggagtatgctcaaagaatgtgacatctaggctaacatatagcttctgtgaaattgggtcataacatttgtagcccttttgtgtggaagaatagctaagaaagacatatttaagcgctttgggatccaatttgtttcgcttaggtgcgtgagcgtggacaaacacagtggacccaaagacacgaagtggaagatgtgcatcgagtttagaatggggaacaaactcttggaatttctggagaggtgtgacaaaagataggactcgactaggcattcggttaataaggtatgtggctgtcaaaatggagtcaccccaaaattgtgagggcatgtgagaggtaaacagcaaggcacgagcaacttcaagaatatgtctatttttccgttctgcaaccccattttgctgagggatgtcaacgcaagaactttgatggataatgccattttttgtagataagtgctcaaggagtgattgaaatactcagtaccattatcagtacgaagaatttgaattttggtgtgaaactgattttgtatcatagagtgaaagttcatgaagactgatcgaagctcagttttatcagtcaacaaatatacctaacataggcgagtgtgatcattaattaaagtaataaaccattttttatgggtcttattaggggtatgtgagggtccccatagatcactatgaactagagtaaatggtatggatgatttatacttagatttaggaaaagatgtccaatggtgtttggcaagttcacacacttcacactgaaaatcccatgaagctttatttgaacatagtgaaggaaataaatgttgcaagtactgaaagctaggatgacccatccttttcataacaaaaattcactttccctaggactagatgcagaattacaaacaataggaggacactatccatgcacattagctccgttgaagtaatatagcccctcacgttccttagcattgctaatcatcttcctcgatgataggtcctgaaaaacacaatgagagggtaggaatttagctgagcaattagattgtttggttaactggctaatagacagcaaattgcaagataaattaggaacatgtaggacatggttgagagtaatgacttagaaatatgaatacttcctttgccagcaactggggataaagtaccatctacaatttttacttttaaattaccaacacaaggagagtatgtagaaaataaatgatgagcatcagtcatataatcagatgcatcaaagtcaataatccagggattaatatgagatgtggtgctaagtactgtaaaaaaggtacctttgtgggctaaagaaccagaggatagagtagtagaagactgaccagaggcttggaaattagaaaaaaactcaaataatttcgcaagttggttggaattaaaccccacactagaagttgactgatgattttctatgggtgttttgtctgcctgggtttcagtggaggcctgctgactatgggctttattggtctgtctgggcttccaatccgtgggcttgattgcatgtacccactctctgtaattcttaccattcaatttttcaacagtaagatggagtgaggagttgtcgaatgcaccggccgagcccatggaggagtttatctctgactctctttcctgggttgtcgattgactggactcatggttgtctcctttttgggcagccatggattgatttgggttttagagcaatccgtgctctgataccataaagaaactgagaatcatttaatcgtatattcaatcgtgtattttttacataatcgggtccctatttaacgtatacacatagagcaaaatatggaaaaaaataaaaatcataccaaacatttagcctaaatatcttctaccataatatcctacaaatcaccctcaaaatcatacgggatttccacaagtatttttgttttccctatcctttttgacgttattagacggtcgttgtatacatcgtgtgtactttggtacaccccttttgacgcttttatacaatttgcatttacctatcaaaaaaaaaaaaaaaagattggggatatatgtggatgttttgtcgttgtggatgaagacattgctctaatatctaatccaacattgggccaagatttgggtgcatcctattgggagagttttgcccaactcgttgcaagcgacagtgggaagctccagcttctccttacaattgtggtgggaagctccatcgggttttttgggttgttgagccgaagaagaagagtctgtgagcccaacatgcaaggaaatggaggtggagtgggggatttctcacatgccagtggaggtaggggaaggtggttgtaacccttgtgtcttttagtcgctgttgagtcgctctcttgcaggtctagggtagctggtgagggtacaagtctatgatgcaaaatctgatgctgatgggttgattttctgcaggccaaagttggtaggagagtgtatagctgtcactattgcaaagactattgagagaaaatgggggaggggtgagttcctaggtggtcaagagaggaacacaactagcatgggagaaggtggtgtagttgggtcgtgtttcaatgtggaggatggtggggtggtgcttgggccattaggggttgggagatgcccactcgaaaggcagtgttttcgttaggacccttgagtttggggttacctctaaggctcacttgtcttcaggcttaagagaggaaggtccactaagtgtgagcttggcccaagtttgttccaagggaaatggggggggtggccttaggataggcttttaagtgacgctttaaaaggagatgtgggcttgttagggcccgctctctctattgaaaggtaagcaaaggtgtagaaagggtgtgttctttgcatgcctaagagaagacaaggagatagaaatggaggttcagtcgggacgcaagggttagtgaaagtgtcagcaaaggaagcacccaaagtcgagtcacctcgtgttgcttgttctgatgttaagcatgacctcttcctgaagactaagagatgtgagaggggtggcaaccaagaggcgtgaggggggttagtgagtctcttcccatggcattgttgacatcttgtgttgtgattacagacaaggccctcgtggtggaggcgaataggcctcctaggtcttctctcctttccttaggtcctccaagccctagatgccagttgttaaagatgatgcttcaggatggcagtttgctagagcactcggggaaggctatgaaggatccctctggcatggagttggtgatcagggttgagtagttggaacattcaagggacatggactttggttatgcctcaaagggggaggattttaatagccttcccgagagttttgtcaagttcaataattgtttggggatgccagtcgtgggtttgagagaaatggaatcaagaaaaggacatggggtgagggtttcagggggtaagaaaaggtcttcttcccgttccaagagggaaatccaaaagctagagtgtttggttaactacaatagctctccgttcattgctaagggaaaggggagtggtgctgaggtttaagggaaggggttgcatctgggattaggaggtctttgtgattaggaggggttctctttgtgggtaggttttttctttccttcctattgtttagccttttggttagggatgtttcggtttttctttttgttggttagctctgcttgttgttagggtggtgggttttcttctttttttccttctttggcttgcttttgggcttaatatgtgttctccatgtatacttttttgtgcctttttgcaagctccttaatatatcctatttttttacctatcaaaaaagaaaaaaaaacgatgcaatacgatacatgatagaaaaaaatagaaatacaatatacgatacattttatgagttaataattatgcatacaagtatagagaatacatggaaatatacatcgtgtatacggtgctgcgtcattttcttcgaagccattaaccctcgtggggtaagtcttaacgttggattagctaaagaggagggggtggtccctagctaacaaatgtttcctttgtcttgccaaagaagagtctattaatcacacattatgctaagctagggcctgtgggagttattacttgctctttttggtgtgacatgggttctttcattctcggttagagagacattctttggttggcatgggtcctttgtgggcaagaagtgtaaaaaggtttggacattggctcctttatgtcttttttggatggtgtggaaggaaagaaacaagattaccttcgacaatgaggagctttcgattcataggatgaagaattcttttgtttgtagtttttggtcttggactaagttgcttataaattaaggacctttacctttaatcaacttttttgattggttaggttctagatgagggccggtgagaatttttgtatacgtgcttcttttttgtttttgcctttaggcgcttgctatatacttcctatatgttttgggttgggcctttgggcaccctttattctttatttataatattttcctgtgcttttacctataaaaaaataaaaataaaaatctttgaagcccttaatatatatatatatatatatatatatatatatatagatataatatccgcactatttgcctattaaaaagattttcactaggtattgcattaatgcaaaaaatatatccttctatctaaataattatttgaaatttgaagttttgggactgtaactcaaaattatagccatctagacaaccctgacttcattatcagaaaatcataaagctatattccatacacataaaatacttattaacatagttgtacatgcagttgcaccaaaattcgctggacgtgctcttggttctagatcaggcataaatccagttcaggttgcagctgttaccgatgctttgggctgccgagtggctcatattctatgcatccagaagctaggtcagagtcatccagaagctaaatccaccatccttttaggatcttggttgcatctgaactaattcttagtcttgtacagagaaaataatgctttgtcataaaaacaacaggaatgaaaaccattcttaatttcattattcataggaaaaaaatgttttatcattatatacttggttattaatctgttttgatggtttcaaagcagtagaaatgaaaaatatgcaaattatttaccttatatttttaaaatgaggcttgattaatttcctttatggttcatttttttttctcgttcttccttatcagattttggcaaaaa

SEQ ID NO: 13355 - DNA, 18548 bp, Vitis vinifera
  Intron number 3 from transcript GSVIVT01021020001 (locus G SVIVG01021020001) derived from phytozome v7.0 (chr-ID chr5 ; pos 15202915 to 15221462)
cagacttactaaaaaaggttaatctgtttttcttacatttactgcttttcataattagcaagcattcatttaccaattcctggatgtcctatggatgtgaattccattgtgctttatacataattagaaatgagccatatggttttcattgccatggaacattaaagagcctcttaatctttcaagacctttctgtcttacattgagtttgtgagtgttacataacttttcatcattgtttcaactcaatatctgactggttgaaatggcagagcatcatttctgttctgatataaaatatttgggaatgtcccctttacctattaacatttcctgttttctattgttctgttttcactgccagtgggataagctgcattattttgattttagtcgaagttatgatcacagagcttcttttctgattttgaccaaagttatacttgcaggaaatttacataaaaaaatgactaagtagccagtctttttcttctatatgaatgtgtcggagttttttgttatgttttccgacaacacatgtatttatttctgatcacacactgggggtcaggtgatctaaaaaatttcctatgttagatgcttgaatactggtgatgtgggctggtcactaataaccatccaaaggcaatttgtaaacttatgattagatgatcttaagaactgagttttcatctatgacagaattttctctgagcttaggaattctggttctgtgggaaaaaaagaaaaaaagaatgagatgcatagcagctatcggtagtgtagcctaattaaggtaacattcaaactgcctttttgtaagatccagagttgaaattttgcttaggaatttagacatacaccttcgtattatttttataggctattgtattagatctaaccctagttgacaatcactaattggtgaatgattttagaagagtcattgcccagtttcttttttggatcctaatatgcttaaaggcttgtctttgtaagctaaataaggttgccaatttatcagtttgaattagtcttatagaaggagattcttctgaaatggatgattataaaatcatgcctctaaacaattcttaagaggaaaaatggtccctccataattccatatttagaggttaggtaggaggaaaaaaattcccatatgaatacctatagttgtgtgtatgaaattttaaattgtaatatagaattcttaagaggagaaatgattttaaaatctttgtacttagagatagggaacaagagaaaagagatctgcatacaaacacctccagttctatgcatgaaattttaaacttttgtcatatggaattacttaggagggtgaatggttatcttatttagatcacaggcctattttttaacatgagtgccttatatatatatgtatgtatgtatgtatatttattttaaataaaatgccttctagaaacactttaataatgagttagtttgcaccatgtaactaattcaacttttttctatttgacacttactcttatagtggtgtatgcatagttttcaaaggcacacctaaggcgtaaaattttccaaaggcttaggcacaagcaacccaaggcacatgcccgagcaaagtgaggtgcaacctaatgtgcatgtcaattttataaactatgatccaacaattcagttcaatagacaaaatgaattaaactttcaagcatttaaaaaaattatctgacaaaaacttaatgcagttatattaaatttcaatgtatatatcccaaatttcaggaatccgtgttagaaaagaaaactagaatgaaaataggcaaggcacatgccttggcaagtgaggtaaggggtcgttgcacctttttttttttttgatcgataagtataagattgtattgcaaagagacgctaaagaagcgacccaccagattacagtataaagagacttacccccttacaaaagggcccaaacatcaaaggacaaggcaaaacaaaaaaacccctcccttaacgcatacacatccagtctataaaatctattagggtcgaaggaccattttttatccacaatttggattccgaccacaaaaaatacacaaaagatgctttcagcctttgaatggacagcccacaatcctcaaatgcaattgaatttctagccttccaaataacccaaaacaagcataacggtcccaattgccatgccaccttccttttctttcccacaaaagaccccctccaccctaaaagggtttccttgaccgaccgggggaaaacccacgaaacaccaaacaaggaaaggaacaccatccatacttccctcgttttttcacaatggataagaaggtggtcaattgtctcctcactcttatggcaaagaaaacatctatttgccataacccaacctctcttttgcaagcgatccaaggttaggactctcccccaagaagcctcccacgcaaaaaagctcaatttgggctgcacacaagagttccatataatttttgaagggaaaaaagcaagagaccccggctgcatggtcctatacaaagatttcaccgaaaaatcctcattctttgatgccatccacttcaccttatcctcctcatcccccctaaccttcttcccctccaagcaacaaaatagcctttccacttcttccaactcccaatcgttgaaaggtctattgaaacaagggttccaacttcccccccattccccctcggctgtccacacttcatttacccaagcctctttgttcgaagctaaagcaaataaagaaggaaatgttcctttaacaaggggtcgttgcaccttgggcctaggcacacctaaaatgctcctttaacacctacgggtgtatgtgtatccagttattcagaagttaaagatctggcctcttgcttgatgtagtaagtatgccatgaaatcccctttttcagtttagattagaaggatatgtggaactattttggggaagcagaaacaaaaaattcaagaaaaaaatgaagcactccccccccccccccccccaaaaaaaaagggaagtatatagagaaagtttaagtggtaaataaatgttaggaaaatatttggagatttttaagattaggaaatgttattcaagtttttttaatataaaattacttagggatgacatgcattgggggacttttttccccaaaatttggttggttattttttattaattgtccatgttttacatatttatttattccttttttttatcatgttgagtatcattgcattgatgccaaattaatgaagttctaataatgtcttgaaaaaacaaagattaaatttcaatttttttgtgaggattagttgactactgccccaaagctgtgtgaccaagcatgcaagaactttgaagaactgtcttagacagagtttggtcagaactttcaatttgaccaagcaactcctttttgtttttctttcatctcttttctttctccaaaatagtgacatgcataaataggtcatcttctgtgttaacttccatctttgatctacaaatttgccttgccaccctataagggtgtcaaaggctttctttggatggacctagaccaacccaaaataaggaaaacaccaaacaccaagactggattgaccaattacagtggattaggacatggacctccgtttctttctattgcttggaaagacaacacttaaagctcccaaatcatcatcttcctgtatctctaaattatcaaaatctgctagaataatgtaagcatagcctgtggacacgtctatagggtatccacatgaattgcattgagaatttctttaatattagaattattatcactataagctcctccatagtagcaaacaaatttaaaattcctaatggtattcagattactttctattgagcttggtgaagtctgggtgtgtgaagaggagtgaagataaagtttgtggtttttgtttcttcatatgtggccagttgcatgcaattcattcttattgcccatatatattgagtggtcaatgttgatttagtgatatgccaaggcatttcctgacattgatcaacacctagaaaagcttgaggtttttagtcttatgcctatagtttgtgtgaatggttttagtttctgtgaagcaatatacatgtctactttctgatcaacaacaattatatgccttagaaggattgcttgtccttctttgtgcttagccttcaatgatgaatatattttctttctgatattaaaagagtatttagtattgcagatggtaagggatattttctttctgatattaaaagagtatttagtattgcagatggtaagggaccagcgttctttcattgtgctattgtatgatacttgaagctatgtttgtagttttcataactgtttgtttggttatatttatttaagttgggcttcactaattaataattcaaaatttcctctgaatattgtggtctatcacacttacattctgtggagatttggataattgcagggatgccccctgttgtttttatctggcagctcttccttctggtttgctttttttgtttgcaatactagtctccctcccttcctccacctccaattcaattttttttagtggcctaaagaaatattattttaatccccttataacctggttgaagttatagtgtttaagctttatccaaaattttatgctgccccatcttcaacttaattacaagtattacggtatccttgttcagacacagtagttatcttggtacattccactagcttttgtggatgctcaatgttgttcattatgtttgaagaaattagttcagccaagccacaatcaagcctttggggtactgatttgtcttcccatccatcatggaatgaataatcattgtttcacaaattctggtctgaaccaatttgaatgtggtaacaaaatactgatctgggttgctgcctgttgttagtcttctgcttgaattctgccctttgagctgatcctatcaacttgagtcaacaggaacttccagaatcaaattaagaacgttctcttatcattttggttattccagtggctctagagctcaaaattgattccattgatctccaactgcaagatgtattctattatcatgaaccatatatcttttaactaatgtcactttatcgcctttttctgtgaaaattgaattgtgaccagttttgagttgatattatattttattggtcatgcaaaaactttattgctgtgggatcttttgtgatctctgtttggcatcccttgcatgttctcattgtcagtcaaagagcttctgtttggatggcatggtaggtatgtcgtcaagcaatataggcaaatattgagatttgctcctcttttgcttgtttggtgcatttggagagagtacaatgacagaatattcaataaggaggagcattctgatcagtggctaaaaaaggctctccccaaaattctatatgtttggcctctcatttctttaggaggtctagatctttcctttttttggactaatgttttgggtggggcctttggactcaaagccaattgttctttcctttgcttttcatcttttctcatcctttggcacttttttgtatacttcctgtgcatatggtttatgcctcgttttaatacgtcacctcactgcctattaagaaatattcttcctccccttcccctccctcctctcccatcctttgtgctattagttccttgtgttcaggaagatctattgtctttctccaaatggaatgaataccagcatgtatttccttgtactttcccattggcttcatcttgcaagttctgttgtggttgtcttattgagttttatttctttgattgctgggtgcactagtatgttgctggaaacatcttttttcacttagaagattgtggagtacaactgtacaacggtttctgactttcatattacaagctttttatttttatttttattttatatttttggttttttgttttcaaaatttttaaattataaattttaatttaaaaatattttattattttaaaatttttatttattttttggtctgccaatatgctcaatcttgatggttttgggtatgaggattatatgtgttattgcataagctaccagatataaacgtttgtggggtttattggtgacatgtttttagggtgcttacagtacatctagctttaagaacacagtgttatcatcctttgtaagatgtttactttttgctttgttgatattatcaaagcaatgcctgtttctgctttctttcacaagaataactatacgttgttgttgttggtttttttttttttaaatatttatctgaatgtatgttggttttggtttgaattgcaaatggttatacaaaatcttgttctttttagaagctcacattttgttaggttagggattgtggactatgactatactatggtttctgacgtttgtatgctacagctcttgttttatgtcagctgcatgtcattaggcatataagggttctttatatgtattattttttatttatcaataagcaaaagaaatgtattacgaagaggcgctaaaatagtgacccacagaaatacagtatagagatactcactcccttgcatttggatccaaaacaacaaggaaaaacaaaaaaccttctccctcatcgcgaacccacccaatctacaaaatctattaaggttgaaggaccatctttagatgtattataggatatgctactgaatattcatcttctgcggtttactggtagcatgtttggccctggtttttttttttttttttttttttcctttctcttaagagtacttaaagtatgcctaggtttaagaacatagtgttgggatattttctcacaagatgtttactgtgttgatattgcctaagctatttagaattctgattttttcataagtgcaactatgcttcaagtaattctatctgtatatgttattaaatgcatatagaaaatcagcttgttggttatgtggatattaagagtgtgtgcagtttttcttgaaaggaaaagtatctgctgatacatatttctctatagatgcacccaaacataaactcatgttggacaaggttccaatgtgtattttaaggttacattttgatttgatcttgtagaggatgtaccccatcttaagttgttggtataaggttttgttaagttgagagaagtaacatatggttggcggatatgctcataaatgttttcccaaaagtttttaagatacttattcaactttcacaatccacatttcttcatggtgggaatagttcttaaaatgataaaacccttagcccttagcacataattttacataaacttcaaagtgaatggtgaaaaagcatttactgcacttttaagagtaaaggagatgtttagagttacttgaactattattatatcaaataaagagttattatgtgaagcttcaatagatagtggttgaaaatattgccaaagatctgaatcttggaaagaatatctaaaactagtttggttttggaccaaggagaagctaacttcaaggttgattaatcaaaaggtttagagtgaaggaacttagtgtggtctttatggagataaacaatatgaccagcatgctatagagataatatggtaggttagagaaatgaaaggagcattgaagagatttatcaatgtgaccatgcacatgtatagtgtgcctttgactattataaaaaaagtcaaggaattttctgttgcttatgtcaggttcaacatcaaactcctaccttctagaaagacactttattttgaagagggtctgagatgaatatgactgtaactctgatatacaattgtcaaaaagcctaccattttcaggtctgttataagtaatggctaaaactgagtatttggaatttagagctgggagaagaaacagggtttcaaatgagtagaatgaagttttgctatgtggtttaatgaaagaaattatgcataagttgtcctatggacaggaataacaagctgctcatgttcagaaagaatggggtgttttttgttgatttaaacacaaattacctgcattgatatgtttttgctgtggagttccaattagttctgatttttccctctgaattatgtggcatctgctgatggttgatctcaacatcttgtattgaagttttaggggcttggtaaacaaggatgaaagcaatgtagttgaaacttcattattaaatggaaggtgtggtggtgatacattcctgatgatcaatctctgaacattgcattagagttttaaattcctggtataaaggactagagctttgtagctgaagcttggttgttaatggaaggtcaaagttgctatttgtgttaaggttaagcttttcttaatagagagcattttttgggagtaaaatggttgtgccagtctttttttaaatctcttgggctatcattgtcatttgggataaggtttttttgtgcatgcaagctcctggctgggctcttatatgatatctgcccctaaagtaaaataaagaaaattcttttggtggaaacacaaagtttgtggtagtacagattgttgctttagggagaacttgtaagggtaggagcttgactcagattgattttgatgttgaaggaaaagaagcttgagaaagatgatgttatttggagagcatattaaagggagtgttttgatggatctttctcataatagcgttcccaaaactagatcttgtggttgggataaccttagtatgatcacagtggataaaatgtgtttatgagtgtgtgcgtattgctgaagcttggattgtttggttgggggtgttactaacatcaaccttcttagaactaaatcaactcatgattttattctatagaatctactatattcatgagttgtgagtagaaaaatggatccttttagatttgaaaatatgtgggaaaatttgacttctaagaggggaatggtttgtatttgttttggatgtcaaattagcgggttgaagtttaaaattgttgagtagaagtacaacatggatgctggtgtggaataaagaaggtagttgagatcataattcaaaaccatggtatcggacttggcaaaccttgaggtggattgtccttgaaacttcagattggttttgagtgatacacactatcttttaaatagttatatgttttaaattggtttatgatagtattaagagtagaaaatttttagacattattatacatatttttaggtccaatactaatttttgttaattggtgtattaaaaacttggaattgtagcttaataagatttattttttattttcaaaatttaaaagtaaatataataaaaaattttaattgataacaattcattaattgtttaagaataaggtattttgaattttttttcttagtcataaatttaggtatttttttccttaattgttatggggaatcattgggagatgtagattctttatttttttcccctccttttcatgggactcgagttgtcaaatgatttatttccaagttgtgaatgaatcattattgaactacataatatttgacgcgccaattgatcttgtcatggccatgaccaaggtggataagacctagctgagtcgtactagttttggacaaacttcaaaccatgcttgagattgtcacatccattgatgctatgtaataattgcaagacatagtaatcaggttgtagaagcttgatattcttaaggaggtttgttgttggtagaagagtaaaaaggtgtttgataaaactaaaaattaagaaaattaagtattgaaaacttttgtactaaattatagaaagataaatgttttttttttgatagataaacacagaaaatttattaaaagaagggagcaagaaggcaacctgaagcatacagggagtatacatgagaagcccctcaacaaaaaacacaaggaaacaaacacttaccaaccctcaattagaacccaaccaatcaacaaagttaattaaggaatgaggttctccatctaaacaagacttagaccaagagaaaagattacaaacgaaggagtttttcaatctttggattgacaaagcctcattataaaaaactatcctatttctttctttccaaaccgtccaaaataaataaaggggagctgcccgccaagtctttccacgcttcttgtccacaaaggaagcgaaccaaccaaggagagtgtctctaaccgaaagcaaaaggacccaattaaccccaaacaacgaaaacacaagattccacaacacccttgccttggggcaatgaataaggatgtggtttattgtctcctcatcatcacaacacaagaagcacctgtttgctaaaatccagcccctccttttgagttgatcttgggttagcaccttcccccaagaagcttcccaagcaaaaaaacccacctttgtaggcacgcaagggctccaaatgattctccaaggaaacgagactgcaccactagaatcaagagtattgtaaagggattttatagagaaaatcccattcttagaagcattccacaacactctatcctccatcccaacaataagcctctttccttgaaggaacgaaaggagactcaccaccgcctccatctcccaatcattaaatggtctagagaaataaggataccatccccccgcatcccccatagagtcccaacaatccgctacccacgcatcttgagagaccgcaaaagcaaacaaagaaggaaaagcctcacaaaggggaatgtttccacaccaaatgtccttccaaaatttcacccttctaccatcccctacagtgaaggaaacgtttttaaacatcagaatgccttcctttctaatttccttccacaaccccaacccatagccttccttaacctcacgagagatccaccctcctccttcttccccatacttcctactgataataagcttccaaaaagactctctttcagccgcaaagcgccagctccatttacacaacagggccctattgaggatagaaaaatttctaatcctcaaaccacccttcattttatgagagcgaaccacgtcccactttacaagatgaggcctcttctccaaagcacccccaccccaaaggaaatccctttggattttctcaagcctcaatctaacaactcttggtatatgcatcaaggacataagatagatcggcatgctagccaaagtgctccaaatgagagtgattctcccccccttagaaatgaattgcctcttccacaaagcgagtctcttcgtcatcctttcttccacaccatcccacacagccaccgatttgtgaggagcacctagaggtagccccaaataagtggagggaagggaacccactttgcatcccagttcagaagccaatatctcagcattctcaactcttcccaccggcagaatttcactcttgttcaaattcatgctcagactagagatgtcttcaaaccacattaaaagccagcttagaacaaccatttgatcttgggaatcctcacaaaaaaccaacgtatcatccgcgaacaacaggtgagacacttgaatcccattgccacccctaccccttaacctgcagccggtcaggaagccccccctaactgctctgttaatgaggcagcttaaggcctccattcctaagacaaacaagtaaggggaaatggggtccccttgccttaaccctcgagtactctggaaaaaacccgcaggcgaaccgttaatcaaaactgagaaggaagcagtggagatgcaccacctgatccaaccagtccatttctccccaaaacccattttttgcatcactgtcataagaaaatcccagttaatatggtcgtaagccttctctaggtccaatttgcataacacatcaacttcatccccttttagtagcgagtctatggcctcattagcaattaacgcagcatcaaggatttgccttccttcaacaaaggcattttgggtaggagacaccaccttactcactaccttcttcaacctattagctaggaccttagcaagaatcttgtatagacctcccaccaagctaatgggtctatagttgcgtaaatcatcagccccgcctttcttagggactaaatgttgtgattgccaatttacaaaaatgaagattatttgcttaatttgaggctaagtattgaatgtgattcaaccatgtcatgaataaaaaaattaagtagaatgatgtccttgaggcctagctcaagtggtaaagggatggggagggtttgtgggaggttccaggttcaagtctcaatggggatgaaaatttacccatcaataaaaataaaaaataaaaaaaaaattgagtaaaatgatttattttacaaacttgtattatatagtgatcatggcaattcttatacataaacatttcatcatacacatatttgaggccaatccatatatgataataaaattttctacatatatatttatatgaagtatagttttgataggcaaataaaactgtattgaacaatgactaacacaaaaagtggggcattgatgtacacaagaagtttgcaaaggtaaccacaaggagaattaaagaaaactacataaaaaaacctactatctgctacttagttcttcaatgaaatgtaaaagaaataatctagaccattcttgaagggtatttgatgaaagtctcctccaatttctagttagaaaactccccagtgttgaaggcccaactattatgctctgtacatatgcatcaaaaagagcaagtaggagtcatgtgtcacacttcctcaagaattcatgtattgagccttccaacctaacaagagatctttgattaattttggaagtgcccactcgataatagtaaataatatattccttgatttttttttgataggtaaataagcataatatattaaacgtgctaaataatatattccttaataatcaggctttattgctgtgaattaaaaatatgcttttgttactctacaattgcttcatgaatcccacgcctattcactgaagactaaatcttctctcaagtagcgttccaagtagcccttgaggcctggctcaagtggtaaaaggttggggagggtttgtgggaggttccaagttcaagttctaatggggacaaaaaatttatgtattaaaaaaataataataatagtgttccaagttaaaaaaaaaaaaaaaaaaaattacaaagaagaagaagaaaaaaggaaggaaaaaaagaaacccttacatggggaattggaaccccacgccttttttgcaaggaaaagaataagatccctcaaatacatcaaattgtaaaaggagttcacttgatacctacctccctttcttttctcccttccataagaggctatcctcctttctctaatcaaattaagaaaatggatgcttcatgaacatatccaccacttctagctcctattcttgaaaaatgcctttgaaaatggaggttgtaatgaccctaaccttcctcaatcacaaaagatctaccactcttgcaaatttggtagtagctggactagaagaaaatgcttatttcaaggagcctaaacccacttggccaactatggtggtttgaaggttgagctctttttttttttttttttgataggaaaccacacatgaatatattgattgaaaaagaagtacaataggaggatgaggaatcctcctgccaaaggtgaaactaaacaacacaaaaagataacaagacactacactatgtcaactacgcacaagcacccttgactataccgttccattggaactacacactgctagccaatctagttgtaatacgttaaagggaatgcccttaaaaaccgcggaacaaaaagcccaaagagaagcaaggaaatgaatggggtcccaaagattatctgaattcctagctttgtcctcaaatatcctaacatttctttcccgtcacacaacccaaattaaagctatgcacgcgttttgccacagaactaaccctttcttggacttgccaaaacctttataattgatgaacatcatgtctgaaatgtttctcggaggaacccaatccatcttggctagttgaaatagtctgtgccacaaccccaacaacatagaacaatgaaggaagagatgatctgctgattctccttgctccatacacagcttacaaatgtcagggctaagagctttgtgaggtctcctcaattgtagcaagtcattggtatttaccttcttgtgtgccacaagccagacaaaggccttaactttgaaagggacatgagatttccatacaaacttagtggggaaaaatggaaatgaatcaggcatttgggacaaggttgtaaagaaagacttgattgtaaacaatcttgaagacaataaggaccaagatctcgcatctaaagcggaagtggataaatgcatacaatcaagagagcgcatgaggcattctagatcttctatctcagaatcagatagattacgacggaaattaaagttccatgagaaagggcgagcaaaaccgagaattgaagatataggaatatttttatccattactactctaaatagtcttggatattggtctttgaagatttggtccccccaccacaaatcttcccaaaagcgaattctttccccatctcctacgacaaaccgagtatacttggaaaaatcctgaaagacttgtgcaatggccttccaaggacaacgatgtgaccatctgactaaagtgttggcatcccaaccatttgggtgtgcctcgtagatgctaagaatgacctgatgccacagagctgtactctccctaggaaacctccacaaccatttccttaaaagagcacgattccttaaaggaatctttccaaaccccaaacccccttttaccctcggcttacacactgcatcccaactaacaagatgatctcttttaccttccccaacccctgaccaaagaaaatccctttgcatcctctcaacttttgcagccattgaagcggaaatcttaaacagagaaagaaagtagctagggatgtgggaaaggcatgattgtacaagagttatcctaccatcgaaagataagtaagccttttgccacccgtctaatctcctagagattctctcaatcactggatcccagaatccacaagtagttggattccctcccaaaggaagacccagataaagtataggccaaactgaagccttgcagtcaagcaacaaggctaacctagagagatgattctgatcaaggttgatgcccataagattactcttgtcaagattgaccttaagcccaaaaacttgaccaaatactaacaataaactcttaagagtttgcagttcttccgcacaagagttagcaaagaggatggtatcgtctgcgaattgtagatgggacaccctacatttatttctacctaccctgaagccctccaacaaacttctttccttagctttcaacaacattctactcaacacatctgcaacaatagtgaacaggaaaggggataaagggtcaccttgccttaaacctttagatgccttgacccaccctttagcattaccattcactagaatagcataagagaccgacgacagacaacctctcatccaaatcctccatttagaactaaatcccttcttctccaacgcatgatccaaaaaatcccatttcacatggtcataagcctttttaaagtctatcttgaatacaactccttcctcccctgatcgccttttctcgtccacaatctcattggctataagaactgcatccagaatttgtctcccttgaacaaaagcaccttgagtaaagtggatggtctcgtgtagtactcctcttaatcgccctgacaagacttttgctattaccttatagagacaagtgatcaggctgataggtctaaaatttgaaatcttctttgattgactctttttgggcaaaagaactatgaaggaggcattggtgttttgataaataatcctgctattgtgaaactctgcaaacaccctcactaagtcatccttgatcacatcccaacaattctgaaacactgcaatggtgaaaccatcaggccccgacgccttatccctatctaactgaaaaatggcattaaagatctcttcttcggaaaaaggggaatccagcctagaagcactctcttatgatataggggaccaatcaataccttctactctccaagactctccaggaggactcgagtagagctttttgaaataaagtaatatatcctctgtgatgctctcggaattgtccaacaccaaacctctttcattctccaagaatttgatgaaattcctgtttcgtctcccgttagccactttgtgaaacaactttgaattgcaatccccgtccttaacccattttaccttagctttttgtctccaatgaatttcttccctcaattatttcctctagctcccctcttcttacaattctttgaatagaaagatcagaagagagaaccccttcttgttcaatgacatcaatgttagctatttcatccaagatggtttttttcctttcctttagcattccaaaactattcttattccaatctttcaattttgccttaacaaattgtaacttcctcatgaacttgtgaccttcccaaccatttccttcaaattctctccaccaactactaaagcactctttgaaactaggatgttgcaaccacatattctcaaacctaaaaggttgaactcatcccatccacctctcatggttttcgacaactccacattatgtaccccctcaccttttgtgttttcaaccaacatccatcttttggagctttcctttaaggatcctctacaaaattgtccctcatgttggcaaattttcacagctacttgccaagtggggctttgtatatggtaggaagttttttgatgcctaaaccactgccctttttatttgagcacaccaacaatcaatcaccttatgaatcctttttccctttgggtgatcccccgataggaaatctctttgaatcttttccagtttaactcccactttttgtggaaacgaaaaataagaatatgaagtgattatgtaaaatagagtgtgccttaaataaaactcaattcttcccttttttgataagtactatttcttttgagaagccaatatactcttaaagtactcctccactaactcccaaactgcactagacttcaaaaggcactcctaaaggtaaggtctaaataggtcgaaggaaggtgaccgacccttatatccaaaagaagcaaatctatctgtctctatctcattaaccatcataatcaatttgctcctttgcaaattgatttttaagcccaatactagctcaaagcatatcaacaccctctcaaatgcctcaaataatcctcactagcctcttagaaagtgaagtatcatgaacaaagaggagatggtaaaattccttgccctctaccttgaaccttaaatccattgatgaaatgcttctgcacaggcttgattcagtcccttggaactttggaagagatctatgggtcttccattcactaaaactgaaaatctaatgtacatgaagttacgtttgagataatattgaaaatttgttaataatctgtagcatcaattacagaacaattgcaagtaattagccatcagatagtcaaagggcgatattcgtaaggagatctattgtcgcatagtgtgaaaggtcatagcaacttgaagttctttctcttaagtgctggtcttgtagggtcttttctgcccttgatgcatggttcctttccagcgaggagttgtaggccttctgtgtggcttttcattctagataatttttttgtggtttatcagattattgtcagaaagagcaaatcaatcagtcccctatgttgttgctctgaagagatgtcagaccccccttcttctgtgttttttttttttttttggttaaggatacttatttgctcttgatctgattttctattcctttttatgcgttgcttattggtctcctttcaagttggtgtgtctaggtgttggccaccaagaggcagatgctatgaaatctttttaatgtttgcttcttctggggtttatgaaaagaaaaaggaataggttacttttttaagttagagagatgcctagtgggagggttttttttttttttttgataggtaaagaaaaatgtatagtcaaaagggaaacaccataaaagcaccccaaagtacatagggagtatacaacgggtgcctaaagtgcccccccaaaatcaaaaaaggacaactagtgggaggttgattagaatccaactgatactaatgagagaaaaatgagagatgaaacaattggttgttattctgctgtctgcattcaatataattttgaaaatttatcctgtttgttttttcttttcattgaatttacattgttccttgacttttttcctttttgttcatctaatttttaggaaaagcaccgggagaagaaacataaaaaggaaaa

SEQ ID NO: 13356 - DNA, 16112 bp, Vitis vinifera
  Intron number 1 from transcript GSVIVT01022768001 (locus G SVIVG01022768001) derived from phytozome v7.0 (chr-ID chr2 ; pos 16302262 to 16318373 reverse strand)
tggaagctgtgcagcaaggggctgctgccattagtgtcacgacccaaattccgggcgacccaaaatttggctcgtgaccccaggtcaaaggtttgactctaagggttcctcctattccacgctggcagtcaaccaaaacactctgaatttttttttacacatacatcccactagaattctcataaactataatatctcaaaactactcaaaacaacaaggtttaataaatattcattatagttcaaaaataaaagttcataattaaacaacttaatcaaaataaggcttcataacaaatccataagtcataattactaaaacaaatcccaaaatccaaaaaaaaaaaaaaacaaaataaaagaaaatgccacgctccactaggctgctcgaggagcatcctgaagtcctccctgccccacctgtggatcctcaggagtgatatctgcatctaaaaagatgtaaaaagggaaagggtgagcatttccacattgcttagtaggatgcctaacacccaaggggttaaggggattactaagttccaaagaatacgaaaagaatacttcaacacaacaggaacaattcaacagtatcaatcaaaccacatagtttaatatctaatattatacacaatttcacaacattcaacaattaaatgaatgcacatgaacgtgtgacacacagtcatataatgcactattattctcgggctttcaccgaaggatacgcatccgtacctaaatacactctccattcagagtcttctcggggtaacttttgggtctttcaccctagggatctctctcccttcttaattcgcctcacataggctttcacttttcatcactatttcatttttttttttttcatttcatacacttttcacaattttcataatttttttcacataaccatgatgcaaatgaatgccacaattccaaagttcctcaataatttcaacaattacaacattccccaataatctaataaaataattttccacattaaaattttcgaaaatatcccaaataaatattcaaaaatttgcatatcaataaacttgaaattataccacacttacggaatttttcaaccattttaataatttctaatattcgaaattaactaactttccaccataaaatttctgaaaatattctaaccaatgcccaaaaattcacaaatcactatttttgaaattaaaccctaattttggaaatttttaacccttctaataatttttaatattcgaaattaactaactttccaccataaaaatttcaaaaatattctaaccaatgcccaaaaattcacaaatcactatatttgaaattaaaccctaatttcagaaattttcaacccttctaataatttttaacaattcaaaacaattaattatcaactaaaagcaatttcctgtaattacaaaaattccaaacaaattccaaataatccagaaaaattcatacaatacccatatttcctatttaactcataatgacaagatttataatttttttcaaaggaaaacacatttaattttaagttttagggttaggttcccctaccacagatctaagaattcaacctttaaaaacacaattggccatcgtaggattgttcctctcgtcgagtagagcacctcctcaaaatctgagtcgaaatggaggtcgtttggccatccaaacggtcggtcaaagttctggcgagaagaaatttctccacagtaccgctgcctccttttctcacccgttctgccactgttttcctttctttttccaaagcccatttcatttccttgttttaatccacttaccaccagtccattcaagcccagcccaaagttcaaaaacccaataactaattcccatgttttcctttctttttacaaagcccatttcatttccttgttttaatccacttaccaccagtccactcaagcccagcccaaagttcaaaaacccaataactaattcccatttttcttttaaaaccccctttcatccaagcccaaattaattccttttcatttttgtttttttttattaattctaattaattttaattaattaacttttcattttcgttttcgtttttcttttccggaaattctcaattactaaaatcctaagaaatttctaccctaaggctgacatggcataaaattttcaactcgcctaattgaccaacacaataaaccgaatttcaccaatccaaaactaacacgtgttcttcagacacttttcttttttacttttcaaccatcactcaaaataagacttttcaaaatagaaatgctaacgtggcataaaatacccggtcattacattctagccccctaaaagaaatttcgccttgaaatttaaaagagattacctttaaaaattgtagaaaagttgtggatagtgtcgtctcatttcttcctcaggttcccaagtggcttcttctatcccatggtgttgccaccacactttgactgcaggaatcaccttgtttctgaacctatgttctccaacctccagaattcgtaaaggttcctccacataagaagtatcttcactaatttgaacatcttacaagtccactacccaagttggatctggagtacacttctttagcatcgatacatggaaaacatcatgcacaagggacaaatgttgaggcaaaattaacttgtatgccactggcccaactctcttctcaatctgaaatagtcccacaaatctaggggctaacttcccatttttcccaaatagaaacatgcctattcgaagggacacttttacaaacactcaatcccattcctcaaactccaagggccttctcatttggtctgcatagcttttctgtctatcttaggcagtcttaagcttttccttgatgagttgtatcttttttgtagtctcttgaacaatcttaggtcccatcccaacaaacgtctctcacccacctctatccaacacaatggtgatctacaaggtttctcgtaaagtgcttcataaggtgccatgccaatactagattggtaactgttgttataagcaaactctgccaaaggtaagtaatctgcccaatttcctccaaaatccaaaacacaagcccttaacatgtcttctaagatctggttcactctttctgattgaccatctatctgagggtgaaaggcagtgctaaacttcaattaggtgcccaaaaccctttgtaaactctgccaaaactgagaagtaaacttagggttcctgtcagacactatagataaaggtatcccatgcaatctcacaacctcctgtatatacaacttagccaaagagttcatgggatcagtagtttttatggctagaaaatgagctaacttagtaagatggtccacaatcacctaaactccatttttcttgcttctagttcttggcaaccctatcacaaagtccatagtgatatgatcccacttccactcaggtataggtaaatgttgcaacaaccctacggacctttggtgtttagccttcacttgctgacaaatctaacagttggctacaaactgagcaatatctcttttcatcccatgccaccaaaactgtctctttaagtcttgatacatcttgttattcccaaggtggatggtatacttcgccctatgagcatctactagaagttcatttctcatctccacatcttttggcacacacaatctccatttaaacctcacactcccatcttcatacatagaccaattttcatctacctcacttgctaccaactgggctttaaccttttctaaaaactcatcatgaacttgggcctccactattctttggataaccattggtttaaccgatatactgtacaagcatggaccatgtccttcccgactaagacataactcaaaatcctcaataactgcatacatctcaaactctctcaaccccaagctagacaactggccataactcttcctactcaaggcatctgctaccacattcgcctttccaagatggtaatgaagggcaaaatcataatcttccaatgtctccatccatctcctctgcccagagttcagatcattttgagtgaaaatgtatttcaaactcttgtgatcagagtacacctcaaacttctctccatacaaatagtatctccaagtctttagagcaaacaccactgttgcaagctccaaatcatgtgctggataattctgctcatgctgctttaattgtcttgaggcataaggtaccaccttgccttgctgcattagcacacaccctagccccattgtagaagcatcacaataaatcataaacaactctccactaataggagcagttaacactagagcagtggtcaatttccgcttcaactcttggaaagcattctcacactcctcattccattcaaacttcacccattttctagtcaatcgagtcattggtgctgcaatcctagaaaagtctcctacaaacctcttataatatccagccaaccccaagaaatttctaatctcaaatacattagtaggcctttgccactcctgcacaacttccaccttggaatggtctactgctattcctgccttcgaaaccacatggcctaagaaattcacttcagtaagccaaaactcacttttgtccaacttcccatacaattgatgtcttcttaaagttttaagagtggtcaccaaatgctgtttatgctcctctaaactcctggagtaaatcaaaatgtcatccagacagacaatcacaaactgatccaagtaagcacgaaatactctgttcatcaaatccatgaaagcaacgggggcattagttaatcaaaaggcatgactagaaattcataatgccaatatctcgttctaaaagcggttttaggaacatcttcttccttaactctcaattgatgatacccagttctcaagttaatcttactaaaatactttgcacccttcaattgatcaaacaagtcatttattcttggaagaggatacttgttcttcacagtaactctattcaacttcctatagtcaatacgcaaccttagtgtgtcatccttctttttcacaaacaacactggggctccccatggcgacatactcgaacgaataaaacccttacccaacaattcatctaactgagttttcaattccttcgacttaagagggggcatcctataaggggatattgaaataggatcagttcctaggtatacttcaatagagaaatcaaattctctatgaggtggtaaatctggtaactcatatgggaatacatcctgaaactttctcactagtggaatatctgtaatgcccttctgtgctttctccttaccacgaaggcaagctaggaaatttattgatcatttcctcaacacatactgataacacggatcagactgcgaaaaaggtaaactaacacactttccttcaacaaagcaaaccttaaaaccatctggcagacaaaatattatcctatggtgatgacaatcgataagcgttctatacactatcaaccaatccattcccaaaataacatcatacccagtcatatctaaaatcctcaaatccacattaaatgctctatccgccaaggtaataacgcaccccttgcatattctatcaactctagcgttcgtacccataggggattcaataagtaacaaattctctacccttttcgatttcaaccccaatgcattagcacaagatgcagaaatgaaagaatgagttgcaccaatatcaaacaaaacacgcaccaagtactatataccaaaatcataccttccaccaagagggcgtcctcctctggctttgttggggtcaaggcaaaaactctcccaactgtctgccttcccctacctctagcattcgacccctgagaagaacgggtctgactactcgtggtagctgtcctggttccctacgctactgggggtaattgtggcatctggtagtaaggcaactgaaactgagggggttggaaaggcattactgactgctgttgagaacttccttgagactaaggtcgagcctgctgtacgccccacaatgggcaagccctccataagtggtcttctgttccacaaccataacatactctattagcagccgccctctaagcactttgcccacctcctgcatagaacgagggatgcctctcagactattgagtcttctgccttttctgcggcccttgggaactttcccccattctttgttttccttttctgtccctcttttgctctcgaatttggttggtttcgtcaatgtcctgctccaccatcaaaaccctcttaaccaactcagaatagtcccttattgccaatgggactaatctattcctaataacagccttaacccctgctggaaccttctagcattttctctttcctccccgatcatccttaaagcgaatatagacaactccaaaaagcgtgactcatactccaggaccgacatggttctctggatgaggtgctcaaactccatcatcttagcgtgcttagccacatctctaaaatacttgcctagaaagatcccctcaaattcatcctaggtcataacctcagtgtcatacactcttttcatcgattcccataagaaatcagctttatccacaagtatgtatgctgccagacttaccctcctttcctcaggtatgtccaaccccaccagaattcttctcattctcctcaaccaatgctcaactgcttttgcactgggctctccattaaaagatggaggctgcatcaccatgaatcttttcatcgcttccatttggctcattacaggcctctcaatgcggttcctcctatgtgagtggtctgaatcctcatggccttaggtacctcctgatctcctagagtcctggcctctcatcgactgaacagtctttctcaactcccttcttacttctcggagtagttcttctcttagttcttctcttaccgactccaactcctcatttctctcaaatcctcctcttttggtccttcccgccatttcaaatttaacaatccctagttcaaccacgttaccaaggtgagcaaaataaattcacatgtacccatttaacaacttcaacaactatcaaaactttcactttcctacaatcacaatacataattcaacataattaacatcatcatgtttcttattatcatcaacaagaaccatcacaaggcttttcaaacatcaagaatcaacaattaactaatttatttaataataaactcattaactaacacatataaaaaatcataacattacataacattacaatacacacaacacccacaaacattgaccccaaggtattattgcaaccttggctttgataccacgctgtcatgacccaaattccgggcaacccaaaatttggcccgtgaccccaggtcaaaggtttgaccctaagggttcctcctattccacgctggtagtcaaccaaaacactctgaattttttttttacacatacatcccactagaattctcataaactacaatatcccaaaactactcaaaacaacaaggtttaataaatattcattatagttcaaaaataaaagttcataattaaacaacttaatcaaaataaggcttcataacaaatccataagtcataattactaaaacaaatcccaaaatccaaaaaaaaaaaaaaaacagaataaaagaaaatgccacgctccactaggctgctcgaggagcatcctgaagtcctccctgccccacctgtggatcctcaggagtgatatctgcatctaaaaagatgtaaaaagggaaagggtgagcatttccacattgcttagtaggatgcctaacacccaaggggttaaggggattactaagttccaaagaatacgaaaagaacacttcaacacaacaggaacaattcaacagtatcaatcaaaccacatagtttaatatataatattatacacaatttcacaacattcaacaattaaatgaatgcacatgaacgtgtgattgtagaccctcaattttgtccctttatcacatgtctttaagttcatttccattgcttcatagtacttccttagtggcccataagtactcatacgatttactttttctgagccaccttggagactttggttgagggattgcctaaccccttattatgatccttggcagtcttgatttaaacttaggctcacttagacttaggtctacttaggcatctggcccacctatgttaccttttaggtaattcctatacgacttacataatttgcatgatttgcacttttaatgcttgcatgtacttgatttcttatttatttatctatttatttatttatttatttatttattatttggttagttatttgtttttatttatttattttatagaatattgcatgagattaatgattaattgtgtaaaatgatgtcttaattatttttttgtgtacctatgatagacataatgtttttaattgcataattttaaattagttttaattttcaatttcatgacctttactaattttaattcttattttattttaacatgagattcgaatgcacacattggagaagatcctagatagaaagagaaaagcattctgattttcggaaaggaagggaaataaaagaaaggaaagtagatttaaaaaggaagaaaagaataaaaaggaaagggaggttttcttttttgtttgggaacagatttgggtctttgggggctgatatatataggtgcaaaaggaatttttgagtgaaaagaaagaaaatgaggattctttgattgtcaagggtgggaaaggtgcacaagagcggaagagggagattgcagccaaggtttgtccaggtatgcttcttgttctttttttatttatttttaattattttggtattcctgtttacattcactctagattctctggctgttttcgagaagttgttcttactgattggagtggacattgagggccacttatttgcgttgttgaatcgaaatttccttcaagcttgctctgttatgattgtgttcttgatttatctgattttctttttatataaatagctgaaacagagacttatgtttgaactttaatgtttgtggaatcttgatataattttaactaagtttgtcttaatgtgttcagattcttcaaagcccttttgaaaataatgaaatgtggtttatctgcttacccacctttatctcccttgctttgtttttttcttggattatttttatttttattttttttcttctttgcttctgtatccatatttcttccctttcccctttggtatcctgggctacggaccatgatgatatgaatattccaagaaaggcagaaacttcttgaaatatgtgtataacagggttgcttggggtcagacggctgtagagatttaaattatgaagatgaccctctagtatttattttgcttgtatgattgataaaagaaaatctataacttttgggtaaaaaagagcatcaggtcatctctacactggaactgtccccactgagtgcctgcaacaagagatcgaaccacagttttatcatagagagaagttgtatctttcatgtgatgatgatcatgccattgacatcgaggtttgccccagatgcccgaaagtgagattaatatataattgcccatcagggagttgccaagggaaacatcaacctacttagttgtgcacagcttgcactttgtgtatagcacgctattttcattgtgggtgttgtattaatgactgtgactatgaggagaccttctgcctgaacttgctctgtttagtttgtttcaagcagttactgaattgacagcagagacaggaagaaatgggtgcctattcctctaagcacactatttttcatcaagagataagccatctgttgattacgctcttggatggcaagaaatcctgttttattgtgaagaattcgcactgcagagctgtaactcccatcagagactgtttgtcttgcttggttgacgtatttgatgaacttagcttcaatggatatttgatgtataagcattttttgggacaaggtaaccctatggtactttggctcctgtaatgggagattgcgtttagtaaagccagaggacaacgaagttgtttgaatgtgtgtttttggttatgaagtgatatttttctgggagtgaaggatgaaatgtgcagccagatatcacctattgaagaaaatatgtataatttaagagaaaaatcatccaacatggatcctgattacaacagcctccatgttactaacaatgagattcaaacgattccttgggcatcaattcttgaaaggttgttcagtcacaaaattcacaactttgtgtagttaaggatctttctactcatgacgtggtgatgcgattgatacggaaggagaattacttaattggagtgttccataagagagttcttgctttcccaatatctcgttgagtcccaagtgctggaccgactgttaagtttggctcaaatggagtacagcatcatctgacactgacaaaggcccttgaatggaccttgaattggtgcagactatagagcatgtttgataagaacttttgtgttcgaagggactttgtttctaatcctaaaacattgaataaaaggccatatatttggtggcaacttgttttggtatgctgctgtttttagaactataacagctattagaggggctgctgtaacagatgagcttctgatccttgatccaaaagagacaaggtctttggtggtccaacatacatactatttgccaaaagatggcatggagaggaaaattctgagttggttagaatggaatttgaaaccttgtttcagtatactagaatgatgttactggaggagatcacatcaattttattttttttcttattccttgcttgctcttatttgctgttccaaagcgggtggatgacattttgcagttcattgaagattacacagttcatgttgagggttgtgatctatgcctagatgattttgatgcccagttacagcttctgaatgcaggcatcaattgaaggtcctgattctctattttgtttgcgtttgagataagtcatgaataggctctggaatattaagaagctctatgcaaggagtggcagagaagcaactaatgagcaggataagctattagaggatgctgttggagaattctataggctttgagttttggacggggtcatctttgagtcattcaagagtggacatgcagattcatcttgaactcttactaatgtgttgaagtaatgtctattatagataattttctgaagctgaaacataaagagcctctcaataaggtcgcctttgtgaatcttgcccaacatgctcatgagaaattttggtgaattactgaactatgccagcaaccaaaatacatatttccaatgcgcccgaagagagaagaatacggttcaatgaagcataaaaaatgatttatgagtgctatttattctttgaggatgaagttgtagataaagggctgcatcatgaaggatacctatctatcgctttgctgttgatcctcttgaaacaacccttttatttgaggaatatggctcatctggagcaacttctaaatttattgaaggtcatttttttgacgatgtggaaagcgaaccaagcgatcaagatgatgcaggctgcaagaatttcttggaagcattgcaaacggctaggtcagatgatgaaactcttctccaaaagctgaggcaaatgctattagaaatgggaaaatcgaaatagaatttataatgctctctctttctctcatgttcgaaggctgatttgaatagtactggagtcacctatgctaccatgctggacattggaaatcttatgcttgcgggctacgatcccacctatttctggcagagttttaatcctccaacagacacaatactacccactcagatgctgaatcaaggcagtaaacttgttgctcgtttctcagaggtgaataactcgagaggaagatccatgattatattgcatactgaccagaatcttgtgctttacaccactgatttctcaacggattccgcaaatcgatacttcgaatcgtatagaacaagaaagttgctttgatactccttcaaaatcttgtctaaaagaatcttcaagcgaacctttggtctcagagttcccattgcagtcagctaaaaagaaattagagagtcctaaaccagcagtagatccatcagagccaagttcagtttagagaggcctgatcatggcttattgacttcagaggaagagatggtttgaatctgttcttacttgtacaaactattgaagatataacttcaagacacgttcttgcatccttacagagagaattgatccaaccttcggaccacttagcattggaattcgccttaaaagaaaatgagctttaaagcacttgccaaaattcaaaaggggcaccacacacatacaacttagagatgttgcaatagtccgtgtatttattcgaaaagctacatcagtgaatatccctatgccagctaaagaagatcagttagtactacagaaaaggcaaaggatgaagttgtgatgagctagaaaactcagattctgaactacagaaaaatccggaagtgaactataagaaaattgataaaccagatgaacttctgaatgaagatttgaaacttgagaatgagtggcagcaagtgagcacattgtcacaagctgatccaaatgagcctccccatggccttatatagagccaggaagcttctggagactcctagagtgagaagagtgtggaaggttctagagaagtctggaggaatccacacaattctacaccatggtagaaggcacgagaggagtccggggctttctagagaaatctagaagactcttgtatatacttgtatataggcttgtacctagaatgatgtaggacattctagaatagtcttgatttgtaaggaacactccaaggttccagagagttccattggtgcctataaataggtgagggcctcatttggccaagacaccaagcaagtgagcatccaagcacttgtaaaggctttcttgagttaataagagcttccattctttaaggagttgcctaccaagctttttaagcttttgagtcgcgagtgtcttagccgagcaagctaagtattgggagcaaggctgacttagcaagatcaagcgtcttggcttgtctaagtgccgcacgagcttagtgaacgactaagtccgtgacaacgtgctctgaaatgaatatggccagttcttctcaaacatgctaacaatgtacaaaggtctcttcacacaaccatcagcaatctagatacaactaaacctcccagactccactccatcatatttaccttgctacacacacctcttcttccttttgcttctttgattgggaatttattgttttaattgaatttttaaatcatttttcaactaaatatttctagctttgaaaaatccatctttagagtctttctagtcgctaaaatccagattttaataaatatgctgccactttcctctaggcatgcattttcactattttattttattttcaactattttcatgattttctcgattttcaacaagcatgaacaaactccatgatccaaaacaatggaattcataggatcaactcatgcgaaatcaactagggctttggtgggggcccgacattgatgatattctcatcaatattgtttgcttgatatttgattgattatgcttcctttttgtggtattgagattatttcgcacttgttactaagcaaacttgtttcccatagaggagtattagcttgctatccaggtacgctcttcttgccctcaagctctaaaattctatgaatgtgtatgttatcatgagccatgtccatgtttgatgccataattgattgccttgatgcttgtttgatcatctttgataaaaatgcatattatgcatcgtattttcaaactaacctttgctgtcttgtgatagcgcttaagaagcagtccaggtacgtaccctaaatcttcttcacgatcgtgattggttttcctgttaagcatactatttttcgaaatcacctagcctacttaggtatccatgattaacctgttaattgccatatttctctcaacttggttagtagagacctttttagggcttagaggggtgctacctcctagaggtaccttcccaataagtaaccagatttccggacctagactcgggttttttcaaagacatgttttttccaaaaattatggagtcacattttagggtttttctttcttgttttatttttcctttaaaataaaaataaaataagtggcgacttcgattttttttttccaaaattaattttttaccaatgaaaagcgagtctcgccgatcgagtggaggcgcacatgaaaaatgcgggtccacagtgacacacagtcatataatgcactattgttctcgggctttcatcgaaggatacgcgtccgcacctaaatacactccccattcggagtcttcctagggtaacttttgggtctttcaccctagggatctctctcctttcttaattcgcttcacacaagctttcacttttcatcactatttcatttttttccatttcatacacttttcacaattttcataatttttttcacataaccatgatgcaaatgaatgccacaattccaaagttcctcaataatatcagcaatttcaacattccccaataatccaataaaataattttccacattaaaattttcgaaagtatctcaaataaatattcaaaaatttgcatatcaataaacttgaaattataccacacttacagaattttttaaccattttaataatttctaatattcgaaattaactaactttccaccataaaatttccgaaaatattctaactaatgcccaaaaattcacaaatcactatttttgaaattaaaacctaattttggaaattttcaatccgtctaataatttttaatatttgaaattaactaactttccaccataaaaattcaaaaaatattctaaccaatgcccaaaaattcacaaatcactatatttgaaattaaaccctaatttcagaatttttcaactcttctaataatttttaacaattaaaaacaattaattatcaactaaaaacaatttcccgcaattacaaaaattccaaacaaattccaaataatccataaaaattcatacaatacccatatttcctacttaattcataatgacaagatttacaatttttttcagaggaaaacacatttaattttaagttttagggttaggttcccctaccacagatctaagaattcaacctttaaaaacacgattggccatcataggattgttcctctcgttgagtagagcacctcctcaaaacctaagccgaaacggaggtcgtttggccacccaaatggccgatcaaagttccgacgagatgaaatttctccacagtgccgccacctccttttctcacccattttgccactattttcctttctttttccaaagcccatttcatttccttgttttaatccacttaccactagtccactcaagcccagcccaaagttcaaaaacccaataactaattcccatgttttccttttcttttacaaaacccatttcatttccttgttttaatccacttaccaccagtccattcaagcctagcccaaagttcaaaaacccaataactaattcccatttttcttttaaaaccccatttcatctaagcccaaattaattcattttcatttttttttattttattaattctaattaattttaattaattaacctttcattttcgtttttgtttttcttttccggaaattctcaattactaaaatcctaagaaatttctaccctaaggatgacatgacataaaattttcaactcgcttaattgactaacacaataaactgaatttcactaatccaaaactaacacgtgttcttcagacacttttctttttgacttttcaaccatcactcaaaataagacttttcaaaatagaaatgctaatgtggcataaaatacccggtcattacaattagcctctgattcaatactcacgtcgtcttagcttgtg

SEQ ID NO: 13357 - DNA, 7195 bp, Vitis vinifera
  Intron number 2 from transcript GSVIVT01020487001 (locus G SVIVG01020487001) derived from phytozome v7.0 (chr-ID chr1 9; pos 18584747 to 18591941 reverse strand)
cttgttattgtgtctacacttgacatgactagctggtccaacacttgtggggcatttgtagatgcttctttcttgttgccaaggaaaagtgtatgatgcatttttagttaaatttgttggagaccatgatatacattatgaatccaaatcttaacaacttgcacttctagaaaacttggttgttcaaaatggaatctgagcatctttagtaggaggccatatttatttcttcaatttattgagtccacgttcttattaagcccatattcaagcataagagcttttaggaaaattggttatccaacaaaaatattgcatagtttttagtcattaaatagtctgagtttcatgtctggattccttggtgggtggattggtaatggatcaaattgattacaatgttgcatgtttcctttttttttttttgagtatatatgatgcattgccacaagtttacccagattgtttattttatgccagaatcttgtttttattgtacacatcaatgagaaagttcgagcaggtgtttgatgcagaattaggtatcatgtgcttgtccatatgggacatgtgtatgtttttgtaccaatatgatctgcttttcacttaatacgaaagagtagcctgatctgtggattatagctgtttatctgtgcttttatattcttcctggattagtattgctctaacctagtggccttaattgcaattttggtggacaacaccttgatgagatatagggaactaaaatgcccaaagtaagtagctgttgtactcatatttagttaattttagcttgacttaaagcttagggatgggctggatttttctctccttaaggcaaacaaaaaaggagctccatgttggagtcaatagtagcaagcacagacaagcttaactttttgtcaagtatcatctactttataaagatgcaaaacacaatatcagcacaattttaaagctggtttgtaataaggaaaagtgtaaaccaggtttcaacacttgcttttttgtgcaggtgaaataacttgtaataattttgttttcagccagtatgcttgtctgttcacgaattttaaaagcaaccattattacttttggagatgttagctatggatgtccatagtttctaatacataacatgcttgagacaagaatgtttcagttatttgtttggtaacataacatttatctttgagtgtgtcagcctgagcttctgttaaacatccaattacattgtttcttattctagactatgaattgcttgtattagaggaagggttccatttgtaagttggtgttggtaatttgtatgtcctagcctccatctgtatttttataaccttttcaactctcacagggatgaagaataagatcaggccaagaggaagaaagtatggagctctaaaggtggccttggtgaacctaatacttttcaagaaattacgtctaagaaggcacattttaaaaaggcaacgatggatcagtccagctccgtaaaccaaccatttaggagatgaagaaatacaatacacatgaatggttgaggaaggtttaccacctgtttccctgctgttatacgtctatgtggttgaccattgcaatgttgtgctgatctggggcagtcttgttgagggttctccatttggttgtatttttacatcaattttgggatgttcatttatatttgcatctcacatttgtgaagattatactaatgctgaacggcacaaaaaccgcataacatgagggttacttaagtaatggaactgacacaactgcacatcacaagtataatctgaatacgtaagacaatttgatcatggaactccttagtttaaaacccttttgagcatgcacctcttgcatattggcaaaaaatcaggtacataaatacctcataatgtcaaaaatttggcagggcaaacaatcgaaatgtggatatcaccctaatgtcccagtgccatgacattcctgtaaaatgatgtacctaaaacacatccaattacaaggatctgcagctggttgaactgtacagcatcctggagtggatttcatcatccgttatccacagaaacgtaaatcatgtgttataggtaacccaaggaatcccctcttgaccccaaaacagaacaaattacactataccatgaaccataagcccatgcagaatatgccaacccgatttcatatctgataccattttcgcccttccattgccttgacaagctcgtttgccaattatgcaaagtcttgtgctccactttgcagctcttcggtgcgcttactaattctctgatgaagaaaaggaaataaaagagagagagaaaacaaacttgttatttactggtccaatgttcaatggtatgaatacaaggatacaagttgacagtttatcaaagcatttcatgacatgacatgattaaaaagtcccatatcaaaagatattctaatgtaaaagaagatgcatttttttaactgtaggtgataatgatctcacaacattctgacatatccagatgaaagatatagaggctacttaacacttaaatatttcatagaacaatcactaaataagtgttgtaaatactagatagaactgaggtgtgaaacattttcatcacaaaattggagctgcattctaaagatcatgtatatctatcttcaatgctctgtcgagttccgagcaaaggacggggaaagaagagaaaatcccccaaagggacttttctcttagtttggttgttccaagaaaattatgagcatcaatatcacaatgtgttatgtgcaaaatggttgagttagcattttcagtttaacaaagctgataataataatcacagaggtccttgttcgcactacgacaaatatagtactacacattgatattcataacacatttgtagcacctatgttaagctaaatattacaatatgcataagacatgctataaagaagccaacaaagaaagatattacatatggatatgaaataatttggaagaaatgttgagcatgaattggaagttcaaactttggtttggcagctgctgaactttcatcacttctcttccatctaaggtagaccccaactttagctaaggtagtacctaaggtacagtccctaaaaagcattggtggaccactcgagcactcaagagaaccacacaatggcatggtctaagggtcagaaaggaagaccggaggcttaggagaggttgagttgaggtttagttaaggtagtacctgaaggccactaaggtagtacctgaaagccactgaggtagtacctaaggtacagtccctaaaaagcacttgtagatcacttgagcactcaagagaaacacataatgggatggtggaagggtaagagaggaaggcccgaggcttgagagaggttgagttgaggtttagctaaggtagtacctagggtcccttaaggtagcagctgaaagccactaaggtagtacctaagggctcttaaggtagtacctaaggtacagtccctaaaaagcattggtggaccacttgagcacttaagagaaccacacaatggcatggtctaagggtcagagaggaaggccgaaggcttgggagaggttgagttgaggtttagctaaggtagtacctaagggcccttaaggtagtacctaaagccactaaggtagtacctgaaggccactaaggtagtacctaaggccactaaggtagtacctaaggtacagtccctaaaagcactggtggaccacttgagcactcaagagatttgttgtaggtaattctatcataaatttgagtatcaaaaataatttttttgttgttgactctttttctggtagcttctcaatcacaatttgacacacaggagtttagaaaagaacttttaggttttgtcatgaactaagaattgccctaatttggtgggaatttagtgccagtaccaaattgcatgttgcagtttattagggcaaagaagtgttctgttgtttggaaggatacatcactatccgtcattcccttgtttatgcattctgtgtttttcagaagcaagcggggttagtaagctccttaaattatgtgacattggatacttgtatctgaataggatatattacactcttggccaaggctctagatttccattttggcatcaaactttatcttgcttgaaataagattttcattggaggatggagagtccacacacatgatatgaatcagctttgaccggctcaccagcataacatccaaatttaattgaaacaaaacctttaactgagacctctctttatggttgagcaactggtcattgccatgtttatttgcacagcaagcgagagaaggactggacaaggagaaaagggaacgaccggcatttgatttgcatagaggacccgtttgagatatcacatgatctgggtcgagtggtggacaagttcagcataaaagtcctaagattaaattaatattaggttaactccattgactataggtcaagcttatccttttacatattctaagaaattgtcctcctttaatctaattactttttccttagcgtgtgggccttaagagacttcaacaaatgaatccaaagaaacaacaaaagtcaaagtaacattaatattcataactttttttctcatggaaaattgcacatcaaatttgaatgaatactattgatgtgattagataatgaatacctttgaaaagattatattcatactatttacttgtctagatgtagagttaataacttttgatagttataatattctacacctataattaaatactaaaatttcccttaattttcacttttatcaaatatcaccctattatttgaatctcttttactaagttacgatttttgtatcatatattgaaattccaaaatctattaagtttttaacaaaattaatacttcttaaaaaaaattatatcatcacaaaaaaacaaaaattaaaataatgaataatttaatgccaagttccaaatagttatttatacttcattaagccaacctaagcaatgatagaataagaacaccaagttccaatgatcacaccactattaattaaaatagcattggggggaaaattgataattcaacttcaaaatcaaattaataagccctcatatgagtaatgttcatttttataatttttttatatttaaaattgcttgaaaaatgaggaataaataaataaataaataaaaagtcttcaagtaactatgaatatgaattgatgcttcaatttaatttataacaaaaataacacttctatataacattttatttgtcaaaaaaaaaaaatttaatatgtacataaaacttactagaaagcattcattagaaagttaaagtattttcatccaattctcataaaaaattaagtgatcagaatatagtaaatcatttaaataattcttagactagaagttagtaaatgtttcttccaaacttatctttattaataataaatattaaaattttaatgcaattttgcattatataatactaaccaactcatgaagtcttataatttatacaagtgacgtgtcaaaaaaattttgtgaatacaaaattacattttacaaaataaaaaataaaaaattaaatcaaatcaaattaaagtcaaagaaaaataaaagtgatagattttcttatggacagaatacaagaattaaattccttgtaaatcaaatatttcaagaccaaattgaattatgattattctcataaatagggcctcctctttcaattcaggaacatttgaaaacagcaaaggaatcctaagagtctactcaagaaattccacaagccttaatttgaactctactaacaaagttagtcattgaaaaaataactagtgcaaaataagtacaattatttcggtatttagaagggtgttcccttttacctttattcaaaatttcaaaagacattattctcctctaaaatgaaatcaagaccatataacaaattatatcctttttaaaagattcatcttattatatgtctacccatgcatttttttttaaccaataaatttgaagagaatttatcaaggagaattgtagtcatacatttcttaaaaaaagaaaaaaaacaaaaaaaatttgaattatttttattctattttcatgttcttataataataattaaggactcaaaaaaaaagaattatctacacacacatttgtcacaagatggggttttggctgcaccttggcacggaaaacaattttttttttttttatgtatttatacaaaatttattttaagaaaaaggaatttggttaaatcatcaaaatcaatttttgtgaaatacttttatttgcattctttttatgaactagccgttttataagcattatttttagaaaattgattaactattttatttaaaattgatattacgttaactccattgattatggatcaagcttatccttttgcatattttaagaagttgggtgacctctttttttaatttgattgctcttatcaaatgaaaggaccttaaaagactcctagaaatgggttcaaaaaacatcaaaagtcaaagtaacataactttttttctcatggaaaattgatcaataagagaaaatcatgcggcacaccaaatttgaatgaatactattgatgtgattagataatgaatacctttgataagattatattcatactatttacttgtctaggtgtagagttaacttttgatagttacaatattctacaattatcattaagtactaaaattctccttaattttaaattttatcaaaaaattaataatttccaataaatatatatattaaaaaaaaggttaaaagatgtgttcaataaagcaaaaaaatagttatgaaaaatataaatgtaaatgacacatgaaatcacataattttttaaaaaactagtaaaataaatagtacgaagattatttaaaattattcttaataatattttatcaccaaaccaaccaaatattaattacgaggaaggtctcaatagtgaattaattgttgtcaaatattctagtttgaaaactggaaattgcttcatggcttccaattcaagtagtggggttagtttgaagaggtaggctcgaacgttgctataaatatgggctggggtggtattctcgttttcgtattagcataagtaggtgattaagaaagcacaagag

SEQ ID NO: 13358 - DNA, 6444 bp, Vitis vinifera
  Intron number 7 from transcript GSVIVT01012031001 (locus G SVIVG01012031001) derived from phytozome v7.0 (chr-ID chr1 ; pos 2024946 to 2031389 reverse strand)
gcccctgaggtacatttgtagttgttcttttaaatgtatgtagagtgaagttttgttcttattgatattgaaagagttcttgctaactttaatttaaaattttgtattaattagtaataattggttatttttctagtattatcttctatgcaagtatatatataataattcgttaagggcttgggtgttttttgtgctctttttggagtggttgctttaggtgctccttgtatacatcctgtgcatgttggcatattgggcttctttttctaatttttatataccttcctttacctatcaaaaaaaaaaaaaaaagaaagaaagaaaattgtgtaaaacatagacaggaaagtggttatgtaattagggaatgtgtttttatcttgatcttgttatttgtccaatgggttgtgttacattgacttggataaataagttgggtgttgccatgattagtaacaacaatccattggattgaattagtaagtagaatgaaggaccaactatacttcccaaaaatgcagaaaactgataagaaaaacataaaagcaagtccacaacatccataagaaattaagtttcgcataaaagcaaatccacaacttccaaaagaaattacttttcgcagctgagaacaaaatcaaatgtgcagtgcttgtgaatgatctacatgaatcaagaaagtaaaagttcctcaacaacgatgaaagaggagcaatgacatgctacaattgagaagatcctacaaaccttgaggggtagctcagttggttcggcctagagtttgctctccaatggtcactagttcgagtcccctcaaggccactggaggtttacccggtcgttaacttcagggccccgtgggattagtcgaggtgggtgtaagctggcctggacatccacggttataaaaaaaataaaaattgagaagatcctacaaagctcttaatcctgatgtttgtttgttgtgtatggagagtggtgaaacagtagatcatattttcctgcattgtcctttgagtttggggctatgcaattcagttgggctcatatggattgagttcctcctaagggtgtatgtgacatgatgattatctcatataaaggattgagaagtaacatttgaggcaaggtgttgtggtagttcacttgtcttgctttgatgtgggttgtgtggtgggaaagaaatgttaggatttttgaggacaaggcgagaacttcagagagtctttgggacataattcatttcttaggctcattttgggcctcttgcaccacaacttttaggggtattccccttaatatggtccaacttgattggttgttgacgtgtagttccaagggtgtgggctagcaaggatagactgttttttgtatattcccacatgggacatggtctgtggaacctcatagttgtatagatttacttatactttggaggttcctactttcgttttgtgtagttttttggaggactcctcatccttctattgtacttattcttactttcctttatatactatactgttgtttctcaaaaaaaaataaaaaaataagagaggagtaggagggtcactagactgaacttgacaccaagcaaattgataaggaacttagccaaagcaaaccatttgttgggaagcagtggagaaagaatcgctgccattttgaaaggaaaataaaactcactttgaattagtaagtagaatgaaggaccaaatgtgcttcccaaaaatgcagaaaactgataagaaaaacataaaaacaagttcacaacatccaaaagaaaatcaagataagtttcacagctgagaaacaaatgcaaatgtgcagtgcctgtgaagttagcttcttcactccttgctttgctgaaagatctgcatcatggttggctaagagtggaacccaagagaaagagcatctcaagcgggtgttagtaattggtatggtctaggtgccagatatattaattcctagagcttaggaaacaaggaaataacctaattatgatattttctcattctactgtggcaaattggaatatgtatttaatatggaatgcatgacatggatacttgactcatatttgccttataagataacaagttacaaatcataactgagaaaaaactaaaatattgttcttcttttcctctgttttgttggttttaaaatctgaacagttggcattgcaacctatcctgcagtttaatgcttgtcatgtcatgtccaatgtggaatagctatcctattgtgtcgattggagggtacttcttttcctttgtttttcattaggttttgtaatttagagaaggatttctcatctttctcttctgatcactcattttttaatgaatatgtttttgtttttgataaaaaaaataaatattttggatattatattacattgtttgtcatgtgcttagatgttaggatagatgataaaatatggtatatgcaacatgaaaaattcatattagaatttatgactaatctcataaaaatgtttaaccaatattgagtatgaggaggctatatatgtgattagttatggagtacttaatggttgtggttagatgcaatatatttgacaaaatatgacattttctttcatacatacatacatacatatatatatatgtgtgtgtgtgtgtgtgtgtgtatttattagaccattacaaaatctacaaaacgaagatttttatttctttcttctttctaccattttcttccatcttttaataccagatagaagaaaaccaagtgttattgtggaaaactaattatactaactcttatcagccaggtctgaaagatcttatagtttttattttatttttttatttatcataaacgaataattgtattaaaatagaaaaacatgagaaagatgagaaatcctccccaagaagtacagacctgataaaaaactgagaaaacctctgctaaagaagaagggctatacaaaaatacaaaaggcctatacgtgtataatgaacctagaccttgtgtacccaaccctaaggtgtgcaaatcaacaaccagttaagctgaattacactcaaaggatagggtttaaatctgtatgtacagtaagcccaaaaagagacataaaattgaaaagaatcccacatcaactccggtgtcctccaagtatcctcaaaaatcctaacgttcctctctctccacacaatccacaacaaagagaggcatgctatcctcgagagagtcctgcctctgttagaattcccaaaacgcttaaaggagatcaccatcatattgcgaatactgcctggttgaatccaatccatccccgcctaagaaaatatcgtatgccacaaatctaaagtgatcaaacagtgcaataagagatgatcaattgaaagatcttatagctttgagagggggaactttcaatttttgcaagaaactatgctctttaattaaccttgctattttcagactcagactggtatttgaaaccaaaaggttgctagatcacaagtccctggttggaccattggtttaactgttgaaccatgagcattgttgtgtgcatgcataatgttttaattttattataattatatgtaatattaaaataacaaaaaaatttaataccgtttttaaaaagtgaagatacatttctaattattttctaactttcccaatatcaataaaaaataactaaatatttatgtaaatgataaattttactgaaaattaaaatttcaattttaggcttcaatctcctcaatctttatcatatacatttcttttgttttaaattttttctttcctatttcaagaagatgaaagctatagaagcgaaatctctagaaagcaacatgattccacgcaacatcaacagcaacatgtttccatacaatatcaacatcagtcgagaagccttgattctgatgccttttttctatatttgggttgcttagcatctcatgtcattctcatcaaagcttctcccccatcatcaaggctttttcttgaattagtctctaatactggattggggaccagtgtgcctatcaaaaaataaaaataaaaggcggatcagggaccagtgtagatagtgatggtgttgttcatgtggttgatgccgggctgaaaatgctgttattttgcagttcaagaaaaaaaaaaattaatggactggacacaactagttcaattatttggccagatggttcgaccactgggttggccagtttgtgatcagttcaacccttaaatggcccaaagacctgataaggactggaaaaggacctggttggttgtccaactggctggtctactctgatttataaaatcatggttgatgagattgattgtttttgtttttgttttttttgcctttttggatgtagtttgtttttctttccttaagggtgggtggaagggaattacactttgcctctctcagttataatggtgatgacactattatccaagctatacaatcaggcagagagcttccttaccattcctctgtggcacttttcttccttcagtcattttttttttcttttcttttttccttgttcgagaaaagtaatagaaaaacatttttctattttgtaaactatttccatgttgattttgctctaagctaaaaactaggtagaaaactcctgaaccattcctttgtggccctttttcccctttcgtcaatttctttgttctagaaagtaaaatagaacacttttcattattgaaatctttttaatgttcatttttcccttgttttgaaaagtacattgaaagaactcctaatattagattggctacgaaatagatactgatgataaccaacaatagatgtgctgactgagctggttgtctccaatcttgaatcttggcttttgtttcaatctggtacagttctttttattcattatcctccattttatcccaaaaaaagaagaaaaaaggcctctaataggaatctcaccttcaagaaagaagttgaagcaaatttctctcatatgagtgtgtatccatatgtattttaatttggactctgctgtcactgttggctccttttttttgttggggggggggggggggggagatttttctcttattcttttctgtgtaaaaatagcttagtattgttggtcacaaaagttagaatcagcattaggaggcttgatgtgaggcgtgttttggttaggaaaaacaacttagcattgtttgtgacaaaagctagaatcagcattagaggtttgatttgaggtgtggtttggtgatcaaactttagatttctgaaactggaagcaagaagctagaaacattgttgttgcccttgttagcaccatcccttagtgttgaagtcaacatcacccctgttggacaaaagggatggcaaaagactattctaaaagtgggcactgaaaattgagagaaaatggttgataaaagagtaattcagattgagtttgagagagagaaagagtttctgtgatagatgctgacagagaactggagaaagcaagtgaaaatttgagagatttatagcactttttcatagggtggttggtgtatactgcctgtgtatatagggtgtgccccgctttttaatagatgttcttttgtctatcagaaaaaaaatggaaagaaaagaaaattagagagatttagaatgtgttttagatattggaaaatatggtgattgaaaaaccatgaaggggatggaagaaaaatgcttgagagctgatcgctgttctagagaaagatattgaaaggattgtgaatatgtcattttaatattttggttactccataaccttgaatagctcgtggagcctttctgtttgcctttatagtttagggggtgaagtgccagctaccctataattgaaggggattttaggtaatctacagtttttttgtgtcatttatggatggaataatgtgattggaacgtgacatgcatttatgtgtttatgcatgtaatggatgggtagatggacctccatatggatgggtggatggattaatagccagatggatgtctctatatatgtgtttgcatgcatgtatttgtgcatgtgtacattttgccaattgtgaggtcaagatttagtatccatctactcagtatgaatttatccttcaataatatatgattgatatgttcagcctatatatatgttatatcattatatttagttagttaattgttgatgtaaacctttgtataatttgtgggtttgattttatcacattcgcaatattttttttatcaatcattaactgaagtgtattattgggttccaagagcatgaccttgcgggccatggtgccacttgcggcaatcgaaagctttatgtatggcatgcggaacccaaattatgatgattcacttgagaagctgtatatgggagacctcatttttttggaactggtttacttcttcaggtaatcgaa

SEQ ID NO: 13359 - DNA, 3739 bp, Vitis vinifera
  Intron number 1 from transcript GSVIVT01009734001 (locus G SVIVG01009734001) derived from phytozome v7.0 (chr-ID chr1 8; pos 10849923 to 10853661 reverse strand)
cctttcattcgccgcctccccgagttcaagttttggtaaccagactttacttctgtagaaacttacattgattattcatggttcttcttttattgcatgaacttccatttaattatttgttataatctgaaagtgtcaattttgtagcttagtttcaacaatgttgcagatctttgcacaagaattctatgctttatgctacttgaaatgtgttactaacttgttgtgctttcataatggctatattttctcttttcttcttttgcatttacattttatcttccttgctgtttcttaacttgccattggatgcatgaggagagccacaggagaagccaatgtcttagattggatggaatatgatactgataagaatgcatacttgtaatttatttggctaactggctctttgctcgctcctgtgcaatttatcaaggagtttttgtatgtgtactatgaaataaactacttgaattactccctgcatatgcactttggcttgataaacgaatttctgaatttagtggcctatggaggtttatgggttttaaactgcaatagcattaatttggggatccctcttttgtttatgtatatatatagagagagaggaaatacctgagatttctcaaatctttgatctcaaattcattgaccaatttctcttttaatttctgtatctcctctaagtcatctcctgtgactgatattgtcaacatagacaaaaagtatagccatcctcttttaagatgattgtttgatgaacaaagtaggggctcccttgctttgctggtatccaaatttgacaagagattgaacaaatccttcaaatcatgcccttgaagattgtttccacccatataatgattttttcagcttacatatctttccattgttgaagtggccagtctagtttgtgacaagagatagtaggattttgataaagttcatctttgcaacaggtgtaaaagtttcctgatagtcaatcctgtaggtttgtgtacacctgttaagtgctttccacaacaccgttagccttatatttgatggtatacacctacttacatccaattgggtgcttcccattaggcaaattaactatgtcccatgtgtcattattttattgagttttcattacttcatttatagcttccttccacttaggatcagcatgtacttcttgcatatttttgggaactgaactcgagatcaaatgagtggtgaaaaccttatattttctgtttatcctgtgataaaacacaacattggatagtttctatatatataaatcttttttgcctatcaaaaagaaaaaaaaaaacacaaaattgcaccgtggatgctgggtacaattcctaacaccagtttgaatgacgataggaatgtccaggtcagtattaaacacttgagtggtgttggaaggcctaaagagagtaggaccaggaggaatagaagacataccttcttctagagttgacgactgattgtgtatggagagagattgggccttgttctgacctagttcccaggcgttttcttgagtagagaagcagctctgaattacatttggcaggttgacgtatgacaccaatatctctctgcagctcaacccttatttcattttctccctctattttctcattttcccaagttggcattggcaaaggtacccaccaagcttgagattgatcttccaattgtcatttcttcccctgaggataaattttgtattcatataactgcttttcaaagaaattagcatccactgtaacaaacttttttttcaagaaggttggtgataatatttgtagcctttttgagttggatagtaccctaagaaaatacatttaatggctttatggtcaagtttagatgggtctttgcttgggatatgaataaaagcagtacagccaaaaaacttttcgagccagtgagatccaagacataatatatgagaaatatattgttccaaggttccaataggagtttttgagtcaaggacttttgaaggcattctatttactaagtaggctgccgcaaggatagcatctccctcaaattgtttagaattattcctagcaaacataagtgcccaagctacctttaacaaatgcctgttcttttgttctgtcaccccattttgttggggagtattaatacaagtaggttgatgaatagtacctttttgtgtgaagagcatgaagattctcattgaaatgctctcctctatatcagatctaatctgcttcacctgtgcacaaaattgattttaggtcattgtttaaaaatatttgagagtgggaatgatttcagatttttcctttagtgggtatacccatgtaatcctattgaagtcataaataaaactaataaaccatctagcttcaaagggacaagttatccatgagggtccccaaacatcagtatgaatactagagaatggactttcacctttttattacttaaaggatagggaacacaatgactttttgccgactcacatacttcacaattgagtttagaatgattaaaattgatgctcagtttaggatataacttttgtaagtgaaagaagcttaggtttcctaatatcttatgctttagccaatattcttcttctgcaattaaaaatgaaatgttaaactacagttataacaaagtataaaaatcttcccacaccactaggctaacttagtagttaaaaatggaatactaaactactattataataaataagtaaatttaattatcttgttgttaaatttcatttaatttgttgaaaatataaaaactttcgtgataattttcttaatgattttttatatcttttctataataattagatacaagacaaatataaacttataaacaaaaaaataactattcatgcatattttctttttatatcatcgaatacatccaaattaaatagatcatcatttagtactaaatgtgttttcaacttccatgttattgtctaatgtttctaataaataaaagaactatttaaagtattatctttgagtgatagaaaatggcataatttttttttgataagtaatagctaatgcataaatggtcatgaaaattttttaaagcatcattatctaataaaagacatggttctatatggtagtggaattgggttgatttgttaggcaagttttggagttgatggcagttttcttcaatatgttttgatcttttttggtacttatgaaatcataatcacttgcccttcttttgagattttttctgagtttcaataagatggaactattctctggtttattacacataatgtaatgaactaatgaatctctaccttggtcattattacacataatgtgatgaactaatgcatctctatcttcattataattagttattcattttgttattttgtttctttggttcaagagttatctgatcctattttcaagttcacacaagttcttacagcttcagaaggagatatttctatcaactaaacatgaacttattcgtctgagctcagacaatttaggatcgctttccgacaaaaagctctcaaaacttgtgtggttagggagattaattgatgaaaagggtgttagcccaacaaaggggagggggggaaggatagcttctgttgttgttgatatgattcatgtaagataatctgtgcacaaaaataagctgttccctttttttcatggtttcaggtattccattaccaaagctttctgtgtggcctttc

SEQ ID NO: 13360 - DNA, 4238 bp, Vitis vinifera
  Intron number 1 from transcript GSVIVT01017497001 (locus G SVIVG01017497001) derived from phytozome v7.0 (chr-ID chr9 ; pos 9478843 to 9483080 reverse strand)
aaattccctcttctggtacgcctttctgcttcttttccctcatattggatagactttcctttcctcgttcattttcttgtatgggtgtgtttaaatctgtttcttttctgaatgtttgaacttttcactttgttttttttcatttttttgtatttgttttgtagttctggttattgttacagcttataattgttgtgtgaatgtatagttcttgattctcttttcttttctttctaatagtccttgagaaaatggaggaaaaaaaagagaaaaagaacagagaatttcaaatgtcatgctttctattgtttttgtttcttcgaatgggaaatactcagctctactaagtcaaggaattatgtgaggccccgtagaacagaggatttctgttttctaagttccaaattgacaaataacttcaatgcataatttgatgaataactggatttatttttcccgtgcaattgtttggtacatgtattcctaaagcatatcattaataacggcaatgcaattggaacaattcactgaatggttgccccctttgttctagaggtagcttggattttgtggtgtaagtattagtatgttcctaaccatgtatttgggccttcctctatgtctctttgtcataaatggtggggcattcaatagctgagaggtgtcaaaagaaaatctaggtgcccaagaaagggcagtgattgattctcaatgtgtgccccctgcttgattgcatgtactttctctttcttgtctctttattaaggagaggattgagtgggctggggaaggagaagagtcttaatcattgcttgtgggtggaacagaatctgctctgaagttgtgtgagggcctctagttgaacttatctcacttatggattcaaaagtaagaggtagtgtgatgggatgtggagaaagcgattgtgctgaaatatggtacttaaataagttgatgtcatttaggagtatatactaatttgctaccttttttatgaaggcaatcaagtctctgagctggaatggagtgaggatgagtccaggttggtatatggtatggagagatcttctttagttttgcagttagactatccaggcttttataggtgtgatctgggacatgggtgctagagtgagatgatcaaaacttccatagtgcactttggaacatgggtgctagagcttctcactaggaagcccactgaactttgctattttttagaggaaatgatggggcagaagctttatgttcttaatctcaatctcaatctcaatctcaatctcctgagtttgtatagaaggtgatccttctgcaagtttactcctttttttctcttgttaccattctgttaatttttaaaagtcaaatctttctccttatcttttgtggatttttaaatgacatttttatttgcaatacttttttgtaatctccagctatgtctgaggttgcctctttattcatgtgtgtaaaatttttattgccaataggtttaacttgagaaatttatccaactccacatggtttctgttgtaattgttatcagaactcgtgaatattctacctatccactttccctgttctgcaaccacttgggcttgagccctggtcaggtttttgttgcttgggatacacccaatacctttatgagatggttttgcaggcctaacaatttaagaccacagtttgttgttgcagcatttccaaaataaatttatgattcaaagctatgtcactatttaggttggaaaaaaattcctttcaactttgcaagctgttaatactttgattttgagaaggatgttgtatgccatacttgtatgcattttccgtttttcacttatatgcattttcggaaaaaagaattcctttcacctttgcaagtgtcagaagagtgcctggaaaacatcttcagatattcacttgtgttcaaattattctcaaataagaaattttaaaattgcactccactacattttttcactgggcaagagctaaggattagaagagcttagaatgtggagagctttagagagctgaaatcactatggagttccataggtcagtactgatgtagctttctctcaaatgagaaagcactcaagcatttttgtcatgtacaccatattcgaccttgacaggatgagtacagttgaagtacaggttttagtgcccaaaatgcagtctccatcttcacaaattattgtttagattggctctatatctttttggagaagcttcaaagagacttcctttgggggggaggagagctccaaagtgggcctcacctagtgaattggttaatagttggcttggacaaaaagaatggatgattgggtattagaaagctataaactctgaatttgacccttctagggaaatgatgtttgagatttactttagagaacaatctcttttgattgcagggaagtacaaaaaggaagaggggggatggtgttccagagcttcgagtgaaggttattgggtgggcctttggaaggtgatacgaaggtggaaggagtcctacaatagagttagttttaggataggagatggtaagaggatgaagttttggatggataggtggtgtagggaggataccctggttgtggctttcccaaagttgttttctatagccactgataaagaagcttgagtggaccaagtgtgtgaccaggttggggaagtgggatgttggaatctagtgttcattagatagataaatgattgagaattgggagaggtggaagagttgctcagaaggttgcaagggcaagtgatcagaagaggtgttgaggatgtcatgacttagcggttatcaaagggatgcaattttatagttaaatcctttcactcctccttagcaggtcaccctttgaaaggattccccacaggttttgtgtggaacccttgggtctcattgagaatcaacttttctctttttcttgggaagcagtttgggaagaaaattcttactcaagattaattaaaaaggaggggtttgtgtctcccaagtagatgctatttgtgcaaaggtgaagaggagtcggcaaaccatatcctccttcattgtcctaaggcaatcaagctatgacatctaatctttgctctttttgatgtacaatgggtcatgcctttctcaatcaaggatgccctccttagttggcggggtgcctttattgggaagaaaagaaagaaggcatggaaagctgctcctttgtgcttattttggacgatatggaagaagagaaaccgaagggcctttgaagattctgatttgatgggctgtgctattttatgaccctttttgtacatgttcttggagtgggttagggtgcaatttagggatatcacattgtcttgatttgacttcattgattggttgggttgtaagtgaggtgagggagttgttttttgtgtatccctcccttttttggacttgtacacattgtgtatacttttgggcactttgaatacaaattatttgcttttacctatcaaaagaaaaaaaggtaatatattctcccatccatccctataatccagaaaagccttacattaggatcaaggatgaaatctgtttaagtgttatttcccaagaatatcaattaggagaaggaaatgctattgaaccaggcttcccatgataaattgtaaaatttcttgcttctaggtattacctgtttgttgtagaagcaccgcattaactttcggtgagcttgtttttatcatttgataccatcatgtacttctgaatcctgtaccaccatccaacattggaacatggagcatccaaatttctaatcagtggtgtatgattattatgaacttctgttctaattagtccaattgaatatgggttaaagatctaaaatcagtagtgcacattgtcaaatgtagttgaatggaaaactctgttagttaagacaatgcttaagaaaataagtagtttatattgccaaaagcaggacttgctataaggtatagatttaatgtttgccataaatcatgctattatgaaaactagatttagtgcaatattagaaaaaagggggaaattctgatggtctgatggacacttcctgtcgattttaaggggctattactcattgaactttactaggataatgctacttatagttcttgttgatgcaatcattgcagtattttatcaatgaatagatggtccaatgttttggtcggtaggttaagatttggcttttcgggtgttataggag

SEQ ID NO: 13361 - DNA, 2360 bp, Vitis vinifera
  Intron number 27 from transcript GSVIVT01036645001 (locus GSVIVG01036645001) derived from phytozome v7.0 (chr-ID chr 13; pos 19671580 to 19673939 reverse strand)
aggttagttcttttatttacattcttttagactacttgattagttcttgtggtcatattcttgatgaactgtgggcatctgaaaccgatgagatcccctggtttagagggattttcaagtataccatgccaattcctattgatggtagtctaatttaggattgacctccaaaaatacactataatattctcctattgtcattttgtctaacagttaagcatacaaacaatttacctatagtagttgatatgaagatactgttttaattcgctcttaaggaagttgggaagaagcaatatatgctgaaagtaccagctgttggaaatttaacttggcaacttactgtggtgaacttgttctccatgtgttaacttcctgttgaagttcttcatgtccctttggactcatccaatgatgaggcaaatttcacaactaagaggtcaagttgttcctcggtgaaaggaggcttttctaatgttgatgcagtgttcaccttttcctcagtagctccttttatccctatcaatgcggtgccctgaaatgctttattgctattccccttttgtccattctaaggttttccatgctacttcgagcacttctctcttgtgtgccttggtttcttacaatagtcacaccataaatcatctttatctccactccctcttagtgcaggcttgactgaactatttggagtactatcatggacattcaaaaaataaccccttaaatcaagctgtataatcccctaaatcaagctgcaatattccaacactgtcatcttggtcctcttgttttccagaagatcaaagtactcaaagattctctgacttcatttaaccagtctcgaacttcctcttgttctgctgttagactcttccacctaattttctatgggagcttgccactgcctaaatatttctaagcaggctggccttttcaatttccatgtgtcacccccattttctccttgtggtcagttcaggaggacaaaattccaaaattgctctaacctagcacatgactaagaaatctgctgttgagtttgtcgactgttctgtcatagccatgtttgctatctgaggtgcctctagattctcctgatttcattttgagttgctttgcacccagccatagatcagcaataccaacaggtctgaagaagctgtctctggtgcctcttaaagcaaaatagagaacgatctacttatagtagtaaaaaaaaaaaaatactgttactactcctatctacttgtagagaagatctctaaaggagggcctaggaaaagctccatgctaaaagaaagagggatctagcaaggaagtttattaagacaccaatattttcttactgaccaaaaaaacagggggttctgctgactaaagccccatttgctgccacatttgggctatcactttttgagtgttaaaagtagtttacactgtgtttggttgcacattaaagcaacttaaaatagaagagaattagggcttaagagctattttcaagcaatggaggctaggtgctttttgagaacagcaaagaacaggtttcaatttgttgtcccttttgtaatgtctttgtttagatctcacagttatatctattaatgaactttttcttttctgacacctagtattctacagccttcactccagaggaagggggaaaaagaaaaatgaaaaaaaaaactattcataaaacctagtctttcactcacatttagtcacaatgactctctagtttcctgggctccataagatctaaaactaaagaatcccgtttgggctaattaagaaaatattctggtgatatatatttaatacatgtacaagaatacattttatagattacaaaagaatagataaggaaaaaatagataggaaaaaatctctactgctatacatatatttacagcaagaaaatatctctacagctatacaaatatttacagccaacacctaggataacagctcctaggatctcctgagatttccatcaaaaactgttgtcaaatgctgaatagtttgcatcaaacacattctcagtttgagcaagatatatttggcaatgcgtcgaatcttggcatatacatgcacaaccctttagccaggatattgagatctactaaaaaaaaaattgattcttgttgtaacaagcgcactcacaaaggaaagaaacgaaaagaaagcatttaaaccatgcacaatgatccaggattgttttggtggctgaagaacaaatagtttactgtttagcattcttcctatatatgcatttttctgataggatatgaatgacatagactgtttaattggttgcagactcgagaattgatcgaagacttgaaatctgcaag

SEQ ID NO: 13362 - DNA, 7227 bp, Vitis vinifera
  Intron number 2 from transcript GSVIVT01029794001 (locus G SVIVG01029794001) derived from phytozome v7.0 (chr-ID chr1 2; pos 14753734 to 14760960)
gaactgaaaactcaataccggtttgcactatttcactacttcacttccactttgaatgctaagatttgtactttgtttgcacatggtttaatgtttagcatataagcgcatcattttcttagttattttatttaatgatgttattggagtcaaccgatattggaactagtgatgcacaagtagcttcagcaacataaatgaatggaagtagaagatatgagcgaaggaaatttaaggctgcagtgtatgaaattcttgactagcatgctgctgctttctggatttggtggtattttttggctggttggattggaagcttaggttggagtatgaagcccatcatttcagatagcataaaaactgatttttgggtagaactgaaacagctgcttttggacttctgttgtagttttcaaacaactttattttgcaattccatcattgaaatagtgggaaaaattgtattttaagcccctaaaagtttgtttttatagtgataaataagcaattttgctaggaaaacaaaataagcaattttgtttttggaaaaagaaaaaaagttcataaatatgtaaattgcttcgagttctcgagaagacaacatatttaatgatgtgaaaaagaaaaattgctaataaggttataaactaaatgggatatccaacatatactcatttctgtttctttctaataaatgtttcctgctcctaatttaaagggtggggctaaaggatctctccttttgcaattcctttggaaccattaaagaactctattagagacttagtaatccttgacattatgaatgttttagttcgatcccactcatttttctctaaaactcattcaagagagaagaccacatagaagagaaaacctagctgacacggttatatctgtttctgatatccaacccacaaatcacccctttccctcattcctcaacaccacattcattcaagacatcaagaatttatctgtctttaacaaaagcattttagaaatcagttttgctatcaccctgctctattgctgagttaaaatgatcaaaattagtttgtatgtatcccctaacaaactaacaggcctatactttctatgctctctatacaacttttcttaggaacaagcaaaatgaaaacattgcacttggacttttctcaaattcctgtgttatttgaaaaatatttaaaatcttcataacttcttctttgattttttttctttgataggtaagattttcttataggtctctgtcaggactcaacttggaatcttccatatctccactccaatcctttgtcacatgtatcagagctcaagggcttctaacctcctctatgaatgcactttgttgccaattaaaaataaaataaaattatagagccttcaagcacttgtgccatatcatttcctagttttttgaaagttgtcaccacctccttattgtagtctctcaggactagctttctcatttgcatcaatactatcaaacaccatgcatctccactctaaagtttcaaacaaaccatggacatgctataaattcattatttatgccttcttttgttctcaattctccatcaatttttagtcttccagtgtggttgttcttttgataagcaatagttgtctgtggaaaaactttgtatttggatccctttccttaagcccaagcactttagatttttgctaccaactaatttctcttgtttcggccaatttgtggcattcttattcatttctctctcctacccattctataatcaaacccctaaccatctctccatgtgctgcttctttattttttctagagctctagcctttttcactatagtattaccaatcacttctatattctattttgaagtttgctttcaaagcttttaatttctttgtaaatattggaagaagagttatggaaaaattctttttgtactcttcttacttatatttttatgaattaaataaaaacttaactaaacaagttatcaaaaatgagaaaagcaaatctaaataataaaacatgtctatgtgatttcttgccctttaattaccttatggcttgttgcttttggtagtccttacatttagtttttgtttgtgggaggattcctcatccttctattgtacttcttagttcctaattcaatatatcacattgttgtttctcataaaaaaaaaaaaagttacttttatggatctcccttgaagctctttttttattttattttatccttttccttgctcttgtttgatacttgaacagtggtttgaaatggttattaaaggcttttggagttttaggggacaaaactccagaaaattaaagctcttggttttaaggtaaaatcttgggtgatttcaaagtaagtctctatttttatgatagagatttttctttaaattccctttctccttttttgggttgaaagatatgtatttgtcggaaaagttcaaggcccatttggtagagggaatgaaaataaatttctgaaatttatttttttccattttcgaaaatgaaagccatgaacattttaaagaacttgtagtttttggaccatcttttattgttgaagcactagtttctttgaaaatgcagaaaacaaaattttgatgcttcatgaaaacaaccatgaaatcaatgatataacccattttcaagaatttagttgtatgatcgtttttggaaacatgctaccaaacagtcgcccacttctcatcttgaatggtctttgccttccttccaccatttgggttcaatctagttaccctagctataacctttgtaaatgactttgtcttagtgtctgtctcatgttggtagttcaaatttcgaaggtgtggaggtccctttaaattttcctagccaagagttaaagggtgtctctttccataggtcaccacctacctaccctagtgagtctcattccacaattagagatcaacctctagaatccatcccctttacattggaatgttttctcatagagggtctcacacctagtaaagtggccaatgtgcagttagttttgccaaccatgagaatgttaaatattatgagaatgtcatccaaaagggcaatagcagggtgcattctatgtagaagctctattttagaaggtaggttagatctttatttggaattttgcgtgattcttaggagctaattttgaggttgtcctgaccttaattgtaaatatgatcatggattggaatattagaggcctaggttctagaataaaaataagagtcattagggattttctttgttgtgaaaccaagacattgtgatgcttcaggaaacaaagagggagacatgtgatagtaggctcatgggtagagtttggagtgtgtgtcaagttgaaggatggaaatgtcatagattcatgaaaaaattacaagttgtcaaatcaaaattcaaagaatggaataagcatctttcggaaattcaaaggagaaaaagaaaatttacaaccattgttagcattgatgccaataagcagaaagggattttactcctaagcttttgccaatgagggcctcaaggaaaggggagttaggatttattgttaaaggaagtgcggtgcattaaagcaaaaaggtagggttagatggataaaagaatgggatttcaactgttaaatattttcatagggtggccaattttaagcttaatagaaaattcataaagtccttggcgtctgatgaggagggggttatccttggtaacattgaaaacatttcagaggagataatgcattcttttagaaagctatattcaaagtccttggtgattcttggaggttagaaggattgaattggtcatctattttagtagagagtgttatatggctagactgcctctttttagaggaggagctttgcaatgttgttttttagttagacaaggaaaaggctctagggcctgatggattcatcattgcagtctttcaagagtgttacaatatgcttaagaaggatctactaagggtgttcttagggtttcacaataacggggtaatagactaaaacacactaatgcttccttcattgttcttgtgtcaaaaaagaattcaaccaacaaaatctccaatttcaaacctataatcctattcactagtctatatatgatcatagctaacatccatttaaggtgcatttgaaaactcctccatcaaaccatcaacatctaccaaggagcaattgttaaggggaggtggattttagattttgttttgattgctcatgaagtggtggatgagaaaaggtgtttagaagaggaaggggtagtcttcaaaattgattttaaaaaagcctatgacagtgtggatttgggttttttggaccatgtacaagagataaatgggtttagtgcacgatgtaggtcttggatgaggggttgcttgtccttgacaagttttactattttggtaaatgaaaatgccaaaggatgggtcaaggtatctagaggtttaagacaagaaaatcctctttctccattcctttttaccattgcagttggtgtcttaaataggataatgttgagagcggaggagagtgatttgtcagaaggtttgctagtgggaaggaataggactagagtgtttcatctacaattcatagatgaaaccatttttttctgtagagcttctatggaaggtttgcaaaacctcaagttaacattattggtttttaggcaaatattaaggcttaagatcaatttagataagagcattctttctggtatcaatacaaatcaggatttgatttccaggttggctttgatacttaaatgtgaagttttaaactaacctttaacttacctgggtttgccattaggggggaatttgaaggcaaacatattttgggatccaataattgatagaatctcgaggagattggatgggtggaaaaaagccacttgtcattagggtgtagaataactctaattaagtcatgcttagctcacattcctagctattcttatctcttttcaagattccaacattagtagctttaaggattgaaaaattgtaaagagatttctttgatcagaagttgggaaggataaaaaggatcatcttctcggttgggacctagtgcataggcttaaggagtttagaggtttggggcttgggaatatttctttgaggaatcgtgctctcttagggaagtggctttggaggttcctagggaaactttttccctttagcatcaggttatttcgagcattcatgggacacatattactggatgagatgccaacattttagtcagatcgtctcattggtgccctttggaaggccatcacacatgttttccatgatttttatacatatgctcgctttatggtaggtgatggggcgaacatgtgttctttagaagattatagtgggttggggtggtggggggggtcaactattgtgtttgcaattttcaagtctttacaaaattatcataatttaaaatctcactatataagctatccttggtaactctttttttttttctttttcttggtgctgtatcttttgtcgtaaccttattgatatggagattgagggcctagaaagactcatgtcttcactcacttgtgtgcacttatctccatccgtccccgattagatagcttggtctttatcctcttcaggcttttcttagtaaaatctttctttatgactttgtccaatatacaagatctagttgcttgacttgtggtgcacaagaaggtaaatgtcaatgaaatgttataattgacaaggcctcccaaattccttaattttgactactgcatcttgtgtatggggagtggagagattattgaccatttccttctacattgtccaataactctaaggctatggcatcaactattgtaataagtcaagatggattgggttctgcctaggagtatatgtgacatgatgatcatttcatataagggtttggggaactctattaaaggcaatatcctttgacaaatcacttgtctcactttgctttggattgtgtgatgggagataaatgttaacatctttgaggataagtggaggataatagaaatgttatgggatctactttatttctattcctttttttgggtcttttgtactgacacttttagaggcattcctctcaatgttattcaactcaactagcatttgaagtgtagatcaaaaagatttgcacaatgatgagaggagcctagtttgtgtttgaggagatgatatctatgtatattcttatgtggtttaaacctatttgtataagtcttcttgtacagtggtgaagtttagtcatattttggtaaggtttttgtgtttgttgggagtactcctcatcgttttaatgtactttttatctatagttagttcatcttttgtttttgatggaaaaaagaaacaattttcaattccatcatcatatagccacttggaacttttgtggtcacagatgtttttagaagttaaaatagtcaagaaagctgatattagaccttttttttttgtcacgttttgggcattaacaacccgcataccagtccaaggattgtacagaagggtctaaggatattgtgaagcactgtgaccaccagacagtcttttagattactctacagtccttggattcgttcaacctttattcagtatgggtagtatagatcaggtgcttcagttttctgtgaaatccacccctgcttttgttgctcataacttgcttaaattcttctccatagttggttaaatttttacctattttgaaaattggaaattctctaacaatggaagagatggcttgttaaaatttgtttcttgattttctgataagctcaattgaaattcagttgctccagtggtgcctttggcttattttaatccggtcttctcccatctcattaaaattgacaatctgcactttagcttgaattcttaatatgctcctaaatgtgatttggacatttagtcatttcaaattcaaggaactgatctagattttgactgagcaattcagttgctccagtggtctgtttggcttattttaatctgctcttctcccatctcattaaaattgacaatctgcactttgccttgaattcttttatgctccaaaatgtgatctgggaattctgtcatttcaaattcaaggaactgatctagattttcacttgatgttcttcattttgtagttaaaagacattgccccttcctcaaatttggaagc

SEQ ID NO: 13363 - DNA, 4843 bp, Vitis vinifera
  Intron number 6 from transcript GSVIVT01020159001 (locus G SVIVG01020159001) derived from phytozome v7.0 (chr-ID chr1 ; pos 9679453 to 9684295 reverse strand)
cctttcaaattcaaccaaaaattcgtccttccatagtagctaaatgctccctgtatttattctctcacaatctttcattctacagtggtctcttatagagtcattttctttgtttatttgctctcctaagcaagacgaagggaattcttcagagaatgcaggaagaaaacgattttctggggaggtaacaggcagaaataatatacaaagaatgcattgtcctgcacatttcagtacgtaggattttccctcctggtctgttaatgtaatggagggtgttgtaacatattttgaaactgaacctgcagaattcaggccccttaatgttattgcattgaaattaaagcttaagtttcacaacaggttgtatgattgtacagcatgcatttaggattaatattgaacactcaacaaagatcatattaaggcaatgtatacttatgtgaacactcaacataaataatatacaaagaatacttgtagactccttatgaatcggtatccgtaatctaacaagatagtgttatcacctattaagataattctcttaattctggagttacatatctcacttattatatgattaactgacatactttaacttcaaggaacatatatcaaattccactaaaggaattattgcgaccatcgatttcatgatcacatgtcctttagatcacctaagaggacaaactatctcaatcccatgagatatcataatacttttattgagaataactgtcagtaccgacctctatcaatcacccaatctagtgtgtatctcatacattagttttacgaccataggaaacctatcctaaagaccaagacaagttattcttctaattaagaggtagtacactatagtctctattggattgctaaaatctatgaattgattgtagacaacttatttactctcaagtaacccataacttgtatcctctatataattcataatgcacccaagttatgtgcgatataagatatatgtaatgaatgctcaaatcaatgttaatgaaagggataacaatgggacaatcgagtctgaccttgttatatcatgtcttgattttaggagttgaattctaacacatttagtgtaatgactcgcacctaaccatgtagatattgtttgttttgaatccaaagggaccttcacaactttaaaactcatctacaaggttaagaagagttcatacttatataacgtcaaaaactttcctttctatctaatttgggatgtcacaaacatcccctcctgtaagcacaacgaggacgttgtgtcccataagattgtagaaccaaacaaataaacactccctatgaccaatcaaatccttacccctatggtcaaacaaatccccacattgaggtcggggattggttttaataccatttgtaacgacccgcacccaaccatatagatattgtccgctttggacccaaagggatcctcacgactttaaaacgggtttacagagttaagaaaagttcatacttatttaatgctaaaaactttcctcactatccaatgtgaaatgtcacacttagccactattcttgctttgtatttttctacttttctttttacattattttttgccttgtatactcatcttactctaattgttttttttttttttttttcccgttttagaagagattttagatcttatatgtcatcctttcttattgtttttatttcctcgtccataacatctttccatctttggtctttaattggttcttcaaaatctattggttcataatttgtagaaagacaaaagaggataagatcattttgattttctattacctcataaatttcttataaacttctaaaacataatgtcctttcacttagcttttcgataaagatgacgttgttggaatttcaagagttgatagaatggttatgaaagtggaattcttcttcctaaagatgagtatcatagttactttcttgagcattacaatcacattcttcttcatcattaaatttaacatctctacttataatgatctttctattgttaacctttggagcttgagttataactaatgaaaatatatttttcactcttatcaactaattttgattgcttttgattctacacatgagcatatgcaaaccttccaaatactctctaatgtgaaatacccgactttcttccattccaagcttgttatagtgttttatttgatacatatcaattgggagaataatttgacaaataaagcacataatcagccactccgacccaaaattctttaggcatattcttattttttaatatattttgaaccatgtcaagaatagttctatttttttttttcaaatacaccattttgttatggagaatatgaaaccattaaaggccaacaaatcccatgattttcaaaatatttttcaaattctttttatgtgaatttgtctcctctatcttatctcattgcttttatataatggtcactttcattttctacaagtactttaaatttcttaaaaggactaagtccttcatatttttctttcaaaaaatacaccaagtttttctactaaaatcatcaatgaaaagaaaaatatattcattcttacccacacacacacagagagagagagagagagagagagagagagagagagagagagagagagagagagagagagagagagagagagagagagagagagagagagagagagagagagagagagagagagagagagagagagagataaatatatatatatatatatatatatatagaggcttctttcctcttgtaattttaagatgttcaaattaagatgaataattttagacattaagatttgaataattcattcttacccaagtttgatatctcacatatatatgaataattttaattatccaaaattaagatgttcaaatcttaagtgttgaattcaagaggaatcattgacaagtttttagacatttttacaacattattttgaatgtttaaataaaacattctacttcttgtcatagacacattaacaattaaattggcatgttgatatcttattgagagattttgattttttatatgaatatcacaatatttttctaaaagttgactcaaacttaatgtattatttttcatgtttgacataaagtagacacttgagataaattgatgtcttttatttttaaaatgaattaggcttttacctttgctttttattggaatcttagatgcatctccaaattaagtaacatgaccattcttcaattcatctagttccacaaatatgtttttgaaactacacatgtgattgcttgcttcgatgttaagataccatgcgtttttctcctcttttatatgtcaataatacgacaagtttcttcttgatctttttttcaatatagttggcttgtccttccatatcgttagtggaattgctacatttataagcataatgatcattttttttttataattataacatttcaagaaaagtaactaaaaccttaaattaaatccctattgaaatagttgataaatcaaatagaaatttgaggtaaatgaaaagatttaattttcaattactttttaggattgtgatgacaatttcaaaaatgactactcttatgtcaagtaattaaaatctttaactaaatgaaaagattaaattcttatttaaattgattattaatatggaaaaaattaaaatttgaattaccttttaggcttatgatagtaatttcatgaatgacttgagttatgtcaagtaattaaaactctaattaaatgaaaaagattaaattgtcatttaagttgattattagtattgaaaagattaaattctcatttaaattgattattagtattgaaaaaattaaattttgaattaccttttaggtttgtaatgataatttcatgaatggtttatgttatgtcaagtaattaaaactctaactaaatgaaaattgatatttaagttgattattagtatgataaaggtatttttgaaaaaaagaaaaaaaagaaaaaaaagaaagtgacaaagagtttgtacctttataggtaatatttaaattctcatttaatttgattattagtatagaaaaaaaactaaaattcgaattaccttttaagttgattattagtatgataaaggtatttttgaaaaaaaaaaaggaaaaaagaaaaaagaaagtgataaacagctcatacttttatagataatatttaaatttccatttaagttgattattagtatagaaaaaaaaataaaatttgaattacttttaggcttgtgatgataatttaggaatggtttttgttatttctagtaattaaaatcataactaaatgaaaagattaaattcctaaggatatttttggaaataagaaattaaaaagtagtatagattttctcaaaagaattaggaaaaaaacaatgcttttcccctctaatctctttttagctctaaagaaacaaagtgggataagaaagagagaaaatgatgggggaaaaggaagaaaaagtaaggggagtgagggctgtagagttatgagaggtgaaaaaaatggtgagtgagaaaataactacagttagtgaaccgtcccatcatccaatacaataacggaagggtaataggctaatagtatccgaactctcatctttgactgggtgtaaaatcgccttttcagaaagtcttgaaaagggaagtatgcttaatttaactccttagccattattttatccttcttaaccaaatattagagtaacagaaatttacggcgcagcctttctgagcagacataaaatcttagtttgcggggttcactttcatagatctcagcc

SEQ ID NO: 13364 - DNA, 7898 bp, Vitis vinifera
  Intron number 1 from transcript GSVIVT01009685001 (locus G SVIVG01009685001) derived from phytozome v7.0 (chr-ID chr1 8; pos 10469758 to 10477655 reverse strand)
atctgtgcttagtgtccaacaaccacataaaggatgttgatgagaaatatgaattttgaaagtttacaatcaacactaatgtgaatgttaataataatttatacaaattatattgaaataattccatctgatatgcaacatttgaggatgaaggaacatcataaaaaatatatatatatgataaaataaatgataacaagttaatgatagaattcccattgataacaaatatgatgttattttttttgtctgctaaattttttggaaaaatgataaaaatggtatagacatcctaatatttcattcccattacccgtgagacaagaaatttcatggaaattctactgaaactttcaaccttgattggaaggtggtcagagcaaccactacttatctttttcccttttttttctttttggatttttaaatagggctttaatatatatataacctgaaaattgagagatcgaaatcagagaacacggagtgaatagttgttaagaaattttcagcctaaattcattatttttaattccttaacagtctcatttaatttattaatatatatacatatttatgtaactagtttcttttattatttcatttgtattaattagttatttgaatatatacgttgatattgtttatattgtgcatgacttaaatgtattagaagttgaacaaaatatacaagaagttaaagagttttttataagatgataaattgttcatagtcggttcatagatattacggtgatggaaactttgatgcaaaaatcgttaatcaagaatacaaaaataaaacaataacacatacggtacacaaggttttgacgtggtttgattaaccatgcctatgtccacggatgagagaaaatcattttactatataatagaggacataatcagatacaactattaggttatcaaaatatcttatgtttcctcactcttcatatccctaccctaccatgagctctctctaccttaccacgagctctcttgctccatcgggtacctcctgtccttcctcacatctctattcactttgtataatctttataagttcatctttatttcattaacttttttcctcatgacctaggatatttatagggatatttccaacaacattccttattctataaggaagtttaatattttaatctaaaaatattttatataattttttttttataaaaaaaggaatctatgctaattaggaatttgaaatacttcctagcaatacatcagttttttagacaatttagttgagattatagtgtattattacctcttagcatccacatacatcagttttttgttttaaggtgtcatgagcatcgacaaggatgaaaaaaatcacaaaacattgatggtatttcatcaaaatttcatatttcagttgttaccaaagcaaaacaccggcaatgatggcaatatttcgttaaaatatcgtatttcaatggttaccaaagcaaaacactaacaatgatgaatttttttttttggcgattttccattgaaattttgaatttcaattgtcattaaagcgaaacagtgtggagaaatattgatttggtgatctttcaatacttatcaatttttttatcaatttttattataggggattgtagctagagggattcaaacccaagcaaaaggttcacatagaatattgggtgactactggggcaagtttgctttcaattatatgtatatatgctcaagttcatcataaacattaaatattaaaagaatattttattaaataaattaattctaattatttatttttaaatttcatttaattgattaataaaaataaaaaaattgtcatgataattttcatgtcttttttttatatcatttatatattagttaaaaataaaaaatataaatattaaaaaaaaaaatacttatatcatcatttattttatattattaaatatatttgaattaaatgaatcataattttaatattaaatatattataatcaaatttcacaatattattattgaataatatataatataacttaataatgaatgtatactaacaaaaattcatattttttttattgaatataacaaattatatatacatatatctatatgtatatatacatatcattcttttcaacataacaacttcaaaatgtttattattactttttatgtcattttttaaaagtttttctcaacattttcatgagttttgatcaattttcactccatcgatacttttcaatatatttcaatatatctataaaattgagttatcgatatatttgtcaaaactaatattttcattcttaggcactgacttgaccttgaggtgtttaaggttatatcaatcctgttagcccaaggattctcctaatctcgttttgatgataacaaatcatgattaagttactaatttgtttgaattataaagaatttcaggtgttagtttgaaaattcatcaaatgacccaatgtatgcaagatcaagatatatgaaagaccctttaatcataggaaacatatataagttgaatgcatgagtgcatttaggattttcatatcctttcatgcatctttaaaaacgcagtttatgaattaaagttacatttccattaaaaccagagttttatcaaatgaacctcaagcaaatcacttcaaaattgacatattcatttacctaaagaccttacataagtgttagaagtgaaaaaaaaaaagaaaaaaaaagatagatttctagataaaaaatggtgaaccaattagggtaccggtcaattggttataccttcatggtcgaggtttgggttgagagctgcaaaaaatattttctctcttccagtagcctttcattcttagtcgatggctatatcttctcagtcgaggtctggttaaggcctaatagtcacctgacatgcatttattgccgaacggttagtcaactggtcaacccctaactcgatcagttaaggctgctttttggctcttgagactagaaattaataaattgagagttccatttctttatgaccaagagaacacctacatttatttgtttgcctacttgttcttgactcaaaagttctcattatttccttagtgcattaaatctccatttgcatattccttagtgcactcttgtgatttttcctaacatttaaattgtatttgaacccttgttgacctaggttgagagatttaaacttgttatttgagtgttaaaagctttaagtgagcaaaaactcgaagggattgtgtaagagcccattatagtcagaatctaaagtgtaaaagtgttgaaagcttagttgaagctttaagtataatggaaccctcatttgattaagagcttgaaaagagtggacgtaggcaagaggtgttgaactactacaaaatctgaatttgttttctttaactttatttattagagccaaaatatgtgctttaatggcatatatttgatatgatttgtccacctaaggacacttaaatcacccaacttaacctaaattgatgctaagactctagttatgagtttaacttatattttggagatttatctcaggttcaagggaagaaaatgatgcaagttgaatcactttagattttgaaagattaagaaagtgttaaatgcggaaataagtgagtcaagacttatgaaccatgaggaaagacaagatgaggatatcatgagtttggaagatgagaaatgaccattatggagtaaaaaagaaggtaagaaaacatgggaaatgaggcatgaagtaagatttagttgcatggaaatttagaactcaaaatttggtggtaagatatactctgactttgaggacaaatttggagtacttcccaaagtccattttagttgaactatatatcattttgaaactcgagaagtcaggagtccaacacttcaaacagtgtgcaaatcggagttgaaatgaagaagttatggtcattttaagacaattgcgcaaagtcaaatgaccaattcgaaatcgaacttatgaattcgaaatccaattcgaaatgaccccagtttcaaattcacccacttccactttgatgttttgcctcttctacctcaagaattgcatttaggacactccatccgccctaagtggaccccatatgactaaaaatcaccattttattattttttaatcatttttaggtaataatttgtaacaagtggccaatgagagtgtgccacatgttaagttattgatgatatcatataaactcttttagttttaggtttagatatcttagatcatctttcggagagtttgacattgaaggtggaagaatacgagaactttggtttgttttcttttcttctttattaaatatattgtttttagtttcttttgattcaaattatagatttttaccctattatggattgtgaatgtgacatcacccccatgagaggctaaaaatccaacttggggcttggagcatgaaaacctaagggttaaaacttataggaacaatgggtaaattattataacagtgagattaatcattggttggttgtcaattaattagggtagaattaccttttgacctcttttttaaaatcgtcccatgtgtcaatcgtgtatgtgcctttctccacattagtaacccttcgacaccaccatggaaaatagtgttgatgaggtaaagggttatggttcataccttggtgatgttacccattagtgttattgcctcaaagtatcattctatgtaccacaataaataatctaactccttagtatcccatttgccactaaagacatgtggctttgacacctccaccctaagtgcctcataagtagccatgattccgggcagaaaccgtagacttgtagatggctagctattcacgaatgtcttggtctttaaactttaatgtgtagccaaggtctctaccattgactccaagttagcaagcatgcccatcacattgtcttagaagtatataaactcattgtgtgatattggttgaacttgtgaagttagcacgccttctttgaggtcttggatttgttcccttaaatccttcaaagcctttctctatgctttgctcgatcaagttcataccttgagcatccgccatggttaactccaccttggctagccttgcctctatgctagtagtggcatcatgaaacttttccttcattcccttaccctatgtggtaagattagtctcccatccatgagtttgctcactagtcattttctcaatgttggagcttgacatgtttccattacttgttgtaaccatgctttgatatcacttgtcatggacttaggtgtttcctaagctcacgtgtggtacttaaataactcaagcctcgagttgttaagttaacctcaccccaatcttagttcataatactaagtaaagatatttgactgggaatttaggatgcacaacaaaggcaatacttgaaaaatgaaatcttttattgtattagaatactttacaatgtttgaaagctattaagtgcttagtcgggtttcttcctatttataggtacaagggaacaatctagagcccttaaggttccccacaaccctaaaattctctaaagaatgctatatacaagcctatatctaagctatatacgaatcttttgaaattctctagaattctttagagtttccaaaagctttctcctccactatgtgagctctaagggattatttaaaaatgtgtaaaaaaaattgaagtagagaaagtaattagaaatatgaaaacaaaggtcattgagtcattttcttttcctaaatattttctcaaaaagattaaagcaaatataaattagaaagataaaaacagatgacactaagtcctttttttttttcctaatattttcttcggaaccagatagaaaaagaattgatatttgatcgatcttcttacattcttctctatgatctatcgtgatctatcccattgaccatctttttagccttatttcttaaaattatgttaaaaaataagggttttagcgaaagaaagtaaaaaggggaataaggatggaaaagaagggcaatgaatttctttctttgcctatattttcacgaaaacaaataaaagagtagtatcttattggagttaaggttttagataattcaaacagttatttgaatcctaaaacctttccaacaaattctgctcaacatcttgttgataacaccagctatagagttcccaatgatgcaaactattatcctaaaacctctccactaaagtctctgacaacatattgcatcaaagaattcacattaggtttctattttatattttgaatattgtactttgttatctaaatgtaacaaaacacaaaaattatctataacaatagtatcttcttatgctctattcatcaaatattttcttatctttattttacagattttacattcttcacgctctctcctttcctcctcacaaccttatttccgtttccttggcctctctcttcctccctctcctttttcctttcccacttcacaactttgtttttaaaaaccgattcactttatgaccattatcaagaaagtgaacattgggtttggcccgccttaatttacccagatgatttttttatttttttttcattttgattaagtagatccatccatgtgtaactggttcagacaaaaaatttacatccgttcaacttttatttccatacttaaaataaaaaataaaaaaatcttaatatctaattcctgaaaattcactcagaaatcattaaaaaaaaatcattaaatttttttcttgtgtataaacacatttaatatttatataaattaaacatataattgaaaaatcatttatattttttacttctaaaaattctaaaggtagaagtatgttaaattgtaccttggttgttttgctcaaatagtgagccaggattgctgtatttaagttccataggatatgctctgaaggtttagtaggtcaggagggcaagataattggtttggtaatgaatccctagacgatgataatgcaaactgatcacgcggttcctcctttttcatgctcagcctcttctgtctccgtcctgacttctgagttaggcgaattgccccgttcttaatgattccatgccaatccacaaaaggcattttggcaacccgatcctcaactgtcaagtatgaaatggcataattgtttatcacgtttcattttcaacgtatttgttcgaaaaaaaaccaaaacgaaataagagacaaaaagagaatctgccacggcagccaccgagtaaaagcgaggaagtcaattggaagttgccttgggcatggtgggtccaactgtgactagtacggggtaggcttgtgtgcaagcccaatattttgagcccaaaaaggaaagacccatgatggacttgagactggagaacgccccaaaaccaacctccaccagtaccagttttttgtagtctactgtccacatctcattccaacttccaacggccacaacaaaaataccgccttcttttcacacgtcatcccacaacctaaccccgtcatccaaaaccacgtggcttccacgcggcactccagcgccagtggttttaagtcatatcgtcacgagtttctccactctcaacgatgcagatcaaaaagacgagtctagctaatccaccatttgcgataagtcaaaacgcctaaatcgcgtgctcagtccactacgagaaaatgagaaattagccttcccagggacaggtgtcagtcgtaggaagcaagtgccggtttcccttttgtgcgttttttttcttttttcttttcttatattaaattttttcctttttctatttttgatttgtttatctttcttcaccagactatttcagctctctgcctccgtggccgccaacg

SEQ ID NO: 13365 - DNA, 5335 bp, Vitis vinifera
  Intron number 5 from transcript GSVIVT01033462001 (locus G SVIVG01033462001) derived from phytozome v7.0 (chr-ID chr8 ; pos 20484541 to 20489875 reverse strand)
catgtgagatagccatccatatacctcctttcttatatactacacatttctactcattcagaattcatctttctttctctactactgtgatcattacacctataaaaaaattccattcccaatgattgattttatttatttattaataataggaaacaaacattttattgaaggatagcttgctacaaggacagacaggctatccttctaccaaattaatatgagcattacaaggcactttctattgggtttgcatgtggtaggaacaatattttacaattgctaatttcattcttgcctattaaagtgacattttgaatttataaaaaaaagcttttgtgtgagtgaagcactcactatttctttttccaaggtggattcataaaaataggggcctgattttggctgtctacccaccacaacccttttcctctctccaatccctgaactggtggtgtgaaagagctagcattaaagatgacaacttgacagagttgagttttaaagccatcattaagagaaatggaaagtgattaaatccaatgttttcaaatgggatggagggaagggaagatgcatttctcatgtccgttttacggatgaccttgctcttcatgggtcaaacttggaccagcttagaaaccttaggcatgtgttcctctattttatctagaaaagggaggtttcaatattcacaagcactttgttaagtagtatgttacatgttctcctatcctatttaggtatcagtgtgtaaaaagttgaaaaggcttgagcaagacttcctttgggggagaaaaaaagcttcaccttgttaattgggatgtggtatgtcttcccatgaagtcaaggagattgagttgtgaagcacttctagaaagatggcattgccattaagctattgaaaaggatggcttgtgaaggaaggttttgggtggaggatatgaggtgttaagaaaggtgattggtatatggctctagtgagggacatactagagagaaggatgatagaaatttattagaatattttgggacgatttctctatttttgtttttttacatagggagcatggtttacgggtgagggtttggcatgatatttggtgcaaatactgctctttcatttcaaaattattgaatctcttatcttttgtgtgataaagagattccaatagttagacctatgggaaaaaaaaataaaattccaatagttagaggacaacaaggggtgggtggttcctaacttcattagctaactgtcaccaattcccaacctacctaacttcttgtggaagaaggtgatcggggtgaagcatgggatggagggctgtggttggaaatctgaggaagctcgggggccctttggagtgggagtttggaaggaaattttgaaggagatgagctggtgctggaataacatgaagttcaaagtggggagggagactaagatcatgttctagactgatcattggtgcagcaacgaagcgctgtcccaagcgtttccccagatttttgccttggcagtgtgcagtaatgatttggtgaatgatgtgtgggactcaaggcttggccaaggagggtggaatctcagattggctagagattctaatgattgggagctggtgttaatagaagacttgctctttttgctaagggacatcagggtaaccctagaggaggactcagtgctttggaaaggagggattctgccaggtttcggatttgggtggcttacaatctgctggcagcccctaatcctcttgtttttccgggaaaaaatatttgggtggataaagtcccaaccaaagtagctttttttgcgtgggaggctacttggggaaaaatcctcacgttggataggttgcaaatgcgtgggtggcagcttccaaattgttgttttttgtgtggttgtgaagaggaaaatgtaaatcacattcttttacactgtacagtggttaggaccctttgggaaatcgcctttgccttatttggggttcagtgggtgtttccagagaaggtcaaagaggcgttgttctgttggcggggcccttttgtgggtaaaaaaaggaagaagatatggaagaccattccgctatgtattttttggacggtgtggaaggaaagaaataggttagcttttagagggggtcttttggctatttagactcttaagaactcttttgtttgtagtctatggagttgggctaagttgtataggggagaggaatcctcttcacttctaggcttcttggagtgggtagcggtcccctaagggctggtgaggtgttcctatttctatttttttggccttgtggctgctttgtatacctcctatatgcggtgcggcctttcgaccttctttaatatattttctgctctcgcttatcaaaaaaaaaaaaaaaaaaatatttcccctagcattccaatctccttaattccttttcaaatatggaagaacgatttttcttcttcctcttcttgttgacttatttctctccttcataacctctctatcggcatgcctaagaaattaccaaaagcaactagactgctatttggccaaacatccaaggtgctcctccactgcgacacaccttggaacataacaaccttttcccttgtcttcgtacccatcattcccttatgtgctttctccccatcaaaagaaaacctcaccacacccaccaaatcatcctcaacagggacttatccttgctctcagaaacatatccaaacctctttggcaggaggataaggctcaaagccttcccctctacactctcaacatcacacccaaaaaaaaaaaaaaacaaaaatgatggaaccctacacaccccccccccccccccccctcccctagagttcacagagcataaagagtttacctatgaatatggatgctttctccatgagtgccacattagagcattagaaaatagaggaccaacgacaacggagtagctgattcaaaggatgccatcctagaacaaatggaaccaaccaatggatgcccttgcatcatcctttgcatgtcgaagattggagcacctccgcttctcaaaccaagagacaaaaccaagccaacctccccttctacaagaacctttagaaccttgtagaagtttgaaatataatttagacttcctaagaatctttgtaattgctttttatcttttatatcatttgggaacttactagcaaattcaattgctctttcaattggaatgatggatcctctgtgaatatggtgtcctaagaatatgacctttgtttggaataattttaccttcttagctaagacaaaataaacctgcatttttaatcactcgaagaaacacattcggatgcttccaatgttgatcaatggagttagaaaatacaaggacatcatcaatataaataattgtaaaggatatatatgggttgaatgtcatttatgatattttaaaattctgatggaacattttttaaactgcatggcatcacatttcattaatcatgtccaagatccctctcctacattttattgaacagaaagtaagcatcctcagttcccccatttgaaggtctttcaaacctgtacaaacctcttattacaaaagacaatgtattttttttatatataggtaaagagaaagatttgttaaaaaagagatgccaaaaaagtgactcaaggtgtacaatatctatacacccaccgccaaaccggccaaaaaaggaaaaggaaacaaacacccaaacgggtctaaaacaaccttaactagagcccaaccaatcatcaagctatacaaaagaaaatttataatcattgagctatacccacaatgaattgactccctgaatgtgcctccaactttagcaaaccccattttcgttttattatccatgccaaatgcaccaactattggatctttataccctaaaaaacaagaaaagcttattcaaagcatccaattcttcatcaactttcttcaaacaaaataacctcactatcaaatccttccaacgagtgggcatgtaattcaaatttagactccaattcaatgaccttatcatcacaattggcaaaagtaagaaccaattctaatgtgaaaaaatccttcttgaacccaagagagtgctaaattggagcaattttctggtggcaacggccatgagggtggtgttggggctgaactggatggcagattgtggcgcagagcaacgttgatggtggcatggaggacttgggtttttccttcttcccaagttgttctagaataggaaaaatcatgtagatagatagagagaagattccatgcttttaattgattttgtagattgggtgaaattgggggggggaggagagcggtttttttgtgtgatctatctctatggcaaagctttttggtatcccattatatacttcacgtttacctttgtgtatagttcttctattgttattttaaaatctttttgcttatccaaaaaaaaggaggtgggtggtttttgtaaggaagctccttgttgggagttagtgaaggtgagagattttttgggaatggtccatgggatatgtcagggaaggatggattgagatgaacaattctaaatctggcagttctcagttggttcttcttcctattttttattgcctagtctaggattctaaatatgatatttttcttctctctttggacttctacctttgaagcctctgaagcacttccttgatcctccttttgctagattagaaccttgtcagtaagtccaggaggatacttaggcaggtataactggtgtgtagagatagtgattgtagtggtacagttatgagtgccttttcaatatttctggagaagatctggtcattcaggcaaagatcttatcacttttggtgggtcagtcataagcgaaagatttgaatttctaatttcttggtcaaaagggaatttggtaattgttagctcatgagtgtccaaagaagaaagagggctgtggaagtttgatcattggcttgccaaattattaatgtcacatgatttgcttttcaaggttgtcttctgcatgtgtttccttgcattataatttatccaaacaagttctaaactgtatgagtaagcctatttcttatttctgtctttaaaatttaggaaggcactatttacttattgtgagcttgaagactgcattctttgttgaacctttgcatgtatgaagctatgatgtgggatatgtatcttatatagtgaaaagcaagttttcagttttgaatttggatatgtacctgatatccttattttgctaatacacaatggcagggtgatcagaggtcccctggaattatacccctggc

SEQ ID NO: 13366 - DNA, 6038 bp, Vitis vinifera
  Intron number 3 from transcript GSVIVT01003214001 (locus G SVIVG01003214001) derived from phytozome v7.0 (chr-ID chr1 ; pos 13960497 to 13966534)
agttggacttctcaaactctagtattattggaaaggtgtgattttatttgcattggtattggtgattagcaaactgtactaataagttacattttgatatggtatattgcttagcttgaattttaaaatatggtgtgtaatccaatgttattcagttagagtttacttacaaaaagaaaattaaatggacaattaggaacatagaaattagaaggtacttgcacaagaatattgtgtgtagtgccttcgacaatttcttcacccaacaataagacttagtcagtatggacaagaatcacacttatgagaactatcatgaaagttgcaaacaccatgagcaccactacaacctagaaaactttggaggagccatgatagagccttgtattaaggacgacatcaatagttgagaataaacatgactaggagtagagagggtctcactagcaaaaatatgatctttaaagccatgcagatttgagtctaaactagataacaaggaaacaatcatgaactccttccaatattacttttagtgctccatgtcaacatgaagagccaatattattattattattattattattattattattattattattttgataagtgaaaagccaatattatatttaattaatcccacaaatttttaaggatattatagaactaagagagtgatttttaaaactgctttgtgctgaaggtttttttataactcataaacctaagagttattagtgatgaaaaaataatctcccttgtttcattacattctattttacaatacaactcataaacctaaactcaacttctatgcaaggtctagccactattgattgttttttacttctacaagtaactagattttctcctaagaaggtataatatccaatagttaaccttcaatcgacaattgattcagcccaatcaacatcactataagcttccaattccatatttcgtgtcttctaaaataggattcccttgcctggtggagactttaggtaatgtaggattctgactattgctttcatgtgagattcatatggtgaatgcatgaattggctcattacccctacaacatatgaaaataaattaatttctccactaatctttgataaaggccacagtctaccataccatcctctatttttcttcctagtttatgatttttctcaatcgaagtctctactggtttgcacccaagcatccctgtcttccttagcaaatcgaggatatatttctattgggaaataaatattcccctttttgaacgtgtcacttcaatcctaaagaaatattttagactccctagatccttgatctcaaattcattacacaaataagtttttagcttttgaatttccctctcatcattttcaataacaataatgtcatccacataaactatcaaggcaatcaacttacaaaaggagttgtgtttgataaatagtgtagtacccttggctttgatgatagttcatttttatcattgattatgtaaatctcccaaaccatgctcttagagattgtttaagtttatagagggacttcttaaacttgtagactttgttcttccaagccttgttaccaaacccaagtggagtgttcatgtatacctcttcttctgagttgtcctattttgttgtggggcatctacacatgaagattgatgcacaataccttcattttggagataggtaacaggattatagttgaagtattccctctcattatctaaccttaaggtatggattttggtaccaaattgggtataaagcaatttgtagaacattgggaaaatggaattaacttccgatttgaattttagaagatagatccaagtagtacaagtttgcaatcatcaatgaaggtaatgaaccatctagaacctgaaatttggaactctaaaagatcctcaaacatcaatatgtattaaactaaaaggagacgtttcctttttatttcttattggaaaaggcacataatggtgttttgcaagctcacaaacctcacaatgaaaatcatgggattttagttttgtcgaacaatgtgggaaacattttttttcagaagaaagaaaagtgggtgtcccaaccatttgtgccatagccatatttaatcaactttcgagggattgtttgtggtaacaagagcttgtgagatacaatcaccaatcttccaatgtgtattaaggtagtagagtccacctttcctctcaccatgtctaatcatcctccccgttatctagtcctgaaaaatgtgatgggaaaggaaaatgttacaaaacaattcaagtttatagtgattttgctaacaaacaaaagattacaaaagaagtttggaacgtgtaacacattttgcaaggttagaggaatgatgaaggctatataccttagccaattatggaagaaatagtgttatcagtaacctttacttttggctgacctgaaagtatcgtataattggaaaagaaattgtagtgacctatcatatggtcagtagcaccagaatcaaagattcaagtgctcaataaacaatcccttgaggcacttaaagctttgatattacctatttggatgaaagaacatgaggtactatttgcagtgggaatttggccatgtgtttaagcttgttgagaagtgttttcagcttttcatgatgctccttgttgagtaaaatagtttcttgttcaatagcagggatactttcatgagagacatcaatggtagcagcttgatgtgcctatccaaatcatatggctggttttcctcctctactgcacccccctttgcctcctaactaagccttgccatggaaatcgagcaagattcacttgtatgtcttggtttgtgataataattacaccaaagtgaatttttatcatctggtttccttccttctctttgggtgccattggcctaaaatttccaatagtagttagtactaaattttcttaagtatagcctccaagcatcacaacttgatgactttcttctccgatcatgtaggcataaatccccctaatggatgggagagtttctttccccaatatttatactcttacttgatctaattcaggattaagaccaaccaagaattaaaatactcccttgctacattatcttcttcaatctagtagtgtccacagcatctaccatttctatgtgctgataatgatctaattctagccataagctttgtagtttattgtaatattcagtcatagaccaacttccctgtttagtagcattaattttgacacttcaactcatatacatgtgccattattacaatctctttggtggtggagagaaacgagtatgtttggttaatcttcagctgcgtggagtgtagtagccaagacatgaccactgaattttcctcatcccataattcatagcttggatcattagagtcaggttctgatttggcacctatgacatagaccatcttccctttactttaaacaaaaagtttggttgaatgggaccatcgtaggaaattttggccatttgagttttttagtggtgaatggtagataaaggaggtaagttttggagtgtggagtgattgaagggtagggctatttcagaggatggtgaattttctctagtttcaaacattttagggaaatgacaacaaggttttgagttttttggagaaaacaagagatgtcctcaagggaattataatggggagctaaggtacctacaattaaggttggtttaaaaaagaatgaacaagttgcaacaatgaaggtttgtatgtgactgagcaatgaaggctccatggatcttgacagtgttagacttcctgctctaatactgtgatgaaaaaataatttctcatttttcattacattctgttttacaatttatatacaaaagaaaggttgacaagatctcttaaattaagctacctatcaaaaaaggatcccttaaatcaaacaatctgattgcaagggttccatatggaatttacccatattcttggtgctaaaatcatgggttaagactcatttgtaaattggttttgcacaaactaatcattagaggattagcctatgaaatcagcaattaatttctcctgccatattttttccttctttctttttttctttttttttttattcattttttcttttttttataaaaggaaaaaatatggcaggagaaattaattgctgattccttaggcttatcctctaacgattagtttgtgcaaaaccaatctacaaatgagtcttaaatcttcttagaggtaggtatcatataagatgatttaagactgatttgtagaccgtaaacttaagcactaaaccttaatattatgttgtagccatgacatagtcatcacatattacatcttcgtattctatagccttgcacataaagggcttatctttcaagtacttcagtttttgggcccagagaaaaatttgtgaagcatggacacaagttagatgattagcactatttaatctttttgatataaccaacttctttatgccatagtccttgagtggttgtaatttaccagcagctattaggaaaattttaaaccagaattatgaaaaacacaaaaaatcctccaatcttaaatattgagaaccagagtttgagagtgttaaaacttgaatcatccaaaaaattaaaatcaaaaaatcaaaaaaagactaacatcaaaaccaacgtgccctatgtttcacataaccaaaaaacatcaagaactgtctagacaacaaacagatttgttcaaacttcaagcaattcaaaaacaccaaaagcaagctgttgaagctctcttaaggcataaaaaactttcaaattcaataaatcagaaagccaacaacacttgagcccttcaaagcctacacacatcattcaggaagaatctaagaaggaacactaaacagccacaaattccaaagcagaaacatgagggatgaaattttgaaatttttgaggttttcttagtgattgtgatgtgttggggtggggtgggtagtttggtgtttggaatgatctattcaatctacagtcaactctagagatgattgatctctgatttcaatttagaagtaataacttgtaaaatagggttaagattaggataaagaagaaagaataggaagaaactgttaaaaggtttaaattcttctaatttgacttccctattccttcatatccatttatattattaactaagattaaatacaataactattaacatgaaaataacaaaattaaagaaattatgacaattcacaatgataacaaggaccattttttaaataattataatagaacacaagaaggatttttatgtctacaattttactgatatccaaaaatatgtatgatttttaatggcttcaatgcctcttactatgctaaaagtttctatgttctaatgtcggtaaattgttaggattaccttttaggattatatcacctttagccatggaaatcaaatgtgattttaacaattgtatgactcttgttgcctgtagttattgttaactagacatggattgttaacaatcacatggtgagatatttgacttcccacaaccaaacaaaacatatatttattttattttatttttataactgaggaaccttccatggccaagcccttaggactctccatggggacccaaacctcggggtactgatcgccccacaacaacaaccagacagacatataaatgacattgaaatgtaatgtctcattcattggattattataattcacatttattattaattttctcccaaattgttttgcattgttgggagctttatccattttctcccaattagtttcaaattgtttgtagggtgtggctttgactcattggttccatcaattaattttatgacccaaagttccatttctgcttcttagaatgtgatggttagcatacaaaatcttgttgtatctctcattcttttggcaagatgtaatcttaccaattatatcttatgctggtagggctcttttggtgagattttaaaggcctgttggcg

SEQ ID NO: 13367 - DNA, 2891 bp, Vitis vinifera
  Intron number 13 from transcript GSVIVT01038211001 (locus GSVIVG01038211001) derived from phytozome v7.0 (chr-ID chr 5; pos 24387684 to 24390574 reverse strand)
gccaaaattggtgatcgttggcgactacttgacaggtgtttaattgattatcatcatacttcacggtttattattctttggtgtatgtttttgtatgccaatttttctgttgtgaaaatggatgtagggatcttaggttagtaaatgatgtagtagtctcatgatagcctttcgatgagtatattttccttctgttcagactttccatggaccacttatatcataccaacctcaaaacaatgtaagagtactaattttgaaatggagagatgggtttgtaggttcaggtgatggtaacaattatagggttggaatttatgtttgggagtcaaggaaatcaaattgtaggtaaagtaaaactcaggctttcaagggtaggttgtattttggtttggtgattgacattgatggcatgtttggttatgaagtatttattttcatattctataattggctgtttggggatttcataaacctggttatctgaggatggtctgacagtgctcaaggtatagcctgttcagtaagcccaaaagatcaatgcagttgttcatcttatttagaaaaaccctactacaacatagaccaatgaaactaaggataacttagttatctcttttattagatagccggatgcagttgcacttggtccagtccacttgaggaaatggagaagtcctcaatgtaagaaaggataattttaactacctgccaaaatctagtcagctatgtaagaattcatttcttttcctgtgataattttcctagttccttaacttcagctttcatgttctgtttgtgcttggagtagttgttaaatgacacataagacgtgatgccaatcatatatatattgataggtaaaagagcaatatgttaataagcgcgacagcacaaagtgcacatgaagtatacaagtgcgcaacaaagcaaagaacaagaaaagggaaaacaaaaaatactccctccccttagttgttgcctaaccaattgacaaaatcaaacataggcatggacccaacctctaagacccttttgtccactctaaatagttacatataaataaggatttaagctcttgatctgattactcaacattttcaaagcccttctatttctctttccaaatatgatgtaaatcatacaataagatacattcttaaggtaaattaatatttatcaccactatgtattacatcttaaacatatcttatggtaaacactagaacacatgattcaagaaaatttgaatgtttgtaatggttagaaaaactgaacaaatttttcttttaaaaattattatactgttgcccaaaaggtattttaaaggttaaaaaagttgatgatgaagagaagcaagagaaaatgtcattctatctgtaaatttttacatgttaaaagattgaagctcaagtgactcattattccaattaataatgggtatgtattattggaatgaaacatatgataaatgatttgaatgtcaaccttgggaatgatgatgaatggatttcattttctgagatttttcttttcaggggatgattaacaaacttggaaagttaagaacttcagaataatttatgcaagcatatatccttgtttgcctatgaaaataaaataaaattatacttgtatgttccaatagtttctttttaggcatactagttggcaacttctagggactttgagttggtaacagtagaactctagtgtttaatgtggacatatgagtgatgttgatgaatgcctatattcatctcttttaactccagcgtcttttatggaaatggttatatgttgttttatactttttgaaacacacataaacatgcctatacatataatatcatgttttttgtgtgtgtgtgtatttttatttattttccaacatgtaagaaaatatataatatgaatatatgatgcagaaaaacaaaaaagtggtacatgatataatgagtgcatgagactagcccttaaacacaaaaccccatcctccccctgtcccctctttaaacaaagaaaatataacccttctatgcatacccagtggctcgaaaaactcagccatcccttggatcattaggaagaatttgtgtgggaacaagggccaattatccaagcctctatgtattaacaaaaaatcagatatattttatattaacctatagctgtaaagatgagaaatatattttttcctatgagcacaaacaaacagaaaaaaaagactaagatcactatgacatgctgatttgacgttttattagaatgttaatctggatcaggtttttcattttttccataaaatcaatacgatagatctggacatcagtgctaaaacttctgttactgtttgtttgaaacttggcgcaggtcagtgccatatttttgccactggacctttgtacattttcttgtttgttttccttttgttcttacagaataagctgtatagttttaagaaggtgaagtaattttgttatatcatcatgtattgagttggctatcagagaacagccaacaaaacaaattttgggctttaagttaatagatttgtagatgtttttagcgaatactatccatgttggtgttgctaagcaccaccatatgatagattatccatgtttgtctataattgtctttttctaattattatctttgtcatgttaattatgataaatttaggcctggcttattgtgatactgcctcttgcatgtgtcacgtgtcatgaaattaccttttttatttttttacttgcctgctactaaaatcttaaactcattcttgtacagtaagtttgtttagtttgaataactattctcaattttatgtaatgacagtacctttatatggtcaaatatatcagcatcactgtatatgtgcagggatt

SEQ ID NO: 13368 - DNA, 5022 bp, Vitis vinifera
  Intron number 2 from transcript GSVIVT01020418001 (locus G SVIVG01020418001) derived from phytozome v7.0 (chr-ID chr1 9; pos 19777884 to 19782905)
ctgttaatgtatattatgggtatattatatgggtacattatgttatgggctttaggcccagttaggttacttgtaccgcacacatatgcctcctatataaaggcactgatgtatattctttcttccatgaaatacaatacaattgttcagtatttctaacatggtatcagagccactgctctgaccctttcttagcagtctgtcttcattagtgtgacttcctttctttttaacgcttccgccaatcacaactgccgccgcagccttttgccgttgaacctccgacgtcatccaagcgtcgtccttgggttccagacctgcagccactatccttaaggagtttcacaccgcacaagatcactgttttttcatcaccactgcgaatattgctccgatttcaattttgacggtaccattgagatcgtccagcgccgatctacacattcgtggaaacctcgtcgccatcggagcccgtacttcattctctctgccacgtcagccctagctacgtcaccactgctgacgtgtcagtgccacgttagccctagctgacataatctccacgtcatccgttgaccagcgttgaccgttgaccacacgtggactagcgttgaccgttgactttgaccagtgttgaccgttgacttttccagggttgaccaggttctccttacccagtttttcgtgtagattccacttttgcagtctgttttttgcatattgtgtctctaaatggataaaaatgatatttttctttctcgccccatcaatactgtattggagggaaataaaaattacttatcttggtctcaagctatgcgcagttttcttaagggtcgcatgctctggcattattgtactggtgtaatgactattcctatcaagggagcaagtgaaggagatgctgtttttcttaatcgcatgattgaatgggatagtcataaccacatgatcctcacatggattcggaacacttccattccctctatttccaatctgatgggcagctttgatgatgcaaaatctgcatgggatatgttggccaaaaggtactccactactcatggatccctgaaatatcagttagtagttgaattacatcaactcaagcaagaaccagggcaaccatcaatgactattatgatcagcttcgctttatttgggaccaaattgacctttctgatccaacttggacatgctcaaaagatgcacagcaatatgcttccattagagatgaatttcgcctctatgaattcttgatgtcacttcacaaggactttgagcccattcgtggtcagctactcaatcgcagtcctgctccctctcttgatactgctgtaaatgagttggttagagaagaagctcgtcttgcaacccttcaagcctagaataagttcaatgttttggctattactccatctactccactcatagagcaaccccaacaatcaggtgattcttatggctctagcaatcgtcgcaagcagaccaacaaaaagttctgcaactattgcaagcgtcctggccacaccattgagacttgttaccgtcgtaacaaatctactgctacagttgctaatattgagcctactccgccaatggcttccacctcagttgagtccaagtcttctggatctactatcaacctctcctccactgaactacaggagatcatagctcaggctgttcatatggctggtaatgcatctctttccactgccttatctgttctacctggtaagtctcaaacttggctttttgattctgcctgctgcaatcacatgacacctcactcatccctattctccaaacttgaccctgcaccacatcctctaaatattcatatagttaatggttccaccatgcatgggaatagtctaggttttgtttcaacctctaatctttctgttcctggagtcttccatgttcctgacctatcctataatttgtgctctgtggggcagttagctaaactaggttatcgccttattttttactattctgggtgtattgtgcaggatccgaggacggggcaggagcttgggaccggtcctagagttgggcgtatgtttcccgtgagcaatcttcatcttccacctgttgctcctgtttctattgctactgcagctactgcagtttcttccttaccttctcttgcactttggcattctcgtcttggtcatgcatcatcttctcgggtacaacagttagtgtctaggggtctgttgggttctgtgtctaaagacatttttgattgtacttcttgtcagttaggaaaatagccagctttgccttttaataacagtgaatccatttctaatagtatttttgagttaattcattctgatgtttggggaccttctcctgttgctagtattggtggatctcgatactttgttgtttttattgatgattattctcgttatagttggattttccctatgaaatctcgttccgaaattttatcaatatatagcaattttgcaaaaatgattgaaacacaattctccaaacgtatcaaaacttttcgatctgataatgctcttgaatatactcaacatgcgtttcaagctctgttacattcctatggcactgtacatcatctaacttgtccaagtacctctcagcaaaatggtcgagccgaaagaaaacttcgtcatattcttgacactgttcgtgctctgcttctttctgccaaaattcctgccccattttggggtgaagcggctcttcatgctgttcatgcaattaaccgtattccaagtgctgtcatccataatcagactccgtatgagcgtctctttgggtcaccccctgtctatcatcaccttcactcatttggatctgcttgttttgttcttcttcagtctcatgagcacaacaaacttgagcctcgctctagactctgttgtttccttggttatggtgaaactcaaaaggggtataggtgttatgatcctgtctctcatcgtcttcgtgtttctcgtaatgttgtcttttgggaacatcgattgtttgttgaactctctcactttcgttcttccttgactaactcctctgttttagaaatctttccagatgagtcccttgttccttctacaaatacttttgatcctcctttggacttctctccagatatttttgatgcttctcctagacaggttgcagatgaacagattgatgacgagctaccccactttgagactgggtccccgctcctactctgcctgaagatcctccacaagacattccacctcgccactcaacccgggtaagatccattcctccacacctacttgactatcattgttacactgcccttgctacacttcacgagcctcaaacctatcgtgaggcctctactgaccctttatggcagatttctatgaaagaggaacttgatgcattaaccaaaaaccatacttgggacctggttcctctccttcctagacagtctgtggttggttgtaagtggatctataagatcaagactcgctctgatggatccgttgagcgctacaaggctcgtcttgttgccaaaggctttacataggaatatgggattgattatgaagagacttttgctccagttgctcatatctcatctattcgtgctctcttagctgttgctgctgctcgtcaatgggacctttttcagatggatgttaaaaatgccttccttaatggggatctaagtgaagcagtctatatgcaacctccttctggtctctctgttgaatcaaacaaggtttgtcatcttcgacgtgcactttatggtcttaaacaagccccacgagcttggtttgccaagttcagctccactatttttcgcttgggttacactgccagtccgtatgattctaccttatttcttcgtcgtactgataaaggcactattttgcttcttctatatgtggatgatatgatcataactggtaatgaccttagtggcattcaagaactcaaggattttctcagtcagcagtttgagatgaaagatcttggacatctcagctatttcctaggtcttgaaattactcattccacagatggtctttatattactcaagccaagtatgcttctgatctgctgtctcaagccggactcactgacagtaagaatgttgacactccagtcgaacttaatgcgcatctgacatcctccggggggaaaccattgtccaatccttctctttacagacgattggttggcagcttagtttatctcacagttactcgtccagacatctcctatgctgttcatcaggtgagccagtatttgtctgctccacgatcaactcactatgctgttgttctgcgcattcttcgatacctgaagggtaccatttttcatggccttttctactcaactcaatctcctcttatactccgtgcattctctgatgctgattgggcaggagatcttactgattgcaggtccactacaggttactgcttccttcttggttcttctttgatttcttggagaagtaagaaacaaacttttgtggcccgctctagtactgaagcagaatatcgtgcccttgctgataccacatctgaactcctttggctaagatggcttcttaaggatttgagtgtgtccacctcctctgctactcccctttattgtgacaaccagagtgccattcatattgctcacaatgatgtctttcatgaacggactaaacacatcgagattgattgtcattttatccgttatcatcttgtccatggtgctcttaagcttttcttcatctcctccaaagatcagcttgcagatatcttcaccaagtcacttcctacaagacgcactcgtgatttaattgacaacctcaagttggtctcacatccaccttgagtttgaggggggctgttaatgtatattatgggtatattatgttatgggctttaggcccagttaggttacttgtaccgcacacatatgcctcctatataaaggcactgatgtatattctttcttccatgaaatacaatacaattgttcagtatttctaacaa

SEQ ID NO: 13369 - DNA, 14814 bp, Vitis vinifera
  Intron number 1 from transcript GSVIVT01013688001 (locus G SVIVG01013688001) derived from phytozome v7.0 (chr-ID chr1 8_random; pos 2645651 to 2660464)
ttccttcctgatcttcactaaatatcaccttctgtgtgaagcttgtccctggttgaatctggcactgcgtgatgtgatctgggccatctgaccatggattccttggctgcttcactccatgcctaataacaaaaatgacatctataacatttattcttcagctttgacgtcttattagttattagttagttccttcatcttctaagaatgtaggcaaaactccaattcttttatctagtttatatggggagtgtcagtatgagaaagagattcaagtgtcctcaccaatgaatggtgacgccatgactcccttcattctgaacattgataatagccgtatcgcctgtgtgaacataaaccactggccctgggaagctctcatttacagtcagcatggtctttgtgacacacagccttgtgaaattggtgtccttgagctacaagaagaccagcaaaatggaagaatatgagtatattaaaaaaaaaaaaactaaataacaaacaaggtccatagatatcagaaaagcgggcaagaaggatccattgattaatttaaccaaggcagtgccaaaagcgtaactcacaacaaaatcatagtagtgcgtatccccttcagcaatcctgcagacaagcatcaatccactcaaaagtacaagaagcagcaactgtacggaagattccattttctccaacgccattatttctgcactctccctcttctaatgtacgtctactgagaggaaggaggccagttaaaatttagctcctaaatgctacttcatttaaaccaagtgtctataagaacaacggttggtcctgagttagttggagtggcccaggtttgcctttggttgatttcttgttgtttgaaggaaaaaataagagaaatttgaaggaaaaaatcaactcaaaagttatcttaatctaatcgtatttacgagatacaatttgaaagaatttttaagtttttgatatattgaaattacctactcaattaggtgaaaagtgagttttaatccactaatttaaaatatatatatataaagccttaaaatttataaatcatattatcaagtaaaatgatattttaggaaaaaattatttgatttataaaaaagtgtatatattttaaaatatttttaaatgaatgaaagataaaattaaaattcaattttatatatatatatatattttaaatagtgagtcaaacccactttttctgtgattttttgtttgtttcttttgaaatacatgaatgtttgctagaagttggactaggctcctttgcccaccttttggagagatatttagtttgctgctaggcttgatgtctgccggaatccttaccatgtagtaaaaggtagttgtagtttgacatattgtgaatcacatgtaggaattcttttaatcacatgtgggaatcctttttgagtcacatcagcataatcttgactgatggatgtgaccctgttgttgagatattagaaatgctttccatatatcattatttctttatattatttagtgttgagatattaagaatgtttaaatattaggaaagttgagatattaagaatattgagatattaggaaagttgagatattaggatattagttgttatttccttatatcattctttccttgtatcattcattcccattcttagaatggtgattaccctctatatatactctgtacatgaacgaatgaaagtatgaatggaaaaaactaccatttatcaatttgaagatggtatcagagcaatggaactgaaatcctgaatattttgtctctatggtagtccgacaatgatcatccatcctaagacaagccctaatattgataagtcaacctttaaatgcactcattgcaataagattgatcccaccaatctggatatcccacaatttcaaagcaacgactcttggtatgatcaagaaaacaatgaggaaccgagggtttgaaccatggacctttagatcatgtttaggctatcaacactttgttattaatgataataatcgtgatcaacgaaagaaggattccaagaaaacctcgattgcaagtgttgccgaaataaaaacagaaactaatgttgctgagaaagcctctgcattggtagccgctatagatcatggtggtaagtttttaaatacttttacacctgttattaatagtgcatggataattgattctggtgctacagatcatatgacttttgattctagacaggtttcaccccttagaccttcctcacaaaaaattgtttccacagccaatggtaacacaaccctagtcattggggaaggatcattaactcttactgatactttgaatttggattttgttttagttgttccatctttagattacaatcttttgtcagtttctcaaatcaccgcagtcttatcttgtattgtcattttttggcctgaattttgtgtgattaaggacatccaaacaagacagacgattggttgtggtattaagcggggaaaactctattacttggacttgcagtcaaaggattcaaataagttgcaacaagccttgatggcagatggatctgagggtgagaagaaaaagtctgaaatttggttgtggcatcgacgtctgggacatgcttcctttggttatttaaaaaaattgtttcctagtttgtttgcaaagagtgatatttctggtttccgttgtgatatttgtgaattggataaaagtcatcgtgttttgtttccgttaattttgaagaaaagtctatttccttttatggttatacattctgatgtttggggcccatccaaagtcccaactttgagtggctcacgttggtttattacttttattgatgattataccagaatgacatggttatgcttgatgaagaccaaagatgaagtgaacttgttgtttcaaaaatttcataaaatgattgaaactcagtacaatgcaaaggttcgggttctgcatagtgacaatggtggagaatatcaaagttttgatcttcaaaagtatttggaaggacatggcatcattcatcagactacttgttccaatacaccccagcaaaatggagtcgctgaacggaaaaatcggcacttgttagaggttgttcgtgcttccttgataacagtaaaaacatcgatattttattggggagaagcaatcacatctgccgcatacttgatcaatcgggtaccttccaactcaattaacttccaaacacctctccaaactcttactaatgctgtagttgccccaactgtcccaaatttaccttctcgtgtttttggttgtgtggcatttgtgcatctacacaaacaccaacgcaccaagttaacttcccatgcattgcaatgtgtgtttgttggatatgcattgcacaaaaagggatatcgatgttaccatcctccaactcgacaaatgtatattacagtggatgtggtgtttcatgaagattcgatgtatttttcatctgagtctgaacttcagggggagtaccataaggaaattcagactgtcgattatgattatcatatctctgaggagaatgaatctggacaatctgaactagtgaaccaagaagcgggtgagttggatatgagtggtcaacaatttgggtccgaagatgtatttactgaaataccaaaccaatcgtcgtatgttgaaggtgttcttaatttggaacctgatccattcatgaaacggttaccacaccgtcataatagaggtattcctaaacccacatatgaacctgaattgtctaccaaagtcaaatatcccatgagcaactatgtgtctaaccatcgtttctctgaatcaaataagtcatttgtaaatcaattatctactgtagctattcctaacagtgtgcaggaagccttagctgatccaaggtggaaagcagctatgaatgaagagatgaaatcattgcagaagaatgaaacatgggaactcgtagaatgtccaccaggaaagaagccagttgggtgttgttggatctatactgtgaagtgcaaggcagatggtagtattgaacgatttaaagcaagactggtagcaaaagggtacactcaaacttatggaattgactacacagagacatttgcacctgtagctaagatcaacacagtttgagtattactgtctttagctgcaaacctagattggccattacaacagttcgatgtgaaaaatgcctttttgcatggtgagttatctgaagaagtatatatggatcttccaccaggatgcatggtgttagaaaagcaatgtcagaaggtgtgcaaattgaagaagtcattgtatgggttgaagcaatccccgagagcatggtttggaaggttcacaaggtcaatgagagcttttggctatcgtcaaagtaattcagatcacactttgttcctgaaaaagcaacatggtaagattaccgcactcatcgtatatgtggatgacatggtagttacaagaaatgatcctgaagaaagaaaaactctgcaaaattatctatctagagaattcgaaatgaaagatctaggtcatctgaaatactttcttgggattgaagtttctcgatcaagtgaaggaatttttctgtctcaaagaaagtatgccttagatcttttacaggagactggaatgtcgggatgtcaacctgttaatacaccaatagaagaaggtctgaaattgtgtgttgagcctaatcaagtatcacccgataagggaagataccagagacttgtggggagattaatgtacttagctcatacaagaccagatcttgcttatgcattgagtgtagtgagtcaatacatgcataatcctggagagcaacatatgaatgcagttatgcgtattttgaggtatttgaagaatgctcctaggaagggaattttgttcgctaaaaatgttaatcatcagagtatagaagtatatactgatgctgattgagccggtgcagtggatgataggcgatctacatctggttactttacctttgtaggtggtaatcttgtgacatggaaaagtaagaagcagaatgtcgtcgctcgttcaagtgcagaagcagaatttagaggtatggctctaggactttgtgaggcattatggctaagacttcccttataggatttaggttacctatctaggcaaccaatccaattgttttgtgacaataaagccgcatgtgacattgctcataatccagtacaacatgatcgtacaaagcatgtcgaggtggatagattcttcattaaggaaaagttggatgataagattgtggaattgccaaagattcgatcagaagatcaattgaccgatatcctcaccaaagctgtctcaagtcaagtgttctcaaaatttttagacaagttgggcatgtgtgacatctatgcaccaacttgagggggagtgttgagatattaggaatgctttccgtatatcatcatttccttatattatttagtgttgagatattaggaatgtttaaatattaggaaagttgagatattaagaatattgagatattaggaatattgagatattaggaaagttgagatattaggatattagttgttatttccttatatcattatttccttgtatcattccttcccattcttagaatgatgattaccctctatatatactctgtacatgaacgaatgaaagtatgaatgaaaaaaactaccatttatcaatttgaagacctgcaactaactttttgatctctggttcatcacccattgaaaaattaattaatgacttatttgacagtgagaatgaaaaaataaaaaagtatttttatttaaattgaaatgagaataatgtacagacttttattcgagcatgtcattggaaattgtttaataaagaaatagtcatttctagcataaatatttgaggatgtaattcaaaagcagatttaaaatttttttaatatattttatggttgttttttttattctttctaatttttaaaaataatttagaattaaaaaattgatctaattaattgcgaatactttttccgttgttgagtattacatgtaatgaaaaacttaatcatttacgtgtcaaaaataaaataattttatttattttaaataaaaaaattatcaacaattattatttttaaattagtatcattcatttttaaccaaaaaagaaaagaaaaaacaattatgtttttagatgttcatatccatatttttataatatatactataataatatatttttataaaaatataatttatgattttattataatattactatcatattttactaaaaatatttatttataattaaaaatctatcatggaaggaatcttagagagaaccaagggaaaaaggtgtggtatagaaatgtatgcctgaaccatagttttgagaagtcgacatctttgaatggcaagcacctcaatatttaatatattatataatttaatatattatataaaattaaaattaattataagaaattagaaatataaatataattcaattttttttaaaatattttatcttttatatttgatttcatggaatgaaacgatgataactttaaatataaatgtattaatatttttaattttatttaataaaatatatataatagttaaatataaagatatatttaagataaaaggaaaaatataatattcaattctatttatatattaaaaattaaagattttattattttaatacttttcattataaaaataaatattcacttaaacatttatgtttatttaagaatttaaattaatgaaacttcaaaagaaaacaaaaacaaaaaatgaaaatcaaagattacgttatttggtttttgtaatagtttgcatatagcccaatggtagatatttccttagttttgtgctgcaacccatgttgattcccccatgctgctgccacttgcattttctatccatctaacgcatcccacatcagaaattgacataaaatatttcttcctataaatatagatgagcttaagatgaaattaacaaagcatttggcccattagcagtgggctgaactggggattagcctctaggcccactcagtgttgccataccccatgtgaagtgtcggtccaaatgacaatgccatagccatacacctgcaaagtaccatccttattagttattgagtatgtttggtagtgattctaagaagtgtttctagtttttttaacacttgaaatttttatctttcaaatataaaaaagactaaaaatacttcataaaatcactatcaaacgaactctgcatattaatatctatatcaatcacacaaaatcttaaatataagaaaatgtacacaaacttatgggattgaatgtgtctacttcctaaggtcttagattggtaccgtctataatcatcttctatattcttaattcaacactctcttgtgctccttcgaagctcttatggattttataaggaaaatcgttaacctttgttgaagttgaagttgtaaggtactttacaacatatctcaaaaatttgagagttagacattcaagggacttttgataagagtatggtaattttttaaaaaaaaatttttaaattaccatagtaggaaaaataattccaaatctacaatagtttttgccaggtaggagagaaggagagttgttttcttttttttcaacttggaaatcgtcttttgaaaagacgatttccaccaaaaaaaaataaaaaattaatccctaaaaaatcatcttttgaaaagatgatttccaccctaacaaacataaaaaaaaattaaccactcaaaaatcgtcttttgagaaaacgatttccaccaaaacaaatatataaaaaaaattaaccactcagaattcgtcttttgagaagactatttccaccaaaacaaatatataaaaaaaaaattaaccactcagaaatcgtcttttgaaaagatgatttccctaaaaagacaaaaacaaatttatttaaatggaaatcgtctcccatgaaatcatctcttcaccacccaaatttcaaacttttatacattttgatatctttaattatctccatattataaaaacaaataataaaatttaatataaaaatatattataataaccaaatttatctttcactatttgatgtaatgcagcaattgaaattgtgtgatcactttggactacattttgaacttctcgtgcaataaatatggagtctaattgtgagtggtcttgtgatagtttagggtaaacacaagtgtgaggacctatgtactttgttatctcaaacaaaccatgagatttaggacgacatgcacaaagcctctaattacaaccctcagactattttttacactttacagcttacatatctggctcagattcaataacaatcaaatgttgattcctacatatggaatgacatttaacaacatattataagtctaccttactctcaaatcgcaaacccttaaacaattcatctgattcattccataagtcagtgtgtgctattaaatccttgtcagccatggagttaattacatcccaattcaattctctaatattggggaaaggacatcatgttcaccaccacctagcaatgatgcatcattttctgtattttcattatcctccatgtccataatatcctcattaccatcatcttcatcaaataactccacattgtcatcatcattttcaggtaaaatatcaacataatttccaactgtcattacaattgaatcactaacccccgccatatctaccctaactataggttccatgtcattatcataactttgcatatacataagggaagatgtattctcttttaccatttgttgacttggacctagactttcaatatgcattgggatggtaaagctactaagcatggggtgataattaatggaagaagtttgaaaatacatttcaatagtatttggaggaggagattgtgcaacaacagtaaacattattcttacatcaccatcatgtcgaataggcaaagggacataattaacagtaccccttccatttggaaagggaactggatatcggaacaccatatttaacttggtgtaagtacgattaatattcagagcatgacacaattttgtttctaactcatcaaatgttatcatactattgattgaaacacctttcttaggaggacgattataacataccccaaattcacaatcaataatttcacccctggtataacacaatactgtggtataaccgtccattatcaaacctattcaaaatatcaacaaagaagtatcattatcaataaactttatgataataattgatatacaatatgtattttgcaaatctattttactaatattatggtgcattgtccattacaatatatttcttttctttttaaaaatggataattaaatgtatataatataacattttaaatgtacatttacatattatataagataagaccaactctcggataatgttctacttatatttcttatattttaatattttttaaataatattgtgtgcaaaaaaaaaaaaaaaatactaacaaccattactaaatttatttattttattttattatatattctaacattttgcaattatatatttcttttcttttttaaaatggatattgaaatgtaaataatattttaatattttaatatatattatatacctttaatactcatggttactattttatattgtacacaattactttatatatatatatatatatattatacattaaaatatccatttaaataaatcaaataatattttagtttcatttctacttttatttattttttatttttatttctcaatatcttacaagaattttttcaataatttaagacaaatcttaatttttataaaatatagaagataaattcataatttcggataatgttctacttatatttcttatattttaatattttttaaataatattatatgcaaaaaaataatttaacactatgtagaccccaaaatttgtcccaattttatttttacattaactttgaacccaattttaaatcccgattacatgtgttattttttggcccactcacccttttaattcttaatttttattattttgtaaattgttttacttttatttctatttgttattattattatattatatttttatattttatttatcactttctgtctcctctcttcctctcttccttcttccattccccccccccccggcttttttctccccatttgaccctccactttctcctcccatttcccaagaacaacagcccccaattcccaagaaaatgcctccatttttcccccaattttttcccttcattctctctcgacagcccacctctctctcttgggattttttttcattttttattttttcctctcccacattctcaaaaaaggaacaggacgaccaccattttttccgattccccccccctccattctctttgacgctgcaattcccaaccggccgccccctgtttttttttttttttttttttttttcatttttttttctgcttcccttttccaaaacacccacacagtcggctccccatcttccctcatcattttttttctttcttccaattcccacacgcgccaacccctagattttttcccttttccatcttcctccccaactcacacacacgaccgacccccattccttttccattttctttctcccattttttttcatcttccttttattttattttatttttgtttcccaaaaactcatcatccctcactgtcgtcggtaggatcaccggtcaatctcctccggtgagcccctgtcggccggcgacctcctccatttttctctcatcctctcattttcccgtatcactcatctcccattattattattattattattattatcattatcattattattactatttctttatttttctttatttgattttaatagtaattgttattgaaattgggcttgtgctatgtttgtttgtgggcattatgtttaggctttgttaattaatgtgaaatttgagttaattttttattgttaattaatatgaaatttgggttaatttattgttggtaaattaatttgaaatttgttaatttgggtttatgggattaatttaggatatttgaactatatcaattgcatattgtttatttggacttggactattgttaattgattatttgtttaggtttattggattgggcttgatgtattatttctttaggctatgtgtattattaatgtagacttattaattggttatttgtttgggcttattagattgagcttaagttattatttcctttggtcatgtgtattattaatgtgggtttgttaattgatgtgaattttgagtccataatatgggtgggatttgttggatgatttgaatatttgatatgagcttgacctatttgaattatttaatttgaacatgagataattatgatgtatattaaattaggtttggattatgaaatatcaaatttaggcataatgagatttattttaatttatcgtgttttgggtttgattaattgagcttacattttagctattaatttgaaaaattttagattagggtttatgatatgtgagatatttttgttatgttatatttgttaatttggacccatttgtaattgatgaaatttattagactaatttgaagtttgaatttgggtttgaataattattttggactctacatatttttggatacttacatttgtgctatttttgtttttgcatgagcccgttttataatcttgttggctgagtataaatttatgacatgtggagcttgttgtaagtttatttcccacttttattttgttttatttttattagttcttgtaaatattcgtttgtatatatttattgagtgtgtacagaattgaacatcgaacaaactaaaaattttgtttaaatgaaagaaagaagtcagtaaatgtgttttaataaaacaataattttaaaatattatttttaataaaaaaaagttttttttatttataaaattcagaaaaatgaatttaaaaaaatccaaaagaaatgtttttaatggaatttgaaaatttgtttttaaataatatttgtccaaaaatttctttgtttaataaaaattgtccaaatattgttttgtaaataaagttgtcccaaaaattaatttttaataaaattgtccaaaaaaatgttttttttttaataaatatattcttttttacttaattaaaattggattaaaagtcattttttgaaatagacgatttatttatttatttttatttttattttttccttttaattaaaaattcttatgtaaataaagttatgtctttttaaataatttgtataaatcactctccttaaatgaaatcaaattgaaatatttttgtaaataaaattgtaaaaattctttttttttttttttacaagtaaaaataatttttgtgcccaaattgaaattttgtaataaattcttttgatacaataagtgtaaataaccttttttgaaaattaaatacaaatgaaattgaatcaaatcacttaaagaaaatattttgtaaataaataaattgaaatcactcattcaaaataatttttaataaaatcctttgaaatttcttgaaaacttttttaaatattttttcattatttatttatttagttcaataaatcattttgcataattcttttgtcatttattttttatattcttataattagatttcgtcattatttttgtgtatattaattttcaccgtgacttctacattgattatttttcttgatatccataattaattaattaattttcacaattctcttaattcgtttagtaaaggccgtatgtatacaggcttaaaggggtgttacggctcatcatcgtaccttcccaataagtaacccgacccccggacccaaacttggtttttcacagacccgtttttccttcaggagtcacacttagagtttttttctttggtattttgttttttcctttaaaaataaaacaaaaataagtgacgactccaagtctttttctaaaaatcaacatttcaccaaataaataaaaaacgagtttcgctatcgaatgggaacatatcgagcagaaatgcggggtccacacactctaaatttattttattttattttattatatattctaacattttacaattatatcattcttttcttttttaaaatgaatatttaaatgtatataatattttaatatttaaatatatattatatatacatttaatactcacgattactattttatattataaacaattgcattgtggtcttggtagagaatttgaattacatctaactttctcatgaccactagaagatcagtagaagtggggccattgaccattagagattgttgttaaaagtcagtgggttatgagtctcaaattaaatcctgactgaaccagacctgtttattaaagaagttatgtaaatcttgtcatattacgtgtgtaataaatgggttgtattcatattaaaggactatgacatgattattaaacgggttgtatttgcttgaccagatttcgctatgatcttatctcaacatggaacaaactacatataacatgacttcagtgtcacacaaatattactctacaaatccatataacacgattctattgccactcaaatgttgccattgccttcctttgttcaataaatcgacacgtgatcttgggctgttgttgatagacctgatagtcaatcttctttaaatttcttcattttggtctactgtgtccctttttgcaaccatactaaaaactgaaaatcatgctgaaattatgaattctcaactcttcaaccagttttggcaagttacataggttgcaaatggtgaaattgacatttctcttaataagttaagggatattttgaaatgtcttaattattatcttatggcaatctattattcaaagccttgacaaaggtccaaactcaaactcattgtcaatggggccataatatctttgttaatgaaactgatgatttttctctccatagctcaggacttgaatctcaagccacctcctgttcctgagggggagttctgttgtctgtggcttcccagtttcttattattttttttttgttttgcacttttttttgtttgcttgtttagactgacaacttcatgaaaacttgttcaatggaaaaataggtatttaaattacaattttttttgttcaatggtaccatttgcttcaggatttcaactaatgaatgatctaatggtttgcaagagtttgacatgatatggtgtattaccattatgtgttgcctgtttcatgttctgatttttatgcttttcccattgttttctaatgtatgattcttttttctttttgatgtatgtaaaagagtctagaagcagatttgtcaaggattactatagcctttttctgaattatgttgtaatggccagtattttagtgtgtgctagcagaagtctgggaaatagtgctttaggggttgtaggtcattctatttaggaaaaatgtgtaccaacacaacatgatttctgacagtgatttgtaggaaaatcttggctagcttgagtcactaactgtatgatggtcttcttaccatgttttctggttcactgaattccagaggcagatttacagttaatagtggttatttaaaatgtagaccttgtgcattgtcgactgccatttcttagttagcattgaattgccttcatgacttgcacttctttgctttagatataatctctttttattttttatttttgg

SEQ ID NO: 13370 - DNA, 1706 bp, Vitis vinifera
  Intron number 2 from transcript GSVIVT01008197001 (locus G SVIVG01008197001) derived from phytozome v7.0 (chr-ID chr1 7; pos 4779165 to 4780870)
tcaggtaactttcttttgattttttctactatttttttttcctctgagtttgtaagtttagaataattaaaagttgatgcttttatgcttttattctttttattaaaaacagaaacctttgtttttgtttttaatttttagcacttctcgctggtgctttgggtcattgctgaaatcttttgtttgttggttaccttttttttttttttttttttttctgtctctttgtttggaggaaaagtatttcctgagaaaaattactagaagtatgtttttttatttattgccttaccgtttagctttaggaaaatttacagtgtccctttagttatctttgaggaaaatactctgagagccagaagctatacggtatagttatgttgaatattggcatattgatgaaggatgtttgagaagttggttttgtttcttagtggcttgatcaagttgtctcaagtctcactgtggaagtgtccacgaagatgctgatacgatttgcattgtacttaacattgagtcaggatgtacaggttgttggcagaggtttgaggccatggggactagtgcatagtgcatgtcagaacctttggatgtcccaaaagcagaacttgaatttgtgctgtttcacttgttgaatttgagatggactaaggtaggtttaactaaaacttagttcggctgtgtttcataaccgttaactaacatactagttagacagatctagtttgtgatataagccctcaagaagttggtgtatgtgtacatctggtagtcgggttaggggtagaagtgagccaaggtgtgcctggcattttagctccactatctgggttatgtttgactaacttcatgttttttaacaatcatattgagcttgttatttattgcaacccaacatttctcatgttgatttcttttcctgcttatttctgttctgttttctttgtcacctgggtctctctgttctttcttttctgatgtctgaaatgaatgattttgtgttggaatcattaacttttacttttaaggatgcaaatcagtgattgcaacatactgcaaaccctattcaattcttcagagctctctttcttttcaaccatttgttttgtgtagttccttagagtgtcatgttattgaagttcacaactatatgtaactattcacatgtctaatcaaactgagcctggtgtgcccaaacttgacatttaaatcaactgagcatgaaacataaatattggcactaagttgacaaacaagtttttttactgaactgagctcaaaactcttgacattaagttgacaaacaagctttttactgaactgagctcaaaactcttaacatcagcctggttcaattaacagcctaagccagattgataaaagggaagttctggtaatgaaaggtggaaaataaacaatggagttgggaagaaaaaagagcattcattgggagaaagatgtacaatttacttgggacaccacaaacatttaaccgtcgcattaggtactttttcttgtggggcaggtgattgtttcttgtcacagccaaatctttcttcatgtgcttatcatcctgaatttcctataaaactcaatctttgtttgttttattttgttcttgcttgagaatagattgttttgtatattgattataaggttctgacatttttgctctttatttttcttaaggaatcaagccgaagttg

SEQ ID NO: 13371 - DNA, 20380 bp, Vitis vinifera
  Intron number 1 from transcript GSVIVT01016754001 (locus G SVIVG01016754001) derived from phytozome v7.0 (chr-ID chr9 ; pos 939887 to 960266 reverse strand)
ggaattttgggcaccatttattctcctacaccttggtaacccgaataccatcactgcttactccttgaaagacaatgagttgtggttaaggcacttgcttggactagttgctcaagttggagtggctttttatgtgtttctgaggtcatgggcaggaacttcactcacgtttttgtccattccaatgtttgttgctggaattatcaagtatggagagaggacttgggttctcatgtctgcaagcaacaatcacttgagagagtctttgtttccatctctcgatccttgactagattacgttgaaatcatgagaggagatacagcgattgtgtttcacaaagataagggcaacattactagtcctgatggaaaatatattgatgaagcttactccttattcaagaagcaattccgacatctatatgcaaacctcattctcagctttaatgacataaaaaacaatgagcccatcatcaggtacctgtcactcgaagaggccttctaagtggtagagatggagatcagttttatgtatgatgtgctctacaccaagaaaactgtggtttattctctcctaggcattcttctccacactgccagcttcttttccactatttctaccttagtgatcttttgcttcttcatcgataagcatgagttctcaaacattggcatcaacattacttattactcttatgagctatttttctagagatttatgctatcattatgctgattttgtctgactggagcattgtctggttgagcagtaagaagaactctctcactaattccatttgtcgggtcattacccatttttgatcagttttaaccagtgacaagaaatggtctggacgcatggcatagaacaacttaattgattattgcctcagagacaacactaagttcaatcaagttcccaggttctttgacatgaacaaattcttagagaggtactggtacatgaagtgggagaaggtggatgacatgaagaaacccttcttcaacttgctcctacatatgacaaatgatgccaaggatctcaggtcactactcaaacacagaggtgattatgtgattacgaattgggagtttattgagacacttggttggagtgtagttgatgtagaatttgatcacacaatcctcttttggcatatcgcaatagatctctatagctattctgatgaggaccccaatcctaaagcaagatgcaaaataagcaaatgcttatcggagtatatgttgtatctgctagtcatgtgtccatttatgctacctaaaggaacaggggagtttaggttctgagacacctgtgcagaggccaaaagattttttcaacaaaaaagtgagtttatatctagcaaaaatgaagcttgcaaattgttgcttcaagttaacacgaaacatgagcccggagaagtgaaatgaaataaaagcaagtcaatgttattcgaggcatgtaggcttgccaaaatgttggaatctctagaaatgaaggctggagagaaatgagagatggtaagtgatgtgtgggtggagatgttgtgtcatgctgccactcattgtgggtggattcaacacggtcagtaacttaggcgagacggggagttgctcactcatgtgagcctactcatggcatacctcagtttcaatgagcaattccaatagcagaaggtgaaaaaggcttcgctcgtagtctcactgagcaattccaaatgacgacgggttgggacaattccggtcgtttcttttttaattctgattaaggggcgacaagacatgtaagttggtatctggacgtatgtgatttaaacaccttatttcttacatgtattttcgatgtgggatgagatctaagatgagtagagaaatgctgacaatatgaacatactatagaggcccaattctacagcccattcttcattaggccttatgtttcctcatacattgttgtaggcctaatcactgaattggaaatttaatgccccattttttctctgtctgccttctcatgccacatcttagtttaagtgagcaattccaaatattagatagtgaaaaagtaaagccaatccttggctacccttaatattccaaatattcatatgctgagggtttatgttattatcctaaatgcaatgcatacgaatttgacttaaaaaggaatcttagtgtgtttttagactccgaatgtaaatgaataaaccaatacttgtgcaagggttagttgtttttaggttgagccatttacggacctagaattctctttcctctatttttttatattctattttggttccatagcaaacaggcaccatcatataaattgtagttgattcaatattcttgtttccatttccatctgcaatagagcaaaaacgtggcattgttgggtgttgatctgtaggtgttaaaagtgttgatttcagtatttttgtgatagtccattgttgatcgatgggagatgttaaatccggtgtgggtggagatgttgtgctatgctactagtcattgtggatggattcaaaatggttagtagcttagacgaggccgagagttgctcacgcatgtacatgtctgccttcttgtggcaaacctcaattttagtgagcaattcttgtaggaatagtgtaaataattttttattttattttattttattctattagtcttatatttttgggaagagtcctattgggattgtgttaatgaagtcccattccatttataagtaaaatcccctttcactttgagtcatatttctaattacaagtagagtctcattgggactgtgttagtggcctataaaagcaggtcacctctcactctctaaaaacaataccaatttttcaaagagtcttttcatacatctatctagaggaattgtttcaaaacccgagccatacacatctcgcttacagagtgcacccaaggcgagatctgattgttgaatcctaaaggtaaaccactggtaccgtagtgcactgagttcgtctttgagaaaggtggatctctttcaaggacagtgtttgtcatgcttcaacagaaaagtttttcttcttactaattctgttctttgtttgtgtcttttgggctagtcatttgtttccatacccttaaattcaacaatcttgaaataaatccaaatggaagcttctctagttgacacccgtcttgacacatctaaaattgatcccctcaacgggacattctttaagagatggcaggaaagggttttctatgcaattgacatagtgaacttgggacatattttaactaacccaaaaccagaagatggttctcatttgttaccaacctgggaaactagaaataaacaagttaggcatgctattctgaataccttttctaatgaacttttttatatttattgtcaatttaaagttacaaaagaaatttgggatgcaatgaataaaaaatatattttggaagatgcgagaacttagaaatatatcatagagaattttagaaatttccaaatgaccgaggatagagatggatcaccttaaatccatgactatcacttgttgattaatgacttagctattgaagacataaaattatcctaaacttttgtggctggttatttagtagagactcttctagagtcttggaaagactacaaaaataacatgaaacataaaaggaaatagatctccctaaagaatgtcataatccatattaggattaaggaataaaattgaaatagggacaatgttgagaaagctaaggaattgtcttataaggttaatgtagtagaagaaaaacttaaacctaaaaacaataggtccaggaaacaaaactctaggaccgagcctaatgcatcaaacaaggtttagaactcaactattaaaaaatggggtaattgttttgtctgtggcaagtcttgacaccatacagctcaatgtcgccacaagaaaaaaactgagaagtccaattcaaaggcaaatctggcagagacagaggtgatcacaatattaatctcctttgaggtgagcgtagtcaccaatatgaaggactgggtggtgaactctaggctaccaagcacatctatggaacagaaatgcatttacttcctataccattgtaaaggaaagagatcgaagaacaagtgttcatgggtgattctagatctactccagtaattggcaaatgaaaagttctcctcaagctaacctctggaaaagtgtttgccctcagtgatgttcttcatatgccagatatccgctggaacttggtgtcagtatctctacttggaaaagtaggagtgatgatcttgtttgagtctgataaaatagttttgaccaagaatgatgcatttgtgggaaagggctattgtaatcaaggtttatttatgttgaatgttctgatattatcaataattatgcatcttcttcttctgcttacatagttgattcttgtgatatttggcatggtagactaggacatgtgaacttttcatatatgaagaaaatggttgaattgagtttattccctaaactatcattagaaaatcatggaaaatgtgaatcttgtgtagaatctaaaaccacaaagaaatcttgcaaatcaattgaaagagaatcaaatctactaagtttaatacatagtgacttaggagacctaaaaaaatacaatgactagaggtgataaacgattctacataactttcatagatgactgttcaaggtatacaagggtatatcttttgagaaacaaagatgaaacaagagatgttttcatcaagtacaaaaatgaagtggaaaatcaagtaagtaagaaaattaaaaggctttgaactgataggggaggagagtatgagtccaacccctttaattctttttgtgaagatcatgggatcattcaataaactactcctccttattcccctaagtctaatggagtagtagaaaggaaaaatagaaccttaaaagaaatgatgaatgcaatgttggtaagttcaagagcacccttgaacttgtgggtatctacattcatattcaaaatagaataccttacaagaaaactataaaactccttatgagttgtggaagcgttatgcacctaatataacatacttgaaagtgtagggtgtttgtttatttgtttggccctataaggatgtagattactttgacacctttgctcctatgactagaataacatcgattagagtattgatcgctctagcttccattcataacttggtgatacaccaaatggaagtcaagactgcattcttgaatggggatttggaataggaaatttatatggaacaacctgagggttgtgtagttccagagaaggagaaaaaggtgtgtaagttggttaaatcactatatgggttaaaataagctcccaaacaatggcacaacaagtttgctcatgcgttagtaactaatggacattccattaatgatgttgataagtgtatctacagcaagtatgagaataacacaagtgtagtcatctgtctttatgttgatgacatgttgatctttggaactagcctagaggttgtgtgtgagaccaagaaattcctaggttctaagtttgacatgaaagacctaggaaaggtagaggtgattctaggaattaaaataactagaacacctaatgagcttaaactttctcaagagcactatgttgaaaagatcttaaggaagtttgaacactttgattgtaaactagtgtcaactccttatgatcccagctcatagttgaagaaaaatagagaacatagtgttgcccaaatagagtatgctcagatcataaggagtttaatgtacttaatgaactgtatcagacctgatattactttttcagtaggtagattgagtcggtacactcaaagtcctaatcaggaccataggactattgttcgtagagtccttaagtatttgagaggcaccattaactatggtttgtgctttagtggatttccaagtgtccttgaaagatttagtgatgcaaattggatctcgaattcggatgagatgaaatccactagtggatatgttttcatccttggtggaagtgcagttttttagaagtctgtcaaacaaacttgcattactcggtctgctatggaggctgagtttattgctttagaaaagacaagttctgaggctaagtggcttagaaacctcttagcagatatccctttatggacaagaccgaccatgtctgtgtttatgtgttgtgatagccaagctgcaattgctaaggttaagagtaaaatatttaatgggaagaacaagcatatatgcctaaggcacaatattgtgctaaatctgcttgaaacaggggttatatccctagaatttgtgatgtcaaagttgaatttggccaatcctttgaccaaaccactaaataagaaacttttggaagaaacatcgagggggtgaggcttatgcctattacagaagtcaagagttatggtaacccaacctatcataatggaaattccatgaagtaggttcatatgggtaataacaaatcacttgttgacttgaggtgccttatcaactctaattgtatgagagtctatccctatggtgtaaataaagcatattctatattgattaaggttgagtgtttactcttaatgaataccatattccttatggatggtatgtttaaatgcaaaacatacttgatagattcacctatatgagagtggaggtggggccgcttcctataagaacttagacaggttctctagagctctcatgaatatctaggtagggcgcatagcctatttgtgccaacccatttgtacagcttgtagtgtagttgagaaaaccaatgtggataaaagtcccttaagttacatcaagaaacactggttcatagaaatttattttcaccgtgttttgtgattcaatatttatttatcttaagattggttcataacctttgggcaccagtactaatgcattggattcttttttcctctaaaaaaaaaaatcatgtttacactctatgggggattataggaagagtataaataatttttattttattttattttattttattctattagtcttatatttttaggaagagtcctatttggattgtgctagtggagtctcattccatttataagtagaattttcttccactttgagtcatatttctaattacaagtagagtcccattgggagtgtgttagttgcctataaaagcatgtcacctctcactctccaaaaatgaataccaatttttcaaagaattttttagagagtcttttcatacatctattttgaggaattttttcaaaacccgagctatacacatctcacatatagagtgcacccaaggcgaaatctggatgttgaatcctggaggtagaccacttgtaccctagtgcaccgagttcgtcttcgaggaggagagatctattttaaggacagtgtttgtcacaccttagccggtaagtttttcttcttattaattctattctttgttagtatcttttgggctagtcatttgtttccatacccttaaatccaacaattctaagtactggaaggtgaatagagtttgccacaaaactaatcatttttcaaaaaagaaagaaaacaaaaatctcattctataatgcatttgagaatattcctcaaactagtctttagcacatcacccttttttttaaaaaaaaaaaaaaaaggaatataaagtgagatttttttttttttttttgaaaaagggttacttttattgtaaactttggtgaaaaattagattatgactttgtagaccccccattttggggagttgtgatttttctcacgtttcctttcttgcagctagctgtggccagatgtcaccatcctaggagtccacatgctgtcctgagattggctgttgtggaatcaaaatagtggttctaagagccaatgagaatgtgacacggggtgtgaggggatctgcaaaagctgcagaccgttttgccagctgcagggaggagcggatgagagagggagatgcttttccattagagtggggggcaggagtttttgggttggaggactttggggtagagagggaggatgcagctgcagggagagtgagagaaaaaggaggagcttcagagaggaaaacctggggagcttgctggtgggagagtgatattagttgagagagttttccttctggaggaggagggggggattccattgacgactgtgagagattctggagctgccagttgcttgagagagaaggagactggttttctgggggggttaactaaggagttcggaagaagaaaagagggagactagagagaaaacaagcgaggtatggccgccatggatcattcattttctttatcagtatatagcttcattcatttttcttgagattttctatgacttatttgactatacgttatgtcttacggttcttgcttggttctcggatttcttggcggctatcttgcctatttttctggtgatgatttgagaaggacattgctctgttttagttttcgttatgcctcatataggagttttgttctattcttatctccttaggatgtattccagctcactcaccaacaaccaaacttgttgatttaaacatgaaacatggttttggttgttttatttgtttcattggtttgtgctctgttttgctttgccattcccctgttcttggcatcccaccttgttgtatatcaggttgtgcatccctctctgagggaaccaggtaatgccatcacaatacatagctcgtaagtgttgaggatgaataaagctcctccaggtggtttgggtttgcacagtgatcttgaatgggaacgatttctgggtatattcggaatggttatatggatgaggctctgtcttggtttcctgtggtgtctcctgaagttgtaatgcttgggaccgatttcccgatgtgtgccacttctcatttcagactgcatgcctcctcagcaaatatgctcgctggaattgcattagaaagcatgttttatggaaggaattcatagaagattaaaatacgaggagggatagctattcaaagaggatcaacctttgagaaagataatgacctgagaagtctgggaatgctaaaacaaagctagtggaactccatcaacagtgaaagtgaaaaattggattataggcgcatgagggtccttggtcttaccttgctactctcattggtgtagctcttgataaagcgttgagaactaccccactgaagaatcccgggacccattctctcccaggcagatgcatgaccactcttttaaccactgtacccatgtactaatccaatgctttacatgccctctgcccactccttcatacccattaacgtctatcaccgtatacccacttcccaaacaccccttccattccacctcatcgtctttctaccttttcaggtcatccattccccatctttgataatatccatacccagctgactcgcccctcatttcccatgcgcacgtgatcaccatgcatttccacccgggctcaattcgcttctaggcctctatcatgtccaatcatgctactacctattcccattttgtctccatcctctatgactgtctttcctcacttgaccactaccccgaacctattcttttcatacaagccccatacccatcaccccatataactcatcttcggttcatttcatccttttcctaagtataagggaccccacatatagccactgttatctcattatccttcatcaccaccttcacatatccgtctctctcattacattctcatacccattttctctctctaaaccttcccatacccattaaactcatttcttccaatatccctctcgcttattttctcataccttttttcactcattcccccttcccatttccttatcgtatgcatgcatggccatgcatggttccaaatagctgagctgctacgaagttcaggaatctgagggttggatatctcgggtcaacattgatgggattaatggcctccctcatgtcagtcagatcagtcatgatcatgtctcagatattactacagtcatccagcatggcgacatcctcaaggtggtgatcccgagtcacgaccatcagagaagttgtcccacctccttgcagtagaatccctcaaactaaggaagatgacaccattggtgcgttagctgacgtagcggaactcaaatctgagcttgatgttcaatgctccttacactggaagcaacaagaacaattctgctgtgaaagaaaaagggcattttgggtttgttaaagtgattacggatagattgcaaagttggaggaagctctttacaacatccagtttgaacctcattggttagaggttcagactgaccgtcgggcaatagtgaatggaggaatgagccagagagcagtccacaaagctatgtttgaatctgtagcattagtgaagagctagtgtcctccaaatctacctcctgcaacgcctgtttgaaaggaagcttgggatattcagagattagatgtactgctgccacagatattcatggtcgcatgaaaatgtgtactacaaaatatcgcctagtggtatgtcaaagacgctaacatgcaaagccatttgtcactgaaactaaaaatgttgtcctactacagcctacaagtcaggctgctcagatgccaatctccacacagcttctcgatcccaatgcacttggagctccaggaaaagaggagaacgagaaaaatggattctcagagccagaaatgagataagtcctcttcattaaaaattcagatgacaatatgaacaagtctggcgcattcaggtctggatttcgtgtggttccatgtcaagatgagaattctgagattactgttggagtgagtaacgctactgagggctagcgtagaaaccataaaagaatgtgaaggtctgtctcaggtccgcaagcaatttgctcagattgaaaaccagcaacctagcctgctaaatctccacccgaaattctcgggagactcttagaatggattgaaaactctggaggcatgtgttcatggctcagaactcgcattggacgtgatctcattcgactcggctgtgtcaaacaaaaggatgtccagcgcagactctgtgggagccacgtgttgcctgttcacctagtgctgattttctgagctccatgttttgaaggaaaacaacaggtcaagggtcaacatcgagattttctccttcgtatgccactcaatcagacattgccatgtgccacatagctagaaataacgacaacgctggagcattcaagtcggagaatcaaaggtttcggcttcagagtggtgacggatttgttgcaaacccattggtcgggattcccaatgattcaaggaggatttcagaagtctcctcagataaaatcccaagggaatggcagctgttatcacttacctcacagggttgtatcagtagcatatcaagtctacgtgcagagcttcattatgcatggccatcgtgggcatgtaattgatgtccacttgtcattgctcttttccttctcagatttcaaaagtgatctcctcaaaaatccaattttcaagcagtcttccaaattttggttttcaaatactttcgaatctctacagttttccatctttagttttattaggttccaaaatctcatttctcgtaaaatttggctgccattctcttttcgacaagctactttcgaattttctctaattttcaaaataatttaaaatacgtgccaccttccatttcttccttttgtttttttttaaaatagctttcaaagtccatttctttaaataatccaagtttttcatccttagagtcttaggtatcaaaaatcccgtttttaaataaaactttgctgccattttcttttctggcaagcaaattttataactcccatggtttttttaaaatgttttaaaataagtatgaatttaattctgttattccaaataatggaatttatggaattaattcatataaaaataaatcgggctttggtgggggccccacatacttgacttcatgattgattgactgatcgattgatttatttgccatgcatgattggtttactctattctctgatatgcgcttaattatatctgttcattgttcactaaccatgtttcttgatagcgcattgaagatcgttgcccaggtacgcatctgttcttattctgatcttgctctacgcatgttttgatactcatatgtgcatgattgatttgagtatttactgatttcctcatcattgccacaccagtttcattttattagtagagacccgactttagggacttagaagggtgctacagtccatactgtaccttcccgataagtaacctgacccccgaacccgatccggtttttcgtagatcaccttttccaaataaggagtcacacttagggattttctttcttattttgtttaccctttaaaaataaaacaaaaataagtggcgactccaagtcattttcaaataatcaaataaaaccaatttttcaaataaaaattcgagtttcgccattcgagtgggaaacgcatttgagccgaaatgcggggtccacagacttataagtaagctcatgggcctagtgtaccttcatgacctataactattcgttgataagagcaagcatgcaactcatgaaagtatatttgttgagaaaaagctacaacatgttcttatttgatatttcaatccatagcatctgattaaaaaaaatatatattgtatgctgtcaaaggtagtttcaaatactatatttaatgatacgagtactacctttaatttgtttagatactatatttgatgtaagaatgcctaaaatttgaattacttttagaggtttttatttttcattttctttttttcttaattttgtaccaaaacacacattttcctactatgaaagtaaaaaggttttacccattgtatacaaacttattttagaaaagatgataaatttgaaaacaaatagactaaaatattctcaaataaaaaaggcaaccaaattaacaaagctttgactccatcatatctaggaagtgtattttttaaaacaattctaaaaaaatggtttttgaaaatgatttctttgatgttttgtaaaataaaaatttgtttgaaaacttaaaatgttttaaacattttttatatatttttcaaaaataacttttatctaggttttttattttcaattattctctatatttatataattattttttaaaacaatcctgaaaaaacaacttaaattaaacaactaaagtatgtcttctaaaaaaacgttgtcttatatttttaataacaaaaaactattttctattttttaattgtcaaacatgttttcctttttctttttctttattcttaaaaacagaaaaatggtttcaaaaacaacttccaaacaccacactgtttatcttcctctcgttttcctttaagtaaatggttttctatctttttctcttgaaatagcttgaattccctaaaattctagaagtatatagatgaaaaactcataagaataaccctaagattaggtttagaacctaaatcaaagaatgagaaatgagaaatcaattttattcttattttttactttatttgaattattttttagaatggaaataagaataaaaaattcattagaatagaaaccaaatcccattctcattggtattttgattcctcttttttacataatattgtgattcaccttcattctcatcatattttcatttttattcccacatgccaaacgcatcccaacaataacaaagtatcatgcctgtgttaggcatgatcattttctatatatatatggaaaatatattgaaatcacggaaggagttacagcgattgtgtttcacaaagataagggcgacattattagtcctgctggaaaatatactgatgaagcttactccttattcaagaagcaattccggcatctatatgcagacctcatcctcagctttagtgacagaaaaaacagtgagtccatcatcaggcacctgtcacccgaagaggccttccaagtggtagagatggagatcagttttatgtatgatgtgctctacaccaaggcaactgtggtttattctctcctaggaattcttctccgcaccgccagcttcttctccactatttctaccttagtggccttctgctccttcatcgataagcatgagttctcaaacatggacatcaacattacttattactcttaggagctatttttcgagagatttatgccatcattatgctgattttgtctgacaggagcatcgtctggtttagcagtaagaagaactccctctatgtcttcttacttattagttaaaatgtttaaataaacggaaatatgtaaccttcatttcatcactaaataataagcctataacttttgtcatgtaagtaaaattaaataatagaatttttttttccttttttgaatatattttcacacttaaatattatgtcttaatacatttatatttatttttatcatgaattaatttgatattattaaacataaaaaatgaaatattattaaaaaatttaattatttatacatattttttaatttattgtaattatcttatttttaattaaatatgtttattttttaatgttttgttgacatcatggtttgaccacagtttaactatcgatcctaccagtaaatcgtgttctgatagcatttctagtttcatgactagtccgattctaaaaatattgaaagagattgcaccctttagatttttaaatattgtaaagtactaaagttcttttattttatttttgaatgttattaaatgttaaatctgcttattttaatatgctaaaaagatcccatagtgatattaatgattatatttcctcttattttatgcaaatgaaataaattacttgaaagctaaccatttagaaaataaaaaaataatcatttaacaatttggaaattaaatgtgaaacatattcatttttatatgcttaaaacatttgttaaaatattaatgattatgtgtctttttattttatatagttaaaataaaaatatttgaaaactaatcatttgataaaataaaataaataaataaactaatttaaaatatttccaaatatttcaaaacaacaatgtttattatgataacaaaagtttataataattaattatatattggttaagcaattgacagttaaggggttttcaattacatttgattgctaagaaagtgttaaaaaaaatattaattaagttatattaattactttgtgatttttatgtgctacatctttaaatttatggatttgtgattcaattattattgagattaattatttaatttttggattttttttaatttaggggaaaacataacatcctagcttttattttgaaaaaaaaaattaaaatcattacttctagcggatatttaaatgaatgtcaattatacttcagaattttaattagataaatttaattaaaattgatgatagttgattttattgtatgataaggagcaaagctcctcgctgtttgccgtctcttggaaattcaaggtcaatcccatcactgtttccaactttcaaagctcctcaccatctcaagtcaagctttgaatatgctgtcatcgtctcttccaaaagccatcattccccatttcattattttaatgctttcatcgaatgtgtgtcaaagccctctcttatcttcctctttggtcaatgatcaaacagtaccgcacaacttctcttcttcaccattctttttccactacaatggccattgaagaacctaagttaaactccacttcagatcacgtcctggattggctggaagattcggtttcgtttgtttattttaatgctttcatcattgtggagctactgctctcacagatcccctctccccatctccgttaattccggcatcacctccactggtcgtgttaatgttgctaccatctcagtccacgtccgtctctctctcgcccctctatgtcttcttcctttttatactgcaaccattggcagagccagcatgtggccagagggacaacttccccttcccccgcccccggctctgaatcctccaagcatgtggccagaggggcaactctccaaggaaaaaaaaaatgttattctgagctgtgtttgagcccaggctctggtttaaagataagaaggccatcatctcactgctacagtactcccccttcatgagcttcacaccactgccaccataattcctacaggacagtcatcgtccttcacacaactgaagcaaagcattgtggttcaaacaggcgaccacctccatatcaatcttagtctcgtgacatccccggcagcaccaccaaccaacccaccaccatcactctctggtatatatatttcccttcttatttggctttcaaaccttttgcttttgttcttgttcttattattattattattgtttcctaatttttatagaatttatgtaatagtttctaatataatcttttcaaaatgaagatgatttatccatgcatggatttcctacattttatgggatatttttaattagattctcttcatcagtattctattttagtcactctgccactgtcaactctcttgctgtactacatcagttcaccacaatcttcttctgtatttctttgtgctaatcttctgtttaatcttgtaaatatgttcctgtgaataaagaattctgggtgatgctcaaaaaactgataaaagaagaaagaaagagaaattgatttggagtgatcagtctcttgtccaccaagacctaatccaaactctaggttgggttattccaacaggacaaagaaaaagtgtcaaaagaaaaagaaaaactgatttggggtgctttccttgttcccagcaaatcttcttcctctttttttttggttggtcaccataccatctcaccactacactccaccttcacgaacttcacacagtgaaccaccacctcagcaatcatagtctcatcattttataacatttaacatggcattataatcaggcttaccattctgaggcttttgagcactctaatccccttatgtagcttacaatcccaaggatttgagacattattttctaagatctaaagatgttatattgcaaacctaagataccgacatttgtatattagcttccatgaacaaggtaatgatcctctattgcttcattatgatcaagacaataataccataatagaattttttttttaaatatcataattatccatcaattaaaaaatatacaattacaatatcatttttaaacataaaattatgcgatactaatttttcaacaaattattattgctctttgatctctttgagttggtcaaagacacatgagttgagtctaaggagaaaaagattggagcaagccatggagaatctgcttcgtgtaatcttctgtctagtcttgtgagttttttcgtagttaagaaataatggttagaaggtaaaatgtggcacaggaggatctgaaaaacaagaaaattaacgagtgaggtgtgaaaaaggaaaaggaaaaagaaaaagaaagcttaagccatactcagtgaatatagtactgttctgtcactgatgatagggaacttttgaagtgaatgcacaagttcattattcattggatagtgcttagggtgcaatttggggcgggtcagctcgactcaatctaaacttgatataatgtttggcgggtttagataatcatttttattattgggattgagcttgagttaaagttttcaaatcaagttcaatttggtttgtgcctaggttaagattaaggtttggacaacataaacctaatttgaatccaattttatgtttttataatatttataatgtatatttttttatatagtaatatttatttttttagatttttaagaaaaaatatcaaattaatattatataatatatatttttatttttttaaatataaatttatttttactttttgttgttacatataattttttttcttatttactatttaatttctcatataaatatataaaaattttattaaaaaaatattataaatgaattttgaattatataactcaaaaaaacattatattttcctcgggtttgaataaacctaatttgaattcaatttaatgtttcttaatatttataatatatattatcttgtacaataatattcattttttttatatttttgtgaaaaaatgttaaattaatattatataatatacatcttcatttaaaatatatatatatatatatatatacaaatttgtttttatatttttgttgttatatctaaattgtcttattttattatttaaattttcatataaatatatagaaattttgttaaaaaaagaagaaaataaaacattgtagaaggattttgaattatataactcgattaacctgaaataaaacttgactaccttgaactcaagcgggtttagagaaatgaggttgggttaagttttggcttaatactttgggcatgaagtcaatttgggttagattttgatcaattgttttttattccagttgaatttgggttagatatcaacccatcaatattgcagccataacagagtttcagaaaatcaaaggcgaaattagcatgtgttcctcgacttgtgaccaagtcctacactctgggcttctcccttacaattattaatgtgactctatgagtacaccctagtgattcttagaaatgtttataccttttataatatttgaataataaaaatttttaagtattaaaaatattataattgaaactcaaaaaatagatctaattactataaaaaataagaaataaaaattgatatatcatgaattataactttactatttttcttttatacacaactataattttttaattttcttattacgtaaatagattctaaattaagtaacacataatttataatttaaattatttgatgaaccttttaatttttgagaataatttgaaattcaaaaaattgatttgattagttatatattaaatccaaacattctaaaatattgtgcttataattgatgactaaatgtgtgcgtgtaatgaaaatttttggttcatttacatgttaaaaaagctaaactttattttatattcattttaaatacaatattattaacaatttatcattaaatattattattattcacttttaacaaaaaaaaagaaattaatgactcttttacgaaaatgttaatatccatatttttttaatacatattaacgtagtattttttttataaaaaaatttaatttattattttataataatattactttcttgttttactaaaatctattaattttttaatttatttgtaattaaaaaaccaattttattttaaagaagacttgaattaaatttaattaatattatataaattaaaatttacaatgttttttataaaatcaaaatagaaaagggttatttgattaaaaggatcatttgaagcccaattttttaaatctaaccctttacccatttttggccttattttgataaaaacgcccttattattttcttattgaaataaccttttttcaatatatatatatataaatacttgaaatagtaaaagacatctatatcaaaaatattattttatcaattttaattaattatttcaattaaaaaaaatcatttttttaataatttatggaaacaagtttttgttttttgttttttaaaaacttgtcaaacacccttatttcttttaataaaatttttaaaaattatttttttattctttaatttaaaaatagtttataaaaaaaaagtagaaaaaaatggtgaaacaacctatctttctaattttaagtgaaaagtgaagctatttataaggtgtttaataaaattgaagattaaaaattaagtgctaaactttaatgttgagttataaatgttggaaagttacaagtggcaaatgaataaaagtgaaaatgattggtatgaatttaagagttttattttacaaatttattcttttattcttcatttttggctctaatattttttaatgtttagttgttttcagtttgatctttttacagagaacacgcgcgagagcaatgcagatattcccagaaagtgtgcggaaactttggaatgaatgggacctacgcttgatggttctactcagccttttcctacaaatcgtcctaatcatctttagcaaccgacgaaagtacagagtcacaccttggttcagaatcctgatttggtcggcctacttgtccgcagactgggtggcgacagtatccctcggtaccctctcaaacagccaaggagat

SEQ ID NO: 13372 - DNA, 2152 bp, Vitis vinifera
  Intron number 8 from transcript GSVIVT01031116001 (locus G SVIVG01031116001) derived from phytozome v7.0 (chr-ID chr1 4; pos 2040878 to 2043029 reverse strand)
tggacacacaaaagatccttctgaaacaatccaaggtacaagtcaatatcattttaacgtcctcctatttcatacaggattatgtcacttttgcagaaatatcattccaataaaagttagaacaatgtggaacattttgattgggatgactattttaaagttttaggggaattgaggaaacactgtgagaatgtcaaatttactattatcattatcatttgaatgaaaacttcaaagataactaactaactaactgactatatttcatttagcagtcccctcaactgaaaaaagagaaatatatgtttgacttataattattttttaattattttgaattcattcatattcctcatggatcagtatataatgtttacatggcacagtttcttgtttgaagttatttcatgttagagttagttgatgtttgactaatgttgtgaggagaggatcttttcgtgcttgtgtctcctttcatagctaggattgtaaaaatcattgaagcttttaaatgcaagtttttccttaatttgaggtgtagataaaattaaatctttagaattttttacagcttgaataaatcttcacacttaaatattatacatgtttatttaataaaattaaaaatattaatacatttatatttatccttatcttgatttgatattatcaaggataaaaatgaaatattattaaattttttaattatatatgctttttttataattattttaaatgttaataatataaaaattatatattcatgaagtcatgttgacattatagtttaagcaggttgaaccaccggtccaaccaatgaactatgatccaataacttttctaattcaatgatcagtctgattttgaaaacactagcaacaatgagttgggtccatgtcatgttaaagaatattctaaaaatgtactcaagcctaagtacaacttgttagcattttgttatctttcttgaagactacatgtttgttataggggtaacatgcatgacacaccatgacacacatgatttgtgtaataaaaagattgggttgggtcaggctatatcatgttcaaattgacatgtagttaccctataatatgtatgttaatccatttgatatgattgtaatctatttaacccaattaagactttaactctatgcaatgaagtcaatgtaaattacaagaactcttatatagaaaacaaaaactctaagaataaaaaatgttatatgagctaaactggtcaaatatgagttgtaatcatagtagcaacataagactctatttaaacgagtcatatatatataagcatgcaaacatgacacaataagtaaataagtatgattgaaatgtcccaacctgaacatgatctttctcataaatgggtgggataggaggtttgacacttgtcacaatttgtttgcagcactattggactcgaatcaaacccgctaacttaatgtcatttttgggttgctttggtgaattgttttaagaattgccacccctaccctgtttgtagtccttggccccctttttttttcatttttttaatgggaattgaacctagagcctcccatattcccaccctagccgcttgccaaacgtttcatctaggaagtgtgcatctaccaaaactggataagtatcacttagttggtgagttagaattgtaaaatacatccatattgatgattagaggttggattgcttaatgcaaacttaaaaatttgcattagttaagataatttttttctgccaagaccaaataaatttacttgttcaaattaaaagtatcttgcagtttacattttaaaattcccagaatatcacccaaaaaaaaaaaaagagcttaatttaggcagttttgtcttcttgttaacacaacacgtaaattgcaacatttttttgtggcaaatatttgtttggttctataaattattataaagtttgattgctgtattggcattcatgtgatcattgaggttgcttcctctacttaaattgggaaatattggtggaatgttcatatattttactgaaattggaaaaacactttgtattttaagcaacattttttttcttcagttatagcttattgcttttgttgttttctctccgcagtgaaggcatttgatctgcaaacttgtac

SEQ ID NO: 13373 - DNA, 1126 bp, Vitis vinifera
  Intron number 19 from transcript GSVIVT01009320001 (locus GSVIVG01009320001) derived from phytozome v7.0 (chr-ID chr 18; pos 7365883 to 7367008 reverse strand)
aatcttcgaactgagctggaggcaaggttccgcaggttagtttttgtttttgtttctgtttctgtttgtttctttttgtcttcttcttctttttatttttttattttctttttgcccctttttcattcatttggtttttggggtgggatttgggtgggtgcaggctttcaaagacagcctctttcttttaccctgtgttttatcgtattatatttgatttgtgatgctgaaagtggtactgttattttatcacatgatattattcatttgtcgttcacatctagtgtttttagggttcctaagtaatgggataatcaatcaaactaccaatgccactttcattgctcttgtgccaaaaaagagtcaaatactcagaatcttagattttagacctatgacaaaattgattttgaaaagacctatgaccatgtgagttggggtattttggatcatgtgctagaaaggaaagatttcaacacaaaatggagatcttggataaggggttgcttatcttcaacaagttttgtagtcttgattaatgaaaatgccaaaggttaggttaaggccactagaggtttgagacaaggagaccctttttcatctttcctttttgccattgtagcggatgttctaagtaggatggtgattagactagaggaaagtggtctaattgagggtttcatagttggtagggataggactagagttcctcttttacaatttacaaatgaaaccatttttttctctaaagcctctccagaaattctgtaaaaccttaagctaatccttttggtttttaggcagttataacggttgaaaattaatttagagaagaacactcttttcggtattaatgtaagtcatgagttaatatctagattggccttgatgattgattatagggttttagagtggtcattatcttattaatatagatatatcttctattttttattaaaaaaaaaaaatcatttggcacttctttcttcttcaaatcataaggattactttagctttgactttgttttattttattttttattgtatgttagtgttatcttgtctcacccttttatgaatatatatgttgttcattgatcagttttgcggaaacagaaactttgag

SEQ ID NO: 13374 - DNA, 6454 bp, Vitis vinifera
  Intron number 3 from transcript GSVIVT01024680001 (locus G SVIVG01024680001) derived from phytozome v7.0 (chr-ID chr6 ; pos 7807682 to 7814135 reverse strand)
caaaattgacgaaagaggatctttctgattttcaggtacttcctgttttttcctcaatttcagtagttggttttggtttataaatgactgttaaattttattagattccaagattttgttcattttttgaagcagctaagaaaaaaaccaggtgaaaatataaaacgttgtatgctgttttagtttttggtttaacttgtaattcatatataaaattatataaacttcactgaatcagtttccttttaaggaaccaaagcgtaacccaaaataaatggtggttgtgaacttaattggtcacacccttcaaatgaatcttgccttgtttttgaggtggctttttgaaattttgatctaagtgatcaggtagagtatacttttttttggtgttagtattcatgcatatatttcatttgaatgcatgcaggaagttttacatctgaagatgtttccttttggttgcatgtttactcatttgttgtctataaaaaaaaaaatggtttacgcatatgttagctgcactgttcaatgtggggtaaaattctaattaccccacatttttcttgacctaattggatgtgtatcatctctttatatagtttaacgtcgaaagaagacagtggtgttaaagaaaatcaagatagaatacaaagtttttagaacattgagtataaaactaatttactaacttcactcatgacttggtcacatatgtattgtgcatagttttaaaaagcacaaggtgcacctaaggggcaaaagtctcctacaacatatactccaagtgtgtgcttgagcaaagtgaaacttaacctatgatgcatatcaattttatcagatatgatcccaaatctaatccaatcaataaaaattttaaacatttaaaggaaacattcaacaaaaaaagtagtgaaattatataaatttcaatatacagttagagatttcaagaataaaagtgtttaaaaatggaaaataaagtaaatgaggcatgcctccaacagggtgctataattagggagtggctgtgcctctgccttgggcctaggtgtgctttaagctctccttttaaagccatgtcattctgaacatttttagtagatatccatgccaagattggctaggttgcacatacattaggaagacagagagtttcttgaataattagtatgagattaatcacatgcataaaattaatcatctaactcttgactcacctatgtaggtcataggtgcattgtgtgtccccaacatctaagtacatatcaatgccaaaattgactaggttgcacatacattaggaagaaatacattttttggaataataaatatggaaataatcaattgcataaatagatgtcaactcttcacttagtttagagatgtattgagtgtacccaatatttaagttcgtatctatgccaaaattgaccaggttgcacatacttaggtgtatcatactactagtatgtatatttaccaaattgaccggtatacctttctatgtggttaatggaattatgaagcatttttatttttgtttttgtttttatagtttgaatatgtattattttcataattttttttaatgtcttatgcttctagtttgactttccaagtgaaatttttgggttcgcacttatattgattgtctctcttaaaagaaaatcatataatgcaattttttttccatacattgaatttacttccgattgataatatccaatgatgaaaaggttgatgttgatagaaacatcgacgaattgattttatagaaatatcaattgaaatatggatatcaatggaaatatcgataaaattgaaaaaaattatcaatgggatgccaaagaaagtgaaatgaccctttttgatgaagaggttgaagctagaaggataaccatggaggagtattatcatttggccttgtgggaagaagcatcttggaggtagaaaccaatggaactttggttgagggaaggggacataaatgctatttttccccctacaacatggcgaaagctcaccaaatgagtaatttcatggctagagtcaagataaatggtagttggcttttgagggaggaggagataaaagggaggagtaacttagtccttttgaaacctattatttaaattaggagattggagtattacgggtttgacattagagtctttgggtggggtagggtagggtagggagaatgtagaggctttggaagtctccatttcaaagaatgtaaacgctttggcatcctttgtatacctcccatgtccttagggtcgcccccttctttttgtttggtttctttaattcttcccattgtgtatttgggtcttcttcctaggagctccttattagtcgagggttggttggctattggtagaagagagtgtccataagaggctaactatgtagaaaagacaataatctttctaaaggtgggggacgactcactctcataagagtactctatcaagcttgcccatttagcatgtctccttttgtcatactcatgaacgtgagatggggagggattgaaaggggggatcgagaagattcaaagaagttttttgtggggtggaggcttgttagagaaaaaaccatacttggtgagatagattatcatttgccgagatcaaataaggaaggctttgggattaaaaaccatacttggttctcaataaggctttgctaggtaagtggaattgaaggtttatctcaaaaagtggatccttgtggaagtgggttcttgttgggatgtatggttaggaggaaggggattggcgttccatggaaagtagggatagttttctaattggattgtggaagaccatcatatgagtttgggagaatatcaataggaaaacctcattcaaagtggacaatgggagaagatgaaaatctggaatgataaatgttgtggtgattcatctttaaaagagtcttatgataggattcttgggtggttgatgtgtgggaagtcttggaatgatagatggtgtggtgattcatctttaaaagagtctcttgacaaaggattctttggtggttgatgtgtgggatcaataaattgagggtgggcattggaacactagcttctaaaagaatttgaataaatgggagatggggaggcttgaagccttccttttaatacttcaaggcaaggttgtgaatagggattgggaagacatgatggtttggatgcaagcaaagagggtaatttttcagtcaaatccttctaaaatttcttgggattggaaagagtggaagatttccttacaaaagttatttggcttgcgatggcttcacccaaggattaaaatattggtaaatacggatatatcggtggatatttcgacaaaaatatcgatgagacgaaaattattcaaaattcacaagaatgcttgaaaaaactcaaaaaaaaaaaaaagataaaataagtattgctaatttttttataaaaatttgataaatattatctttaatcgtacatataatatttatcaaatttttataaaaaattagcataaattcctttaatatatttatattcatttattttaaaaattaaaatacttttattaaaacatattttattacattttaaataaaaaatgaaattgatttatataaaatattttatttgagatttgatttctaaaaatttattataagtgacaaattttctattatcatttaaataattaaaattattactaatttttcttatcaaattaattttaatttatagaatattaggactttattaattttttttatattgtagcaatttttgagtaaaattatattttaatattttaaataaatgaatataaattaaataaaattaaacggataaaaaaaagaatgaagtgatagtaattttttaaaataacattaatgagataaatataaaaagtagttaaaaataaaatgataatatagatttaaaataaaaaataaattaaaaatgaataattaaaaagtaaaaaaaggataaatatttttttaaaaaaagctttcaaaaaaatctccgatatttcccagatatatccgatatattcgtagatatatccgatatatcgttgatatatctttgatattttgacaggctttctttgctactccgtgcgttgcttcacgctcaattttttcgccaattttcctgatattcctcgtctttgataattggtgctcaatatcctttcagggccatccaatatccgatatatcggcaaaatgtcgtcgataaaaaacgatttttcaatccatggcttcacctaaagttgttttttttctcttcttcttttggtggggtgcttattggggaaaggttttgacatttataggatgcaaaggaggagggattggtctttggtaaatcaatcctttcattgtaaggatgatgaagaatcatccttttgcattatgttagagttgaagtgttatggaatttggtgctttccttgtttgggattgttagggtgatattaagttcggttgggaaatttctcttgggttgcatggctcttttatttcaaaaggtggtgtggagggttatctagttgtgcgtattttggttttggtggaaggagagaaaccagagagcattcgaaagtaaagaaatgtttgatcgaattcttaagtcaatttttctttgcaaccttctattgtgggtaggatatatagatgacgtttccctaaccatgataaattttattaattggttaggatctacatgaagggtcttttgttttgtgtgtcttcccaacagttttgtcaagttctccaattgtttggggttgccggttttgggttttgaaaaggaaatcagctttcttcttagaaaattggaagcgaagaaaggtcacggggttaaggtgtctcaggggagggcaaaaatccatgtcctcttcaagtcttgagaaggaaatttgaaggctcaagtgcttagtcaattacagtagtgttccgtccacggtaaatggaaaggggaggggggtggggacttaacagcaggggtttctgctggccactggtatttaatttattttgctaagggttttttgtttgtttcgagtaggggtttttgtttttgtctttaggtttctgcttgggggtttccaaccgctgtgggagcttggtgttggtgggaaggtggtttttagtctttctcttttcttttcttgcttgcctttgggccatatatgcatacttcctgtgcactttgttgtgcgtttttgcaagcacctttaatatattttgcttatttacctataaaaaaaagcctcttgtttattattttttatttttgcattgcctcttgacgtacaaagtacacaataagatggcagcatgttagtattctcgtattgcaactggtagaaagtgagaaccctttagccaagggagccttttctatttttataagcaaatagataatatatagaaaagtgccatatagaggttgagtctatttatgtgtgccaagcaaaagtaaaaggttgaatgactttaagaaaaggttagaccaatggcctcaagccatctccaccaaatcgataaacttcagatatgacactcttttttgcaaaagaatccctcaaccaaaagtgcaggaaaacatctttcagctttgacaattccaccccttcaaagattctaccctttaaccaagggaactggcatgataagtctggtcagaacccttaccttcacaactcctattgggaggtcaaaatattagaattttctttgttttttccagctgcacaaaagcaaggggcagatcttacacaaaattctccagcctccgaaatttagctgtctgtatacttgatggtgaccttgagttctgtagacagatggcgccctcatcatgcttagctttattcatgattcctttattggggagtgagcattatattgagcgaggtcttctttgtgtttgtattgggcctgcatttcaagtggaatggcaccctaaaggggtttgaatagtttcaaataaattctaagtctagcaaaatgatgcagtgcagacagatgagaacttttgaccaattagattgaaaaatagattgtgaatgagctgtaaccactttttcttgtttgaataatgttaaatggaatgaattaactgtcacttccatcattatatatttttgttttggtgacaaggagttcagatataagagtagttttctacttccagggtgtagggcctttttgacatcatattgtgctttttgacttatatttttgttccattgcttgtgtgtgggtggtgggggttagtgtttggtcgtgtgggggttgcatagagactgcgtgttatatgttgctacttgctactgttgataagattatctaatgattgtttacctctgagtggctatttttttctatgcatgatgcaggctgttgtatttacggatatctattttgagaaagc

SEQ ID NO: 13375 - DNA, 6166 bp, Vitis vinifera
  Intron number 6 from transcript GSVIVT01027339001 (locus G SVIVG01027339001) derived from phytozome v7.0 (chr-ID chr1 3; pos 16311864 to 16318029)
tttcgggttgtcactgagaacactgtatttatctacccccttcttattattctttaatatctctctaattaatattattatgtaacaatatgttattttgtgaaatctacttccatgttttacttttattaattcattgttgtaatcctttttcatttttttttctttttttctttttttgtttccatgaagtaggtgtctatcaattaaattttccttatcaattgattagataaactattcactatcaagtatcttcctatcttaatcaataggtagtttctaaatatggagattattcttatttgcaattagaatgacttccatgattataatcaaacaaaatggtgtaaaccaaaatctacaacaggtatatttttgcttacaaataaaataaaatagacatttctttactatgtcaagaaaagaattactttttccgtttatttgaatttatgttcatattgttgtggaatcttgttcacatatattcaatatcttcaattaaagtgaaaaataataacaaatgtaaaaaattgagaaaaagaaagaaagaaatttaatgtggcttgaaacataagagtagtctttttgtagaaaaaaaaaagaaagaagttgaaaatataaataattgaaactcttaccatttacactctagcaattcaagctatcatgcctaaatccttagaattgaagtatgttcaaaccattaaatgtacttttttacaatgttttgaacaaagattagaaaaagtcaaataataactcaagtaccaataaagttttagtttgaatcatgagtataattatcaagaaacattgactcataggacttagtagcattatctaagtcaaagattaactacatagagtttttgtccagcgttaggttttttcttaatattctctagcttgaagacttaattttctactaataagagaatactccaaagttattatgtgaacttcactaagtattgggtaacaacaaaccatcttttgttgaatgaactctcttgtatgagtttctttattatgatatacttggtttacatatttgatacattatcattagtaaatcttttgtagtaggatttgaccctttttcactatttctcctacaaagtgatacttagtctttatgttcagtgttcttgagtaaaatattgggcttttagctagacatatcacattttgactattgcaatgtatcacaattaccttttatggtacttgaaattactaagcaagtatcataattactttttatggtacttgaaattactaagcaacccctataaccaaataacttcttcattgcatgtttctatgacttccttatacttctattataaataatacaaaatttgattgtaatttatacatccaactaaagcatcatctactatggagaacacatgattagtagtagaattttttagtactttttttttatatatatttttaggtttttaaatctcgatatcttgcctagtctcattgacaattccaaccaactatagatcttgacaactataaaataataaacactttgaggtgcctttcaaacaatgaagagtctattgcatgtcatagaaaacactaagcttcctattacaaatgaacattgtacttcatacaaataatgtatcttctccacttctatgttctcagagattgttttaaagatgacttgcaagtagtagggaacaaagtattgactagttcaatatcttctttattgaagtaaggttagaatctataaatataacatttttgttttatccaaattttccttttctttttatccttgaatattctcatcctaagaatttgattagaaactcttaaatcctttatttcaaaatttttagtcacaatgactttcatatttgcattttcattaacaattaacaagtcatctatacatataataaaactataaagctaacactatgataactataaaaagtagacacgatggctagaatcacatatttggaatcctaagctcatacaagactttaatcaattatagaaacacctcaatgccttctctaattcatatggtatactaagtttataagactcaaaaccaatgccttcttcttcttctttagacacaatagccaaatcatatatctaaaatcctaggctcataaaggattgagatgacttttgaaaacaccataatgtcttctttaaaccatcttgaatcttaagctcataaaggactcaaatcacaaccaaattcttctttttcttcttctttttcaaactatatggaatcctaaactcataaaggactcaaatcataatcaaattcttcctcttcttccttatatttaagattaccatggaaaaatgcaatttttatatctagttacttgagttccaaatcaagtacaactacaaaactcaacataatatatacttagtacccaaactatgtaaaaatgcaatttttacatctacttgcttaaaattcaaatcaagtgcagttatcaaacccaaaaaataacacatggtacccaaactatggaaaaatacaattttacatctagctacttaagtttcaaatcaaatgtaggtactaaacacaacaaaatacaaatagtatccaaacttgttaaaggagaaagtttatctaagtaatgcttgattctttgagaataaatttttactataaagtaagcttcatatattttcatatttccattagtatttttttcaacttaattttaaacccatttgaacaaatatccgtctactctattgataaatgaatcaagtcatgcatcttgttttgatacaaagccttcatcgcgtcctccataaacactttccactagttagcatctttagaatgataagactctttacatgaataaagttcacactttttttttcctatgcaaacaaaagatgtcataaattattttaattaccctttataattttgatgattcaatatggtattatctcaatcaatggtaattaaaatagtttattatatttagtacttattccattatttttaattttttagaaaatatgttattgcttttaatttgttattatgtcaaattaatatttaaatttatcataattaaatatgttgtcatataaatctcttaagggtatttttgtgcaattttcattcctaaagaaagaatgagattctttaggcaaatctaaggaaaaccattctccactttgaagaacaattcctcaaaattagatgggtttcacacatttttttttaattccaagttttagtaagtgcaagaatgaaaagaaatgaaacaattcccttttatttgattccttagaaatacaataaatttgtcatgagagaaactgactttatggtgctttccatagagctagtgttcacaaaattatgaattaataaactgtaaatcatgaagtaaatttctatcaagtagtgcctaaatccctacttgcccatgtgatccaaatgcctatgccaaattgactctatcatatcattaacaattataacttgctaaccatggtatttttttatttttgttttgtagatacaaatcatgaactaattacgtctttgcaatcattgacactcccttggttattttcaattacttcttttcactagaaaattggaaaccatcttcaccaatttttttcaatgataaaaaaaactcttccctagattcattatgtgttttgcctactaaattgaatgcatggaaccatcaacattgtaattgaaacatctctaagtctcactattttgcattacttatcatcaaccatgtaaataatagcaccacataaatggtaagtatgtgactaacctctacctagtgtcatatggaatgatatagtggaatccaaaactctttaatgttgcatatttcttctaggattacaaataatgcctctatttcttcaaatgaatcttcaacattaacaagctttacccttagatttcatgtttgtatattatttttagaattaccttgattagttttccttaatctgaagtcttttctcatatgctcatgttttgcatgattccaatacttccctttactcttgcagtttgaattggatccattttgttctttactagcaccatgacccccttctctatatgtttgttttgtgctaccatttgcatcacctaaagaatttattaattttatatgtgactattttgtgggcagcattgatattacaaattcataagagagatttgtgtctttaatgatgaccatgatcaaaatacctagtgattccaaccttgaccaaagtagaagatcaataactcttacattttttttaatatcaatttttagttcaaacaccatttttattaatcatagttatgttgaactcattcggctgttcttgctaataggactctccatcccagagacgtagaatttttcatggagaaatcattaatttgatatggattttccattgtataaattgtgaaaatttcttgtctttattcatggtttctttttatgtgttcaacaaaacaaccttatctagtggaatctaccatggccaactatcgttctcataaaaatcttcatttgtaatctccactagtttgtcttcttttccgttaggagctttttttctaacaaatacttgcatcttcaactcccatgttaggtaattggaatggttgagttttggtatcttaaactttatggagcccaatcctttcatcttgacttgttcagtattagaaagcattgatcttaaatgttaaaattttcaatattggttccaaaaccaatagttgaataagtttgattacacataatgcatatattaatgtcagtgaaaataaaatcaaataaaaaaatagaaaaagagagataaaaacacaaatttaagggcaaccaacaatatgcttacacatacaaggcacaaagtgatattattttgtttactagaaaacaagagaaaaaagaattatagataattgagacacttgctaattgatctttttgctagtatagtgtctttcacgcaaaatcttagaattgaactatatttaaaacccttagtgcaactcttttgttgtattttaaacaaagatataatagtcttataataattcaaaaactaataaaatttagtttgttgaggagttgagttattcttgatatatatattttcttgatataaatattttttaacgatattgattttcccttccatatatttagttgaacttttacatttataagtacaagaaccctcatttttaaaaaaataaaattacatatttgaatttaatagttattatatttttcccttttattttgacttgagttgcattctcttccacatcctcttgaggaatatgaattacttgttatttttattgaaaataaaaaccacctcaatatctattttcttgggcctgaccatgtccaagactatgtccacaatcgttttggcttctttggttctcataaagaacttgttccaattttcttagtccttcctttttatatgagtttgtaatgatctcataagtcaataaatggatataatttttttttctcttcaacaaccataagaatataattataattaaatataaagatccaaacatacttttgttaaatgaaatatttaaggagatacacgaaatcaagcccataaaaggcaggaagacactcatcaatattttcataaatctagagaaatcaaatagtaataacattttatttttataatatttggaaatcaaatattaatagtatttgattctcacatatttggaaatcaatattaacaatatttggaaatcaaatattaacaatatttggaaagtatcctaaaatgaagagaatcaaatatgagaggagtgagggatgtaatcctagtctcttcaaattatttcatgctagcaaataataagtaaacttcataccatgtgaattgatctttaagtagcatgcatactttaacttgtgatttcttaattaatttgagttacaattacttcttgtttggtttaaaagtagagccggattggaactaatgtcctacgtactatcaaatatatgtgctcttagtcttttgagaatatatcaaaatcttggtagcactaatttaatggtttcttgaatttgtgtaggtatttgct

SEQ ID NO: 13376 - DNA, 16743 bp, Vitis vinifera
  Intron number 11 from transcript GSVIVT01037040001 (locus GSVIVG01037040001) derived from phytozome v7.0 (chr-ID chr 3; pos 8567307 to 8584049 reverse strand)
gctctctgcttgcagttggagagcttctgaggttggttaagatggttgaatatggatgttagtatttgtattttagcatttttgactagcttggttttttggcttgggtagttggttggaaaaattattattattatttttgtttattttttgatataaaacacttgggtatggaagttcttagcacccttcttagacgggctggtgaggggggctttctttccggctgtaggcttcgggggagagggggtgtggagctgattgtctctcatctcctttttgttgacgacacaatcattttctgcaaagcgaaaagagagcaagtaaccaatctaagctggatcttggcgtggtttgaggcggcttcgggcctcagaattaatcttgctaagagtgccctaattcctgttgggcaagtggatgaattggaggagctggcggctgaactaggatgcaaattgggagttttacccactgtttatttggggctgccccttggagcccaccataaaacctcttcttcctgggatggggtggaagagagaatgagaagaagactagcccagtggaaaagaatacatctcgaaagggggtagaattactcttatcaagagtactttggccagcatacccatctactttctatcccttatccgcatccctaagtctgttacaaaaaggattgagaaaatccaaagagatttcctttgggggggaggaagtttggagaggaaagctcacttaattaagtggaaggtggtctgtagccttaaggaggagggaggattaggcatccgaaagatagatttattgaacaaagccttgctgggcaaatgggtgtggagatatgcctatgagaaagagaacctttggaaaatggtgataggggtgaagtatggtcaagaggggtgtgggtggaggactaaggaagtttgtgggccttatggaatgggattgtggaaggagatcatgaaggaagctgattggtgctgggagagcattgattttaaggtagggaaggggaccagagttttgttctggacagataagtggtgtggcaatgaggcgctttctcaaattttcccacagctgtttaccttggcgggtcataggaatgccaaagtaagtgaagtgtgggactctagcctgggtcaaggaggttggaatctcagattggctagagatttcaatgattgggagctggaccagataggaaatatgctgaatttgctgagggatttcaagacttcgactgaggaggatgctgtgagatggaaaagggaaggcaatggtgtttttggggctaagggtgcttacaaaatgctgtttgggtcctcagcctgtgctttcccgaacagacgcatttggatggataaggttccaacaaaagtgtctttttttgcttgggaagcttcgtgggggaagatcctcaccttggataagcttcaaagaagggggtgacagctccctaactggtgttttttgtgtggctgtgaagaggaaaatgtgaatcatattctgtaacattgtacagtggttaagactctttgggagattgtcctcgtcatttttggagtccaatgggtgttcccagaatcagttatagaagtgttacttagctggaggggctcttttgtggggaaaaaaagaaaaaatacttggaattccattccattgtgcatattttggacggtttggaaggaaaggaataggttagcttttagggggggggggtctttagatattcaaaaattcaagaatttttttgtatgtaatttgtggagttgggctagggtgtacattggtgaggatacctattctctcttaggctttttggagtggcttgcggccacttgagggtgggtgaggttcttcccctctcttttttcagctctctttcttgggcttttgtgtataccccctgtatacatgcggctttttagccttttctaatatattctgatgtttatctatcaaaaaaaaaaaaatgtataagagaaggatgagaggtcttagactgaagagcttgtgccaaagccccaatgttaaaggacaatgtagaaaaaaatggtcgatcgattctccacttcctatctataagatgcaccaatgaagactgagagagttgtaggatcttttcaaccgtggcatgtcatttgtgtttgccttcttgtgcaccactaaccaagcaaaggccttgacctttaaaggggcttttgatttccataaaaaattggtaggaaggaatgggaatggatttgataaaatggacaaggctaagaaaaaaacatatattttttttgataagtaagagtattgtattacaaaaaagcgctaaattagcggcttaagatgtacaagaaacagacactcacccccttatagctgaaacaaaaaaaatgtccaacaagatgtacaaaaaacaacccacccaatcaatgaaatttattagtgttgaaggaccatcttttataaacaatttagactttgaccaaaataaataaacaaaaaaagctttcagcttttgcatggacaacacactgccttcaaagacaattctgttctttgctttcaaaactgaccaaaacaagcataaagggtccatattccaaactgccctactcttcttacccacaaaagaccctttccaccctaagagggtttcccttactgaggaaggaaacactcaatacactccaaacaaagtaaaaaacagcctccacacatcccttgtctttttgcaatggaaaagaagatggtcaatggactcctcatttgcttggcacaaataacatctatttgctaaagcccaacctctcttctgaacttggttcaaagtttgaacttttcctcatgacgcttcccaagcaaagaagcttacttttggttgcacactagagttccatattatcttcattaggaaacatgagtccggatctaaggctttataaagagactttaccaaaaagttgccatacttcaattccacccacctcaccctatcctcatccataatcactctcttcccactcaaacacaacaagttttccatctcattcatcttccaatcattgaaaggcctagagaaacaagggctcaaactccctcctcccccctttcctcattgaaatagtccaaacatctttcacccaagcctctttggaagtagctagggcaaataaggagggaaaagattcacacaaaggtgtagttccacaccacttatccttctgaaagctcaccctctgcccatttcccaccacaaaagaaattctagagctaacaaggtgcccaaccttcctaattgcttttcacaggcctacatcataccccaccctaacttcccgagaacaccgcccaccatgttcctctccatatttccccgtcattacttgattccaaaatgcctctttttcatttgcaaagcgccaactccagttgccaaagagaaccatattgagcgtagcaaggctcttcacccttagccccttttttcttttatctagacaaactgtcatccacattactaaatgaggttttctctctagagcctcaccttccgacaaaaaatccctttgaatctattccaatcactcctagcaaatggagaatagacataaaataaattggcaaactgaacaaagcgcttcatatcaaggtgattctccacccttagagatatattatcgcttccacatagccaatctcttaattccatctcaagctgccacggattaaaaggagcacccaatgacatccccaaaaaagtggacaaaagacttcccaccttacaaccaagttctgcaaccaaatcttccacattctccacccttcccattgggattgactcacttttatccatattaactctcagcttagagattgcctcaaaccacatcaacaactaccataaaaacctatcagtgtatcatcagcaaacaacaagtggaagaccttgaccccttctaccatgcacctgacaagttgataaaaagcctccatagattgctctctttaaaagacaattaagggcttccatcgctatcacaaataggtaaagcgaaagcagatctccttgttgacaatagatctgttgagggtgcttttggtggaagaagtggggaatggatagggagttggtggatcttgcctgatgaaggaggtgaatgatgggttagtggaggaagagggaggggtagtggagtcttggaaggacagttgtttagtgcagttttgccactgtttgagaatgccaactgagggttttgagggggaaattttgaagcctcttaagagaatgaatgagagaagagaacattttgagaagatgaccaggaaaaagaggaaagggtagaaaccctaaagatctgacttggagctgaagaaattggtgtgtttggtgattattgtaagacatgaggggctcatgggggaactagcttttgttagatgaaacttcgaatcctgtcgtggaatgttagaggggtaaatgatggagataagagaaagatgataaaggcttttattaaatctcagaagatggatttagtttgtttgttggaaaccaaaatttaggaaatgaccattgggattgtgtgaagtcttggggtgggaagatgtttagaatggggggctatgaactcgggggggcggggagagtggtttggttgtggtgttttaggacaatgttacaactgttggagatggaggtggggaatttctcagtttcttattgtttgaagaactgtgagaatagattctgttggagctttacatgggtttatggacccacgttgaagttggatagagaaggtttttagagtgagctaggggtagttagagaactgtggagtgacccttggtgtgcagtagacgatttcaacatgaccaaattcccttcggagcgtagtagaggaggtaaattgtccctagccatgatgggattttcagaggtgattgaggatttagaattgagggaccttcccctttagggaggccttttcacttggagcggtggcttaaataaccgatttaaatcgagaattgatcgtttcctcatttatgaagaatgggaagatcattttacgagggttgttcaaactgttcttgctaggccgctgttaaaccacttcttgattcttcttgatggaggagggatgaggagagtccccacaacatttagatttgaaaacatgtggttgaaggagaagggctttaagaatgttttgaagacatggtgggaggggcttaattttagtgggtctgctagttttatcttggccgaaaagctgaaagctttgaaacctcttctgagaagttcaaattaggaagtttttggcaagtatgaggtgcagaaggagctagctttgaatcaagtggatttttgggataaggagagtgcttgccctttgtctttggaaaagggggaatctaggaaggaagctagagagaattaaaaaaagtgggttcttcttaaagaaacgtcttggagatagaaatcaagggaaatttggttgaaggagggggataaaaacacgagcttctttcatagaatggccaatgctcatggaaggaggctagactcaagattaatggggtgtggatcactaaggacatagaaattaaagaggaagtgaggagagctttccagcttctgctctccaccaacagtgacgagaggcctaacttaagtgagctatcttttgagaggctggaagactttgaggtgatagggctggaaaagccttttatggaggaggaggtgtttgaggcgttgtcaggttttagcagggataaagctctaggccaagatgggttctccatggctttttggcagttctcgtgagaattcatgaagattgaggtgatgatttttttttttagggaattccatgaatctggttgttttgtgtggaacttgaatgcaaccttccaagtgttgatctcgaagaaaaggagggggggggggggggtggtataagtttttggctaaggtgatttctaaggctcaaaacatgttgtgcagggtaggcaaattatggatgcagtgcttattgccagtgaagaaaaaaacatttttttgagaataaacttgaagaggataaagatcaagctcttaaatctgagatagtaagaaacaaatgcatggaagtgaggacatggttagaaaaattatcgcatttttcaatttttaagattttcattatctttttccttttccttttttttttcctgacttttgtaatttactgtagtttagctttctttggcgggaggattcctcatccttctttttgtacttatttttatctatcaataaatctatgtgtcgtttccaatcaaaaaaaaaatttagggagctagcaattgatcttgtttaggtggttcaaatagtgcctcaaatgccaacttgaccaatctataatcgcttctagataggtagatctagaattgagattagatttttgttggaatgcctaaggtaagtgaaatttccctggttatatgatggagctgtggagggagctcttttgttcttttttgggttaggtagggttctttgagaggcatatgtttatttgctgaaggaccatgtagatgttatcaagaaaccttgtaaactagttgaatgacttgagagagaaactggaggttgacattgggacaaagaggggtgtgccactttctagggactttagtggggattgcattccccttgatatgttctttgcatccctttttttgctttctttgtttttctctttaggagtctttggtttatttggttattctttttcttatttcccttgtgcccatgtttttttttttttttggacttgaaggacatctcatgtcagagccctttttgttctattttccactgtttataaaagaaattcctattccttgtaaaatattatataagtacaataacattattcttgtaatactagaatagtgttgagaataagaggtaatataaaaacacataaatgaacaattttagaggaatttataaccaagtcattaagtaagaatacatgggttgtgttggggagcctaatctgaccaaacctgttccggttgagtttgttttggcttgtttgtaattggtccataaatctctcaacctgaaacttgtttatttcaattggtttaaattgccaaggaatgtaatgtagtaggtgggaatctattatgatcattcatacatatggatcttttagttgtatagatggaagtccacgaccgttgcctatattttacaggagcaattgatgctagtggatataaacttatgaaaggtacatactgttgtacaaggaaaagcaagtggagattctttagctggtttaactatggttcttagtcatggaacttgtttaattgttctagcaaacttaaggaacaaatgctaagtgttgctggtgggaatgtgtgtatttgtatatgtgtatgaatatttagcaaatggggattgattgcaacattcaacaaaaaaaaaaaaaaagtttattacactttacccccataacccatagcgtgttttgcacattgccccatcaaatttaaaatcgagcaatgtacccttcatactttataattacatacaatgtacatttttggagtgatagtgataaattttttgacataaggtgcatgtgctttccacctgacttgtttaagcgaggacaaaagggtaattttgcaaccaaaacaaaacccctccaaccctcctttccttgttgttcgttcctctcatcttgtcgttcctcttgctgaatccccaaattgctgttaaagccttaaaatccaaggaagctaatgtagatatggaagagcagacatcgaagagaagacatggagttccacgatatgttttttgtcttgcaatttctttagtagctataaaaatttcgacaaagagggttagggttttgttttgatgtttcaaaaaatttggagaaatatttttttaaaactcaacgaagaagagagatgaaaattcgatgtaatgttttagtttgttgtttcataatggagttttatttgatgtttcagaaaatttagggaaaatttgagggaaatttggggaaacttatctgcagtttgttatgacatttttaattttttttttccttttaaatttgggggaaatttggtttgttgatattaatttatttctttgtagatctacatagttttcaattgattttttatgcatcaagtgattttttttttttttttgcttaatgattggtgttcgttttaattatgtctttgtttctattggacatctttgtttttcattcattacttccgtagtctcttacaattttgatttttctcggtttcatttggatttgtgcttgttttgatagaaaatgtttttggagatacattccaaggttttttttttttttttcggttaagggtctaggtttctggattgtgaaaggttttccgagaaagtattttctatcaaacaattaagggaaccttttctatcttcttgcttgccctgtccactaaaccattaattgatacgtggttattgttacaagatttgatttgtaaagacaaagatgttgtggttgttattacaggatttgatttgtaaagacaaagaagttgtggtcattataggatttgattcaacaaaaggaatgaatgacagaggagagatgggctagaggggttttattatttttggttgcaaaattacccttttgccctcacttaaataggtcaggtggagagcacatgcgccttccgtaaaaaaatataacaccgtcactccaaaaatgtacattgcatgtaattataaagtatgaaggatacattgctcgattttaaatatgcaaaacagttaggttaggggggtaaagtgtgataaacccaaaaaagaaaaaaagaaaaaaagaaaaaaaaaagaagtagagaactataagtactaaaagggtcttaaactagtggcaagttatcgataaagtttaaagaggacaaatttccaatctccaatgaattcattgaccatactgatagagatttaggagataatctttcaaaatcaactctaaatgttatagacttgaaagctcttgatttgttgtgttccttggaaacgctagaataaacacaaagaactattctccatataccaaaagttgaaacctttgtaacgtttcagcttgggttggcatgtatataagaaatgattcaatgcctttggttgattttgtagattagttgggttcttgttgacagggagggtggtttttgtggcttttcttttgaggtcttacctctgggggattgatgtttacgtcttgtgtactttggtataccttttcttttgctatttgtatatactatctttctttgtctatcaaaaaaaaagaaaaaagatctccgtatgcattttcttttcttgccaatggaattatgatgccaactagtcgaattatccttaaccaagcaaagcaaaacctatggaactttgaaagtggaaaaccacaagactataaactatgtgtacatacaacatgagaatacctgactcatttaattatgcgaactacatcaatttgaaataagtttaccctttcttaaaaatacaaaaaaatgactacttatttgctctataatgaatcaaagtcaccaaaatgtttatctaccacatttcctactaggatgagtgtgcatttgtccatattattttttagattaaaccgcattttgatgaagaaaaatccactttggtacaataatttttttttcattagtaagaaaaaaaaatcgattgatagtgttacaaaaaccatacaccatggtacatgtgcaatgggtaatgaaaagcataacctgaaagagagaaaacacaaaaaaaactacttttgcccttggttagatcccacctaacctacataatcaattaaaggcattgtcccttgtactatgtacatcataacccataatgtcggacttctaaggaaataacaatctagtgattaaaccgattactactcattttcaaatgctttttgattcactctctttcaaattatccacaaaagggacaaaggagagactttccaaacctttgtgcattctttttttacaaaagagtcgagctaacttaaaagagtcttcctaaccgtagaaagaagaacctaaactacattaaacatagagaagcaggctgttataacactcttgctttggtacaatggagaagaatgtgatcaattgattccactttgcttttacaatggtaatatttgtttgctaatgaccaccctctcctttgaatccggtttaaagtcaacacctttgcttaactagctttccaagcaaaaaaaagttactttagatggaccaagaattcctaatgatgcacattagaaaaggaatttagcaccctggtaaaaaaaaaaaaaattgttccttacgtccattcgcaccatcttatctttctctttcctcttcatggatcttctttgtaaccttgagaaaaaagtctctacaatgtccaactctcaatcatttgagtgtgcaaagaaaaggtgcttcaaatttgagtaagccttcccccttttgaaatatatcatcttcacatcaataacctttggcaggactcctcttctacgctctttgaagagcatagacctaaataagtatattgaaggtccccaccatgccccaactccaaggctagttcctccctattagcaaacccccctattgggaataattcacttttctttaaatggttatactatgtgtcatggaactataaggtataaccaacaaataacaaatgtgaaatctttactcgtaatgatacttgcctcatcttaaaaatcatgagcaaatccgccatctattgtgatgtacacaactttaggatggttgcctacaatcaaattgatggacttaggatttttatcttttagggtttaagaaaaggaacaaaggataaagtttatggcaatgaaatgaaataaaataaaaatatagagaaagaagataaggataaaaagagataagagaccttagagttgcactaaaaccctttaggagtctcacctagtagaaaatcaatggtatctcactgttgggaattgcaaggtatgcaagaaaacattatattcttaatcatcaatattttggtttgcatcaattaatcttatttatgggcttctctaataaatccaacttctactaaaattttaataacctattataactctaattataattttcctataatagctactactaatttgtctccaacaatattaatcctaatttaactctctaactaatactaatcctacttgagtttatttatgcctttccttcattttcttgaatatactttagaaggctttctcccattaattcctcttggcttgaaataacttgacttcagtgacttacatgcttgatacatatcatagagatcatggttaaactcttaaaaatctgttgttgtaatccatgttttttcagtggtggtttgcattgtcatttcaccaaaaatttttggtatccgccttgttgactagacacaagttgatcttcaagaacatacttgatctcagaacatgagctaagattaggtggcaattgaagatccaattcttgtcttacctctctttgatgaccatggtagccaaacgaatcttccacattaaatcttggactgaaatgtaattatttttagggaaactctagcaaataagcattctcatccaatcactttagcatccgaaatgaactcgctttcttagcttaaagtttttgatatgtgttttggttgaaatctttctagatgtaaatgaaccattactagattaccttcttgaaacagaatgtatcattgatgtgtatttgatgcctctttatagttcttattgctgattttgattttttctcgtacctttccacgtatatcttgtacatggcgcataatgcgcaccttttttggttgtgtctccttcaacttgttaattggtggaacttctttcatagatgaaggatcttctcatgcctattgtgtatgggggtgtgtattttcatagtcatcatgttgaacccttctataaaaaagccaaggtcttccaaacaaaatatgactagcttttattggtaagacctcacgccatataaactatttgaagtccttaccaaaaaagaatttgatctagcataaaaaacttactggaatggaggtatcgttaacccatgctacttgagatggatttagatatttctttgtttgaaggtttagtttctcaacaaaactcttgggaaactatttttaagctactacctccatcaatgatcatggtacataacctccctttgcaaggcataccctttttgtcacattgtcatcttgctaaaagattttgccttttctttgatttctcattataaaattgctttgttcttcatgtggtctatagggcgattgtttaaattgatggcttgtagtctcatcttcaattgattgtttttcttgaatcttttttaataactttcgtgatttcatcaaggttgctatttagttgcattatagcatcatgatggaactgtagtgtagcaaaaatttcctcttgaatgtgttgtagcaacatcatgattgttagaagttatttttgaactcatgcttgcataagttgctacacttctcaattgcatacgccttcaagccaagaacttttcgacttttataccaaaagtgttgtagggtaaccctatggttgcctacaatcaaataggtgggttagggtttttatcttttagggtttaaggagatgaacaaaggataaagtttatgatagtgaaataaaataaaataaaaatatagaaaaagaagataaagagaagggatagagaagaaaatggtgtcatttgcaaattgtaacagagatgctctagtcctatccttacccactatgaagccctcagtaaactactttcctttgctttgatcatcatcctaattaggacatccactactatggtaaaaaggaaatgagaaagagggtctccttgtcttaaccctttagtgcccttaacccatcctttggcatttccattaactaggattacaaaacttgttgaagactagtagcccctcatctaggatttccactttgacctgaaacctttcctttctagcacatggtccaagaaacccgaatccacatggttgtagaccttttcgaaattaattttgaaggctaccccttcctcctccgacctccttttttcatccaccacttcattagctatcaaaacagcatccagaatttgtcacctttcaacaaaggctccttgggaaatatcaattgtttcatggagaactctgtgtaaatgccttgataaaacctttgctataatcttatatagccttgtaaccaagctaataggtttgatttaattcactgtatttaattctttggttttcttatactttacactaggggcctttagtttaagatttacccagttggactttctttaagtattcctagattcttgtatgaaatggtttaatgaggtcaacaagtggagttttgggacggggtggaaagggaaaggagcttgtctgaaggtgaaactgaactgaaaaaggaagccaaggagtcctttaaaaaatgggttttattggaggagacccactggagacaattgtccaaggaattgtggcttaaggagggagatagaaacactggattcttccatagaatggctaatgcgcatagaaggaataattctctggagagaatgaaaattaatggggtttggttgactgaggagaaggagatgagggaaggaatagtgagcgcctttcagcaggtgctctctgaagagccaggctggagggcagatgtggagggactgcactttaaatgtctaagtcccagtgaagctgaaacattggaggtgcaattttctgaagaggaaatctacgcagccttaatgggtatgaatggggataaagcgccgggtccggatgggttcacaattgcgttttggcaatcaagttgggggttagtgaaggaggagattatggatctgtttagggaattctataaccaacgttcgtttgctaacagccttaactccacctttttagtcctcattcctaagaaaggaggggctgaagacttgggtgatttccggccaatcagcctgttaggaagtttgtacaagctattggctaaggtgttggcgaataggctaaagaaagtgcttgataaggtggtgtcaggggatcaaaacgcctttgtgagaggcaaacagatcctggacgcgtctcttattgccaatgaggtgattgatttctggaacaagagaaaagagaatgggctgatttgtaaattggacattgagaaagcctatgacagcattaattggagatttctcatgaaagtgctggtcaaaatgggttttgggtcgcggtggttggagtggatgtggtggtgcatctctaccgccaaattttcagtcatgatcaatggggtaccagctggttttttctcgaattctaaggggctaagacaaggagatcccatctccccgtatctctttgtgttggggatggaagttcttagtattctaattagaagagcggttgatgggggcttcttatcaggctgcaacattaaggggagaggggaagaggagatgatagtgtcccacctactctttgcggatgacacaatcatcttttgtgaagctaataatgagcaagtgtccgctctaagctgggtgttggcttggtttgaggcggcttccggccttagaatcaatcttgataaaagtgtcctcattccggtgggtgaggtggagaatattgaggagctggctgtggaacttggctgtaaaataggaatgctgcccactgtgtacttggggctgccccttggtgctcaccacaaagctgtttccatttgggatggggtggaagagagaatgaggaagagattagcccaatggaaaagacagtatatttcaaagggagggcgtctcaccttaatcaagtgtacaatggccagcctttccatatacattatgtccctctttcgaatgccgaagagtgttgtaaaaagacttgaaaaaatacaaagagactttctttggggagggggcagcttggagaggaaggtgcacttaattaagtgggaggtggtgtgtactagcaaggaaaagggtggccttggcatgaggaggattgaatccttaaacaaagcgctgttgggtaaatgggtttggagatttgctgtggaaaaagataatctttggagggtaatgattggggtgaagtatggtcaggaagagtttgggtggaaaactaaagaaggccggggagcatacggagtaggggcatggaaggaaatcatgaaggaagctaattggtgttgggagaatatcaagttcaaggtagggaaagggactagaataaaattctggttggatcaatggtgtggggatgagaggctgtcccttgcttttcccttgctttatgagatggcggtcaacaagaatgcaacggttaatgagatgtgggaccatagaagtggtccaagtggctggaatctcagatttcatagagacttcaatgattgggagctggatttgattagaggattgcttattaggctcagggacgtcaagctctctttagaggaggacggggtgctttggaaaggagggggccaggggaagtatggggtgaagcaggcctataatgggctggttgttatcaatgcttgcgactttccgcatagaggagtttgggtgaacaaggtccctaccaaagtggttttttttgcttgggaagctgcgtgggggaaaattcttaccttggataagcttcaaaaacggggctggcagttcccgaaccgttgttttttgtgtgtttgtgaagaggagagtgtaaatcacattcttcttcattgtacggttgtaagggccttatgggatatcgtttttgcccttgtgggggttcattgggtgttcccagagctggtgaaggaggctttattcagttggaggggcccctttgtggggaaaaaaaggaaaaaaatttggaattctatcccgttgtgtattttttggacggtatggaaggaaagaaataggttagcgttcaagggaggggtgttaaatatacagaaactcaaaaattcttttgtttgtaccttgtggagttgggctagggtgtatattggagaggagtcctcttcactcttaggtttttttgagtggctagcgaccacttaagggagggtaagggtctttgtttttgtgctctcgttttgaggcagatttgtatacgtcctgtatgcttgatggcctttgccctttaatatatttgcgatatttatcaaaaaaaatggtttaatgaggtccacctctggagtgtttcatcttcaatttaacagaaaaaaaagaaaaatgaaaaaagaaaaatattgtgagaaactctagattttcaacagaaaaaattccatatgatgcttatatacagtcatgggtgataggaaaagtgtttcctcaatatcgatattctgaaacatattgaaccttggcaaaatggtttaacagaatatgctattaagcatcatctaggcattataattcacctacaagtctttctggcccccaaaagaggttgattaatgtataattgtacttcatctgggcaggaatacaggcgagttc

SEQ ID NO: 13377 - DNA, 1980 bp, Vitis vinifera
  Intron number 16 from transcript GSVIVT01036908001 (locus GSVIVG01036908001) derived from phytozome v7.0 (chr-ID chr 2; pos 17792489 to 17794468 reverse strand)
gaggtccgaggagggtatccttcacatttcgtaaggtatgcgagattttagtttatgatttgttcatgtaccaaactgctttgttttagaattttctgatctattttcctttttttcttttttatattttatacatgcaatagccttgagactaagatagtttgacatacatttgtgagacaaatatattgtccagtcacacatgaaccacattcagagaggttaagtgcccctactcatcccattttaactagtcccttctaacccatggttgaccccactttacactcctaactgttgaatctataacattcttgggcatttctagatgatgaatggcagttgatccttctaggatgcactagaagaatgtgtagcttgtaatagtcctcatttacttttctgtataaacatctcatttttcatttatactagaaaaggaagtgtgtattctacttttgcacaaaaaacagtttagggcttctttggtgctgttgtagcttctagtagaaagaattcaaattcagaaccctcttcctgacagcactactgaaaagcatctcactgttaatttcactgagaagtgctttagatcttagcccctttttttgcttcaaaatgctttatctttgcaattaagtaccatgtaaaacactctgaacggtttaaaggagcttttaggcattaaaatggtacaccatcccgaggaagacttcctaaataaaagtggagcagcatccatttgataatttagtgggaattacatcttaacatggttttgcctcattttggaccttaaaactccatttggactgtgacaagtttcagggaagatatgagggaaagggagaggaagcaaagaaggaaagaaagagtaacaaacaaagaattaaaaagtttaaatgttataaacttttcctttcatgtttctccaattttatttctcttctaaatagagataaaagaattctaaaatataagtttttaagtaatctttatgttgttttattttatttttaatgacaattgaaacaagagagctggaagttccttcatatatctttttttccctttccttggtactttccatgattcaaacggagtgtagagtggttccttggatctttatgttcttgatttattttaatataggttgttttttccccgctattaaatgggagttgctctctttttccccctatcactttccaaaatggagtggcttccatttttgtggttcgggtttcatgattctgtgaaaccatagtctgatattagacagatgcacacccaccatatactcttcaccatgtgcgagttgttacctgtttttaggaaacatagagctgaaagtttctgcttgaccagacttgatccgaaagagttgagacctgagaccaagcctagggcaaggctaaagtgccaaaaaggcaagacctttaaggagaagctgacctaagtcaagactgacaagctcaagatgaggaggtaaggtagacttagaagaaagaaaggcttcatctgccccaaccccctaataaagtcgaagccaaccagtgatctacctaaaagaataacacaaaattttcgtcttttccctcaagatggtcagttgatttttccttagtggaattgaaacagctgttaacacccactttattgtgattttgttttcctgttgaacttgatactcagctgagttttgtttcatatgttcttcctcttctttggtccttcggttcctttttctgtcattcttccttttctcagtcttactaatactcaatgaggactcttaccatttcttgataccacacacaaataattgcttgcctctatggtttaatgtgataatgcacagatatgtagagagttggctgtataatgaaatatgaagctaactcatgaagttatttttatcttaatcacgaggaaaacgaattgcttccatttattgcaggtgagaacaggtccttgcca

SEQ ID NO: 13378 - DNA, 8837 bp, Vitis vinifera
  Intron number 1 from transcript GSVIVT01008387001 (locus G SVIVG01008387001) derived from phytozome v7.0 (chr-ID chr1 7; pos 2576753 to 2585589)
cttctcaatctgtccttaatctgcatatccttaacaagtgaataagcagccgacaagctagaattttgaaacgtttgttctctttgctgaatctcatgactgcatacccaagctttggaatcacccccatatgaagaattgatggccataggacggataggaagaagagcaaaaacgagcatggtagagaatagcggaaacgatgggaaaacagacatgggagattaaaagaaaataaaaccacatctcatgatttttcaataggctctggttagtgggaataggcacagagatatatgcttccgaagacattaatgacatcgaaaatcaaaacaaggcaaacaggcaagtaaccaatctcaacaaagcaaattgtggcccttttcgcccacacaaaaatcaacaaaacaattatatattcaggaatcgaactcacggaaaaaaaaatcaaatataggtaagaattccgaaagcaacgaggtgcatacctggacagctttggttgcaatggctcggcttctggctatcttttctcttccttctgaggacaattcccagataaaaatcctcttttttgcttgttctttcttcctcctcctccctctctagactccaatatgtgctccccctttctcttttccttttctcacctatatatatcacccctcaacacctaaatttgtttccaaaaaggagaattctcctattttccttcttcttctcttctctttttttaaatcttccaatcaaaagcaatcttcccaatttcaaattcccctccaaaacctttcaaggagagtcccgccttccttaaactctaatggtaagttttccttgcaaaaaaacataaaatttttgaagttaaataattgcatgaatagataaataagtaaataaattagaaaatagtaaaaataataaataaataaataaattaaggaaaataatataaagaggaagataaccaataaaaagtgaatgataatcataaaattaaaactaaaaacaaaataaataaataaataaataaataaaataaaataaaaaataaaccaataaagaaaagctgagcccaaaagccatgtaaccatgcaagtcatacatgtcacactaaaaatgtccaaatgggccaagtgtgcctaaacgggcctagggtggtgcgtaatgggccaagtgtatctaaaggctatcttaaaaaaacaagaaaagcctaagtctaaattagggctgccaagggtcacaataagggatcaaataatccctcaaccaaagtctccaaggtgaatcagaaaaaggtaagtggtgagtaatactgggtcaccaaggaactactatggggcactgaaaacgaatttaaagacatgtgttaaagggacaaaattgagggtctacaacttcttttgtgtgtggaggaggcacataaacaaacctaaattaagaataaaaaatatcattaacacaaacaatatcattaaaggatcaaataaaaaaacactttggaagttaaaaaaaaaataacataactaaccttacaatatgatggtgtagtaaccaagactcatcaatgtaatgtacagtgatagccatgtagcctttcttttgatttgatgtccacatatcagttgtgatagcaactctactttgaagtttctctaagtagctaatcatcttatctttctcaacctcataaatcttcattatatcacccttaatcgtattgcgggaaaccatcttaaacaagggttgaagactagtagcaaattctctaaaccccacatggtcaacgattgaaagtgggtactcatgcaatataattgcacgtgcaagcttctctcttgagatttcttgatcaaaggtaaaaccaccaatttgaacttttccatgaccttttctctctactgccaataattgttgcctactatcaacatttcttcgtttcatgcacctatctatgtgtacatgtaagtgttttgtctcattcttgctatcggccttaagctttcccttacagtgcttacaaaaagcataatcttgtccatcttctatgattttatcaaaatcattccaaacaaccgaagtcaactttcttcttttagataccaaagttccatcagtagttgaagtactgcctgtaattggagttgaacccgcacttggcatggaaaagttttccccttcttatgatgtcatttttcttaatataaaataaagtctataagtaaaacattcaaacctaaattaataacctaaagcttggatagggcttgaagcaagggtttaaaaggcaagattgtatttatgttaacctccaagaattgcaagatgtcaacatagtttccattaataggaaaataaatgtaatagaaaagcatcgagggcagtgcaaccgaaaaacacatgcagtttatatggacagcccacagcaagtgagaagaaaataaaaaaaaaaaaaacagaaaacaaagcaaacaaaagcaaacaaagaatattctaaaaagtaataaccagaaaacaaaacaaaacattccaagaatcattatacaaattatcatgaggccatgcaaataaattctaatttttcaggattatctcttcctttagatccacctaagtttttgtgctatcataatatggaagcaacaagaatgcagaattcctcaatgcatttctagagtcaaacaaaattaaactttcatataaccagtagaaaataaatttgcttgtagagaacataaaaaatgtccaattgcacattcacaacctcatacttcacatgataaagaactgatatgcaaattaaacaaccatttggtgttggataagtaatcctggtgagaaagaagcaagggaataatgcaaggatcaagtaaaatatgtatgtatgtatatatatatatatatatatatattgaaccaactattgaaattcatgagaatttggcatgactaagcactaaatctgagtttatggcgccacaatgtgtgatgtggagagtttatgcaagaagctggtagactttcaaagagccaacatagaattgaaggaagaaaattcgaaggagattgaagaaaatagatatctgtcaaaaaaattatcagatgtgaaggaggagaagtgcatgttggaagaggaaaacaatgctattctccatgaaactgttgccctcagtaacctgtctttggttttgaacaacttctggtctgagaaggtaggggaactaaaagcacttgctgaagattttggcaatctccatggggttaatagtgaccttggggaggaggtgggaattttgacagagaaattgggattgcaagaaactgaaaatttacatctgaaagggcttgttgagaagttggacaaggagctacatgaagttacaaatttaagtgatcagttgaacaatcaacttttagttggaaaagatttgctaagccagaaggaaaaggatctttcagaagcaaaacagaagctcaaagctgcacaggatttgactgcagaattatttggcactgttgaggaattgaagagggaatgtgaaaaatcagaagttctaagagaaaattcagagaagcagattcttgaactatctgaagaaaacacaagtcaaaacagggaaattgaatgtcttcgcaagatgaatgggaacttggagtctgaattggatatgttacatgaagaaattgaagaatatagaatcagaggagagaagttgaattcagagcttcatgaaagaagcaatgactttgaactatgggaggctgaagctacaacattctactttgatcttcaggcttcctctgtccgtgaagttctgtttgaaaataaggtgcatgagcttactggagtgtgtgagaatcttgaggatgaaagtgcttcaaaaagtatcaagattcaacagatgagagaaagggttagcttcttggaaagtgaaattggaggactgaaagctttaagatttcatcataccaaaaggctgtcaagggaaaaccaaacaaaataccgaacttcatatcaagcacagaatgaggatcataccacccaacaacaaggagcaacagatgagaaaagaaccgttgtctccaatctgagccttacgaagaacaatatattttttttaaacaaaaaggttgagcaacttcacttttactaaacttctatgaggaatctatcttgaaaaatcatatatattaaggattttttttatttttaatgggaatacaaaaatattattaacaatggctaacaaaaagcacaccaaagtaggtaaatcgtatacaaagggcaccatccctaagtaaaatgaagggagagagagaaaaaactacctcccctaattaataccttaacactaaggaaattttaggacaaaaatggtttcagacttgtttgggaaacattgatttaccaatggtactgaactaaaaaaaggtttagcatagaaacactcttacatgtggatgactgatgacagcaactcacacatggaatccatggagaacctaaagtaaatcaacccacaattatttcccaattaatcacacccctactaaagcaacaggtttaagactataaactagaaaacgggtgaaatattggaggaaaagagcattttataagcagaattgggaactaaatagaggaaaattttaaaatgctcctccctacatcaccaatctatctgaaactacacatactctctcttccccctctacaaacactgatcttaaatctaaaagtgcaaacatagccccaatttgccttacaataatccaacccacaagaccaaagaaacatatcaataagtcctatattacactgacatacatgacaattgacaaaatgaacctttcccaaagaatcctggaatgaaactaaatctccaaaattattttgctaaaaaaaattccttcttataataaattaagtaaacagatataagaagttgcttttgtataatggttcgaccaaaccaaattgttgaattagcctagttttacagaggaatttgtctctttaggctccaaatattaaaaatccgagattcaaaatttccttttccacagcttatcaaagcaaaaaaagaaggtatatgcattctttttcctcaatttctcaacaaccaaagaaaaaagaatcaagattacaagcgcttcaaatcttggagtgagatgactcaaacaatgaattgaaattgtggcacagtcttggaagtcgagctaagaatttcaatgaataactacatatttggtatttagggatacttacgtacttcgttattctgctgttaatatgaaaccctagaaaaatttcacgataagatccatttctcaatatgaagggagtggaagcatttgacgataagatctgcttagcccctattaagattcacaagaaacggattcaaaaccctaaatagcaacccgaaaactaatagaaaaaaaaaatccttcaataatctgaaactggaaatggaaaaatcctaaatctcgtatctcattcccgaattagaaacggaatacaacaccaaatcaaggcatcattcaaccaaaaaatcaacaaaaaatcttaccggtttgtagatatgtgaagataatagttgtgattcttgatttcttgtgaatatgggataaacaaggatgaatcgagaggaaatggattttcaaatggattatctgatggatttctccattgagtgggaggaaaaaccctagtgtcgataggaacgagaactgagagaagaagacctaaaatgaggagagaaagctaatatttataagtggggggtaaagtagtaatttcatattcggggcggggcggggcggggcgggtcaaattataactacacctgaccccgccccgaacccgattcgggttttaaaaaaaagtcctgaacccggcccatccccgattgccatgttcctatacccgtcccaataggggtgggtcgaggcgggtgacctgggaaacccgcgaaattgccattcctaattgtaattatagctttgcaagtatcactttcttttgaagcatgtctccaaacattgagactctctcacaggatatgggatacctgtccagatccttgagtctaagattgtgagcatccattttatgattctgaggagaagaatctaagggcctgtttggttgctgtttttgaaaactgttctggaaaacaatttttgagaacagtttttaagaacagtttttggtgtttttttaaaaaaaattgtgtttgggaactgaattttgaaaaacagtttttgttctcaaaaacaaaaaaacatgtttggttgagttaataaaaaaaaaatttagaacaaataaaacaaaaaacatgtttgaaagattttttttttcttttctaattaataaaatattttcttcaagtaattttatattataaatttataaataatttttagatatatagttcatttaaattaaaaaaattatttattttattaatttaaaaataaaaatattttttatatttttttaaaataaatcaaacataataaaattatttttattaatatttttttatttaatctttaactttattaaaaattatagcatattttattaagttgagataaaattgttctcatgatgttaatttttttttatctctactaaatctaaaattcaaaatgccacccacttttccacccacttctctcatcgggcatcaagaagccattttctaagttgccctccagccgagagaatccgtaaaaggccctattttcctctgccactctcaatcctcacaggtactaatctaatcatgttattattattatttttttttttgcaacccccgtttgattcccaagaaaatccatcccccattcgatttcagggaaaattcatcctcgtttgatttccgagaaaatccaagcaaaaaccccaaggaaaacaaaaaaaaatggattttcttttgctccctgcgttttctggattcgttttaggggtctctttgctattgtgcgattggatttaaatttcacgaaccttgaatcaaaactgagaaacaagaagaggcgagccactgtgctggagaagtgatgaaaacgggaagaaaaaaaaaacacgggaaacagattgttttttttttgtttaattttgttctgtgaacagtaaaaaaacggggaaaacaagattttgttgttctctaaacaatgtcattttgagaacacgggaaacaacaaaaacaaaaatcactctctcaaccaaacgagtttttggtgttttttgttttcaagaacagaaaacagttcttgaaaacactaaacaaacaggttctgtttggaaagtgttttcaaaaacaatttttgaaaacatttttttagagcaatttttaaaaactattttacgatgttttgtagaataaaagtatatttaggaacctgaaatgttttcaaccttgtttctatgtttttaaatgttttaaaaataacttttatatgtagtgctttatttttaatcattctctatatttgtataattattttttaaaattaactcttagaaaacaagtgaaaataactagaagatattttctgaaaatactgttttctgttttaaagaaatgaaaattgttttttgttttataattgtcaagcgagatttcttgtttttctgttttggaggatagaaaaatgttttaaaaaactttgccttcaactctatgatcttgatcctctatgagtctctcaaaatgaattcttgatcctctatgatcttcctttgccaggagatactttttctctttcttcattgccagtctcataaaatagccttgagttgtaagtccctttacgtgtttcattctaaaccgttgccttcaactcactgcttccttattggccacaaactcagctttcccatttgcccaaaggcttcaaatgttagcccatcccttcagcttaatcaaaattaagaagttgagaaggttaacatgctggttcacaagaaaacttctcctgtggtagcaatgatttagtagcatcaagataatcattatctttgagaatcgaggctttctgttcatgaagatcaccaaaaacccttttattccactctaaatttaccttcagtgatggttttactgtctcgatgcattatgattgtcctcctgaattgaattactgaagtgaaggacgtagttgaatatgtttgtcatctgggcccgatcatcctcactgctgagaaagatggaaactcttgatcccccttctatggcaaagaattaaaccttttagttttaggtttaatgctacccaacacatagtgctccaccttatcatccaggtaggcaaattttggttctgaaaatcgttccaaaccatggtttcataagtatggttaagttactttttcactctcctgtcatctggataagtggcatccacctgctggaatagggccctgtggtttgtctgttgtacacatcgccatttgactaacatctttaccctttatccactatgtaaaagccataggaaccatctgtttttccccttaggcttagtgctaatcttaccagctttgaagcaaactccctaacaaattttgcacaacttaataaaagatgttaataagaactgaacttcatatgctcattgtaaatgaccaaggtgttaaatgatcttcagattctccatttagacactacacttgttgagaataatctggaaagatcattattctagactgtttgataatatggaaattttcaaattgtctcttcattttgataaatgagtaattaactatcacagttcttttaaaatgttctcaacacttttaatatgcagaaagcagttgaggg

SEQ ID NO: 13379 - DNA, 4278 bp, Vitis vinifera
  Intron number 3 from transcript GSVIVT01032336001 (locus G SVIVG01032336001) derived from phytozome v7.0 (chr-ID chr1 1; pos 15183153 to 15187430)
tgcaagagagctttgacacaaaagtatatatatttgtttagataatgaaaagtaagagggaagaataggggaaaaagataggatttggattccttttctttttccctctccccactttccaagatcacaacaaagtctttatctttaatttttcaatacaaggttatggatccaccatctccatagataaggctgctaccagctcagccctgtcggaaggcccatcccaaggaaagcccgcagttgatgagtgtggcgggatgggttcatattctgtttcatggggccttgcccacgtctcttggcccgggtggctggcccataccctttcactcgtaccatgcatctaaacatactcaatatccatttatttttgttcatgcgctctgaaccgggatgatccaatagaccaaatcatggtgtagagagtgagaacagagttcacctcttcaggcgttttatcgaggcctcgcttgttggaacaaccattatttgctaagttgagacactggatgctatctgaaacttttgctctttggtggggttctaccgttgaggactccgatgggacgggtttagtcatttgcatactaggcaaaccattgctccttcgactggtcgtgcccggtcatcactcacattcttaataaattcttttgctttggattagacttagcctagaaggcttgtgggtttattctcgacttggatgagctaaacttttaaagtaaaaacagcgtgcggaagcaaggaaggaatggattgaatttattatcaatagagaggacatgtattccccgaaagcaaggaagttcgaaactttccacatgaattctttaagcataaattagaaggttctcttttctctttgaatcgagattttcaaagtgaaaccggatataaaaagatgtccattaatttattaaaggacgacatggaaatatgaagaagcttgtgctgtcggccttaatcaataaaaaaagggggtatatattcataatatttgtcctaaggttctcaaaagactttcaaaagtttctaggattctcaggatattctttcatggatgtccttcccatacccatttgtttaatgcatttctacaggcaatgcaggtccaaaccctttaaggaggccaataacataagctttatcgatctatatatatatataagtgtaactttttataatgggtgatgcaggtccaataaaataagctttatatattatatcaagtgttactttttttaaatgataaacaggcacaagcataggctgattttaattatatactaatcaataacaaaccctgaaaaatatttgttaggcaagtttcattgtttctataggggtgttttctcatgcataagagtaactgatgtgcaattatttacttttcaacacacatcatttattattttattttattttacatatatagtttcacttgatcagctaattaatagcttaattggcacaatgataataaattgataatcatagcaactcaaaacatattcatatctacaagccatcctagccttaatcttgaggtatgaggttttttgttttcatacataactgcaatgtctatttattcatttctttttcatgtgcttggattctttagtactttctgataccaggagtcacagagatgctgtgttacaatttgttacgggtaatctctctctctctctctctctctctctctctttctctctctcttaattgagagtgaaaataagtagtgatgtcataaattgcatgaaaatgaagacaaaaatcataccttaagcttaatttctacattaaacatattcccaaattagtcaattgtatgctaccttgtgtatgttcagttttctcacattttctattagttgttgatgtttacatctatttttataaatagtgatgatcttaagaatttcttgggacatctggaatgcaagagcagggtataagtggagttaaacaattaaagtagcatgaagatcaatgatgtagtccttttttgatcaataaaagttgaggatggttgaagggttggttagggatgttcaaatgagctcaagtagtatatatattttttaatttaattctaaactctttgaagattaatctcacgaagttttaaaatatttggacattgtttattaatgcagaaaaatcgagaaagattggtgaaaaatagaaaaaattctgaagaatctaataggtattttggaaaaaatggtgccaccctatagcctagtgccatttttcatagtagcaccaccattttgagcaaatgaagcccacccacaagaaaaaatggtgccacattataacctgccaccattttctccaaaattgcccttattttgttttggaactccaagaatgcatggaacccacattttttgacttttcctaagccgctattagatctcccaccttgtttttatgcctccatgtggtatatgacttaggataacatgagaacatctatttaaagagattttgcaggtggaaaaaaaggattttcgggtaaggccccttggtagatcttcttcaacctccaaccttgggatacttgttgtagcttgaattaatctttgtaatcttttctagcttttaagagattgttatgtattaaactcttttatcttgattgtgtttgtatttagctacatttactatttagttttatataactttaaaactttttcttggattttaatggttcttatttcatactttatttttattattaattttgattcaattttcatgtctttgagtagtggattaggccaaggagaacggaatccttacaacctcccttctacccatggaatgactcaaatcttggacatttgatgatatattcatcttgtgagtcggataatttgtttttaattagaaaaccattccttgatacttggaaattagagtttagaagcttaatggttgagaactattttgacttgagactgccattattgagctcttaatactatgatttgacaattaaataggtagtggaggctccaaggatagcataagtaatttatctttgactagaatactatgcctagatgcttgaaaattagagtttaagggcccctttgggggtatctcaaacacttaatggtgaaaaccattttgacttaagacgaccattatggagcctttaatgctgcaatttagcaagtaaatgggttgtgggggctttaaggattttacatggtggtccaattcacaagtttgaagcattaagtttaattacataatgcttgaattgaaaattctccaactgagtgcacctttaggtagttttggttgtgttagcataatcgtgggtcctttcatgaaaagaagaaagcccaaaggaccccttatccttaatactttctccctataggtgattttccatctcattagatgcaagctttttctccaaagaaaccccaccccacaagaaatccctctaaattgtctcatgccttaagcttaacatcttaggcaagacaaaaagagacatttgcaaaatgggaaggcttgataaggtgcttttaataagattaagcctcccatctttagagagataacgtcttttccacatagccagcctcttatggactctctcctctgcgaaatgccaccaagtcgttgattcatagaaacattaggaatattgcccactgagttgggcttatatattcatattttgattactctcatctttgacattttgattgagcctgagtttatttaatgatatctaacagagatgtagccagataaaagattctaaattggttaccaattagaattttaggttatcaccctaaaaaagataccatccttgatattaaataaataaataaataaaattaaaaaaaaaaaaatcttcttatgcgatcaaaattcgtttacacaatccaacaccattttcaacaagtaaagctaaacagagatgactgaaccatgcatatactacagaatctaagaaaagcctcaaccgaggaacaaatgaactggcttggccctgtatatgaaagacccaagctcaggcaaagtggggatagctgaagaaccataatcaagcaaagcaccaactacataacccacaacaatattattcaaaaagctgaaacatttcctaacattctaaaacaaaaaaggacgatgataaagaatagaagaacctgggtcttgtaaagatcttcattgtaaatgtcttcaagggaccaagaaaacagccgctgagtcaacccagagtctttggga

SEQ ID NO: 13380 - DNA, 8736 bp, Vitis vinifera
  Intron number 7 from transcript GSVIVT01031411001 (locus G SVIVG01031411001) derived from phytozome v7.0 (chr-ID chr6 ; pos 18928967 to 18937702 reverse strand)
caacctacagtgtgataaaggccctcttgcttgaagtaagtcatctcctttctggtgtgtttccagcatgttacattccaattttattcacctactaatgaagcttctggtgatgaaacacttgcttggtgttgatttctattaatttttattttttaggtgtcctatatttattgcttttctattatatacaaatatgccatcaatttttttagcagaaacaaacattttcattaaaaaattagaatacaagagaacgatgagaaatcctttcgaataataaaaaacctgatagaaaacagaggaatagatgtgcactccaatagacatcaaacaactcaacattgctattttaatattttgatctacatatcaaaatccaatcaagttgaataatgttgagaggatgcacatgaaagttgtagtagtagaggactaaaaagatgaatagaaatagactagatcccatatcatctcaaaatacctctatttgtcctcaaagatccttgcatttctttccctccatactatccaaatcaattgaaggcaagtgatttggcatagaactttgcctctagtagtgttcctcaaactcttaaaagaaatcgtcaacattactaatacttctagaaggaacccaatccaaattggctagtctaaatagcttgtgccataattccaaagtcattggacagtctaaaaagtggtgatctactggttctctacttatacacaatgcaacaatctagattaagagctttgaaaggtcttctcacttgaagcaagtcattgggtattaaccttcttgttggccattaagaatgaatataccatcatttcggtgctttggaatgatagaaattgtccctatgaaaaggttggaaattttttggcgaacatgaaatggattgtgtacttgtggcattggttggttactaaagaattcctttgcatttcaatctatgaaattactaaagactaggtgataggcccttcttgtctagaaaggccttttggcactctttgtccattagttgcttggagttttttgctttgtttgttttctttttgtggtggtggtggctattttgccaaggagggtacttcatgtctctgttgcgtatgccatgagtggtaagattgagacttgagaaaatacaaagcgactttctttgaggcggggtgatggagaagaagcctcatcttgtaaagtgggagattgtttgtttagataaaaaaaagagccgtttgggtgttagatgcctttctcaactcaatagagcctttttaggtaaatggagttggcgcttagcggaagaaaaggggactctttgcgaacaagtgattagtaggaagtatggggtagaagaaggggggtggtgtacctgagaagtaagggaggggtatggtgtggggttttgaaaggaaattaggaaggaatgacctttaatgaaaaacaattttgttttcttcttgggggatggtagaagagtaagattttgggaggataggtggtgtggagacgatgctctaagtctttctttcccttctttgtttgctttggcgacctcaaaagaggcgtgagtggcagaggtttgggatgcttcgagggaggaggggggttggaatccacgtttttctaggccgtttaatgattgggagatggtgtagagattccttttctccttgcaagggaagagggtggttactaacatggaggataggatacgatggaaagtggctaaggatggtaatttttctattaaatccttttatagcgctatggagggtagtagtatagtcctgttcccgaacaacattatttggagcccttgtgttcctactagagttggtttttttgcttgggaagcttcatgagttaaaactttaactagctacttcctttctctgtttaagattccagctttagtggttgcaaaagtcgagaggatgcaaagggactttctttggtcaagggttggggaaggcaaaagagatcatcttgttcggtgggatgcaatgtgcaagtcgagagtaaaagggggtttggggattgggaagattcctttaaggaatcgcgctcttttagggaaatggttgtggaggtttcctagggagagtacaactctatggcattaggtcattcttagcatctacgggtctcactcaaatggttgggatgatttttccaagtatactcggtttgtcgtaggagatggggaaagaattcgcttttgggaagatttgtggtggggggactagatctttaaagaccaatatccaagactatttagagtagtaatggataaaaatattcctatatcttcaattctcggttcggctcgccctttctcatggaactttaatttctatcgtaatctaaccgattctgagatagaagatctagaacgcctcatgcactctcttgattgtatgaatttatccactttcgcttcagacgtgagattttggtccttattgtcttcaggattgtttacagtcaagtctttctttacagccttgtcccaaatgcctgattcatctccacttttcctcactaagtttgtatggaattctcaagtccctttcaaagttaaggcctttgtctggcttgtggtacacaagaaggtaaaataccaatgacttgctacaattgaggagaccccacaaagctcttagccctgacatttgtaagttgtgtatggagcaaggagaattagcatatcatcttttccttcattgttctgtgacgttggggttgtggcacatacttttttagctagccaagatggattgggttcttccaaaaagcatttcagacatgatgttcatcaattattaaggttttggcaagtccaagagaggggtagttctatggcaaaacgcgtgcataactttaatttgggttgtgtggcgggaaagaaatgttaggatatttgaggacaaagctaggaattcagagaatctttaggactccattcatttccttgcttccttttgggctttttgttccgcgggttttaagggcatcccccttaacgtattacaacttgattggctagcagtgtgtagttccaatgggacggtctagtgtattgttattttttcgtgttgtttagtttttcttttggtgggaggattcctcatcctccttttgtacttctttttctatcaatatattcacacgtggtttcctatatataaaaaaaaaagagttaaaactttaactttggatcaactaaagaagaggggttggtcacttctgaatagatgtttcctttgttgtgctattgaagagtctattgatcaccttctaattcattgcaccaaggctagggttttgtgggagttgttgtttaccctttttggtgtgctgcgggttcttgcttcgtcaattaaagagatccttcttgggtggcatgactcgtttgtgggcaagaagcgaagaaaggtttggagaacagcccctttgtgtctcttttggtctgtttggaaggaaagatataagattacttttgaaaatgaggagttttcgatccaaaggatgaaatattcttttgtttgtaatttttggtcttagacaaagttgtgtatagatgaatgacctaattttttgattaacttttttgattggttaggctctagatgagggcggatgagttttttgtacgcccttttattttgttttttgcctataggcgtctgttgtatacttcctatatgctttgggttggttgttgggcgcccttttcttattaatatatccttcttctgtgcctttgcctatgaaaaaaaaatttgtcacagagggagccttagagttgaatattaattgttgcttcctaggcaatcttaggtctattgttactaggtggttcttttcaaggagatttgacatctatcatgtttgatttctcaggactcgaaggttatgaagattttttatagatgaaacttgttaggcttttagagaggtaaaagaggcattttgagcctttggattgaagggttatgcaacaatcccaattgggtggtatggattgtttcaagatcattggagatatttgtactacttgtttgcaacttatgatctttgaggacttttggtgggtctattatagggtcaaaagggaaggttcttagggatttctcaaagcctattgtcctcgttgggccacattgttgaatatgtttcaggtagctatgatgggtattagagacctcattgtggaggatccttggtttatcttgggtctctagggggggtttgttaggctttgggtatatatatatatatatttttttttttatgggtgttaggctttgggtatatgactagtgggtaaggtggatttgtcatatagatgtttgagctactttagtgtagaagtgaagtttagctaatggattagtcaagtgggttcgcttctcaaatttgttttctttttaggaattcttcctctttgagcttactcctttttttgtgtgtttgttttatgatgtctttggttttgggttttggtttctttgttttgctcttatttttctttatgttatggttttctaatctttcaaacaatcatatgcatctttttttctttctttcattctaaaattatgctaaatcattttttttcctttttcctttttcccaaatctatggtctttgtgctcccctaacccacacttactcatacattaacgcctcttcgcttattactctttgttttttcaatttttctttctctattgctttattaaggttgcaaacataagattcaaaaaatgactctctttctctctctctctctctcttttctccattttcttccactaccacaatagctaagctaagaggtacctcctcttatgtgaacttcttgttggcatagttgttaaaaacttatgatacaacgatatgatacatttttattttttggaaattgatatgtattgtaatttgtatcttattttaaagtgtgtcttatgatacatatacgatacacgatacgatatgtgatattttgatacaatgatacatacatcttcaactattttctataatttaaaaaaaaaatcaaattaattttttttgttaaaagaatttattatgttaattgttcaaaatatactaaaagattaaaaattgatcataaaaatgagaaataggtaaaaaaatcttatatgaaaagttgtattcttattgtcatacgtcatattagaagtcaagtaagtttataaaagtaagtttatttttataacgaatactggagaattttcatttgaatagtttgaatattgataatgaaaatgatggtgattagtgaataattttttttacttaatatatatattttttttaattttttaatttcttttttaatggaaaaggaatgatgacaaacctaaaaagctataactttaaagatgacacataaaggcatacatatatatatatatgtgtgtgtgtgtgtgtgtgtgaatcaattaacaacataataagtgcatatgccttgttagaattttttactgaaaattgaagaggtttatttttgtggattatgtgatgaatctatatattaaaattatattttgttaatttgaacttgttaaaaatttaacattcaatgttttcatatgatagatataatttaactctttagatcctattatcttccctaaattgattgtatattactctatgctccatactttaagtagatattcacacatatacatatttttctatttatttttcactacataaaataacttatgatgtatgatacgatatgatacacgatacacaaaaacagaaaaacgacacacaatacgttttacgagttaactatggtggttgggactttcttcctctttgtgctcaattatttcttctttggggttcagtttgagttgtgcttaggcttccatgtgttgctttcattttttgcttgttcaaagaatttcttatttttccaaacgatcataccttttcttgcatactaaaattccacaaaatggggaagtttttcatattttggtggttctatgtcccctaaaccataataactggtacacctgtttgcttatcattttcttttttcttttttttaattttttacttttaatttttttttgtttgataggaaagagaaaagagatgtattaaaacacccctaacaaaaaggggccgtgccttatacacatagggggtatacaagaggggccacaaaggagaagaaactgaactacacaaaaaaacagcctgtacaagagcctcctaacctcaacttaagctataaaaaaaattacatcatgaacaatttgccagctgattggtgcccttgacctctcgttagggacttgatgaatgtttctttcaatttttgatccaaaagctcctcctgtttgaaggtccaattattctgctctctccaaacgcaccaaaacaaacaaaggagagctaatctccaagccttccttttatccatcccatgcaatttccatcccataaggactaaggagctcctagacctactctgggagaagaccaatgcattctgaagattaccaatggaaaaccccatcgcagactggttttattggaacaagtaaaaatgtggtttgctgattcatcactggactaatgatgataattagagttatcgattgtgtagtgttctcttaatctaatacaacataactggatctataaattcacagtttccctgagaaacaatagttttttttttgagtaaagaatccacatatcctcaagttttccatgaaaacagcctatcaattttttttttttggcatgaaaatatgaaccaaaggatggctgagttactttttaatctagtaagattctgcctgtgactgctgaggttagcttaccactgagcccatcgctagttttgtctggcttgtttgttgacactgtgctttgtcttgttctgatcatttcttctaattgaacttggaagggtacattcactgtgtgtggaacaccaaatgcagaattgaattgaaagagggagagcttatagcacttgggatcataagagggggaatgttgatatggggaaataaattgatatggggaaataaactgttatttgtggcctgttcagtttaatttgctttattattagagggggggtggtcaaaatgataattttgggattattttagtaactcactattttatattcttttatttgttgtatgtgacatgttggacaagatgggggacaaattgtcatctcttcctacgataatagtactataatagtcatttggattgtaaaagttgaggttaaaattattatctctttctggttcctcattcttacctttggtatgccatgacaaccggggaaaatcacatcattcctggactcactttcctgcgaggttggctatcttatgtttgactagatggtagtgttattattcatgggtcttggaatctaactagtattctctcaagggggttgacgtctatgttttctgatccctaaaggtcttccaactagcgataacaactttcacaaggatttgggagagttccatattcgagctgttcttgtttgatgattccacatcccctcttgattatttgaggcacatcatcctagagttagaagtgaaaacacattagccaaatgctttattttcaaattcctagctttgatcccacttttaggtaggcaaatgtgatcttagatcatttcattcttaaggtctaggttttgggtgcaagttattggatggcatgatagttactcaatttactatcaagaatgttgagaactggtctatctacttagcatttcatgtcataataacagataagtggagactcaagtggaaaccccttccaattatgaaacttcactttgatacttgttcactggggaaccacaccagatggggattagggtagttatcagagatcacaatggcaatgtgattagtactctctccaaacctgttggttttgagttggccattaaggtggaggttttaccttgatagaagttctgtccgaggcaaatgctttgaagaacttgtggagtggaattcaacagttgttctagaggagcttggaggtgagattcatgaatttaaaaatattggttctcttgagggtgttgagttgctgattttattggatgtgtgggtcagccaattcgttagcagatcgattggctaaggaaggagcctccttttttttccctttttttgtggtttgtgggggagccagatttccttctcctcaagtgtttgaggaattctttcccccttcagtggttgtaactaggtgtcagtacgcagaattaaggtcatttcttcaattagctgtccatttctaagttcatatcatttgcagtagcttcatggatgttacctaccaaataaaaggcatgttcaggaagactatttagttctctggaaaggatcacttgaaaccctctaattgtttttgctagaccaacacatttccctggaaaactggtaaatgcatctgctataattgtatcttcttttggtttgtcttgaggaatagtttgtcctgctttgattttttgcttttatattaatatattcttttgtttcatatgcaaaaaatgatgaatttatgttgttttatatgtactatttcttgttgataggagcttttggttcttatttgcagcttgaggaaaacatccgcattattgctctttctgg

SEQ ID NO: 13381 - DNA, 3059 bp, Vitis vinifera
  Intron number 4 from transcript GSVIVT01033883001 (locus G SVIVG01033883001) derived from phytozome v7.0 (chr-ID chr8 ; pos 17036494 to 17039552)
aagaggtgatatattctattacaatgcttcttgctaaagtgaaattagtttgaaaagttgtctgattttcctgtctctgaatttgcttctctgcaaaatagtatatagtactttatatgcacatatatagaaggagaatagttttcatatgaagcgtgtaggggcaagaatagtaattctaatttataaaattatttcttaatgacaatattttttttcctcaatgagatttgttccaattggtaggtacatgaatgtgctcgaaccattaggcttattactaaaagccattaggctagcccagataaggtgcccaaatagaatatgcgttttcttatatggccttctatattgtatttaaaacatgtattcaccctggcttagaaatttgaatgagccttttatctactgtatacaggatacagctggtatcccatgggggctgggatactatatttcacaatatagcagcgtggtgggttgcaaacttagacctgccaacttgcttgaaatgaattggtaaagaagcaagcatatgataaatttaaatcttgtaaaatctgaaaagactcaaagaattgagaaattcggattttagaaaataaataaatagaaacttataactgtttgaattttataccaacagggagtgccttaaagaaacatgatagtccagaataaaattttgaaacaatcgtttagatgaaagtatgacataggaataaagaatagaagcatttaataataaaattagtaaactattaaaacaatggtttcaaacataggaaataaaaattcatcatctatcaattcaaccatcttagcaattgaatgcatgatcaaattagtgtgcctagaaatgagttataaaataaattgagtagataaggcatgtcacaatctgactatagaagtgaaaatattaacacaaaatagtatgataaatgtctaatatattttattattattattaacagtaataaatctttgatcaactaatttaaaataaaaaatgaggcaaagataaaattttttttattaccattagacacaatcctttaaataaccagaatttaaatgtgctggttatggtctgacccagctggagccattggattaattaatcagaatttaatttaatttatctttagcagtagcattaagtttcaaatatcatctcaattttttttctaggttggctggttgggtttaggtcagcatttcttaatctgactatagttggaccaggttgaacactttttggcctgatccaaccacaaatgtgttgggccctgctggagcctaccagactggccaacttgaatagaacccaatgaacacgaaggatcatttgattaatttttcatatataattagtgttattttatgatttctgattctaattttaattgataaatattttaatttcttacgaggttagcttgttgaccctaacttgagtggattggaaatgaccatatggtgtgcatttcttggcctgattataatcagtgttggttaagctcttttcatcgaactccaatgataattgggcttggtcaggctgagcatatgacacatgccagtctgaatataacttgatccatgcttagttatcagtattttaatcagtttaatatataaatagcattattttattgatttgttaaaaaaatgtaattttaattttgtgaattcttttgttattttctttttgtgtcagcagcttgatctaaatccgacctgagcctatggattggtactcatctgattgtcacatttactcaattttgcccagtcttgggtcccatttccaaatggtgacaattcttgttgatgggttgggtttgtgttatgtcaaaacttatagacacttgattaaataagtcaacccaagcccaaacatgacacaaataataatcaagttaaaaacatgaaccctaacatgatgaagattttaaataggtaacacattgtgtaatttaataataaggtcctaattaataataaagttgagttaagttttatttgagtcaatatgattaaccttgcaatctaatatatttaattcttttgtatgtaacatttggggttgggctaaattgtatatgggagaggagccgaactcccttataggatttctggagtggttagcttctagataaggggtggtgggtttttcggtttttttgcttgtgaggccttagtagccttgtataccccctgtatactctgtggctttttgcctcttttctatgaattctgtgcttacttataaaaaaaaaaaaatatttatgactctattaacctattcattcaaaatcaagttctaaatgagtccaatgtgggtcaaataggttatggttttaattaggttaatcaacacgattattaaataggtcaatttgtgtcaaattcgtattgacctatttattaaataggttatgttggtcgacatgaatttgatccaacatgattatactcaacccaaacacatgaaaaacatgttgggtttgagttatgttggtgaatcatatcaaacttgtcacttctaccatattctatgtggtccataatctaattccatgaaccaatcggtgaatgggtggatgggatttgtcatccaattgaaggataaaattgcatgaaccacatacccaattcctatcctgtcttaagagtttccatgtcctgagttatgaatattctatccagtcccgatatatggtgaccagaaccatatatcttatattcatgttagtgacaatacattgtttaggaactaatactttctatgtgtgctgtcaacttgtatgctgccacaggtattaataatctgtaatggaacttatcttgctgcttttatgcctaaacattgcctacagctgaacatcttgtcctcattgttgatgcatccaaacagccatgcatttatagtgcatcattcctacacaatctatcaagtctactattacttcctgtgtttttctgcattggtattattgttaagggaattctgtttttgatttggcaatattgtattgcccattttgcagacg

SEQ ID NO: 13382 - DNA, 10864 bp, Vitis vinifera
  Intron number 1 from transcript GSVIVT01032143001 (locus G SVIVG01032143001) derived from phytozome v7.0 (chr-ID chr1 3; pos 22210088 to 22220951 reverse strand)
tcgtctggtattggagttttgggtcaaaatgacccattttttaaacttaacgttgaaaacaggctcattttcaaactattgttcaaaatggcctctttgatgccacgtaggcgccatatcattaaaaaatatttttttttgtcattatagtgaaagtcgcagttgggaaatgtggtttcatttttgtactaaagctgcagttaggaaacacgacttcatttttgtactaaagccgcagttggcaaatgtggcttcatttttgcactaaagccgcaattggcaaatgcgacttcatttttgtactaaagccgcagttgccaaacgcggcttcattttttaactaaagccgcgattggcaattgcggctttagttaatttttatttaaatttaaaatttaattaaaaaattattaaatttcaatttatgaatgaaatttaaaaatatacttaaacaataaattatttatatttaaatttaaaattctagtattacttcaacaaacataaattgatagatagaagatattataaatgaatgttttattcattaataaattaataatcttaaaataataaatttatataacatataaataatatataaaattgtataatttattaatttaagatatttaatttgttaatttttaagatattaatttatttgtattatgataaatttatctttatcgaaataatagtatagtagttgataactgagatttcaattttaatattttttttattttccaatttaattaaaaactattaaattacaatttatgattgaaatttaaaaaatatacttatataaaaaattattcatatttaaacttaaaaatctagtgttatttcaacaaacataaattgataaatagaagatattataaatgaatatttgatttattaataaattaataatcttaaaataataaatttatataacacataaataatatataaaattgtataatttattaatttaagatatttaatttgttaatttttaagatattaatttatttgtattatgataaatttatctttatcaaaataatagtataatagttgataactgagatttcaattataatatttttttattttccaatttaattaaaaactattaaattacaatttatgattgaaatttaaaaaatatacttaaataaaaaattattcatatttaaacttaaaaatctagtgttctttcaacaaacataaattgataaatagaagatattataaatgaatatttgatttattaataaattaataatcttaaaataataaatttatataacatataaataatatataaaattgtataatttattaatttaagatatttaatttgttaatttttaagatattaatttatttgtattatgataaatttatctttatcgaaataatagtatagtagttgataactgagatttcaattataatatttttttttactttcaaatttaattaaaaactattaaattacaatttatgattgaaattttaaaaatatacttaaataataaattatttatgtttaaacttaaaaatctagtgttatttcaacaaacataaattgataaatagaagatattataaatgaatatttgatttattaataaattaataatcttaaaataataaatttatataatatataaataatatataaaattgtataatttattgatttaagatatttaatttgttaatttttaagatattaatttatttgtattatgataaatttatttttatcgaaataatagtatagtagttgataactgagatttcaattataatatttttttttttactttccaatttaattaaaaactattaaatcacaatttatgattgaaatttaaaaaatatacttaaataataaattatttatatttaaacttaaaaatctagtattacttcaacaaacataaattaataaatagaaaatattataaatgaatgttttatttattaataaattaataaccttaaaataataaatttatataacatataaataatatataaaattgtataatttatcaatttaagatatttaatttgttaatttttaagatattaatttatttgtattatgacaaatttatttttaacaaaataataacatactcttaagccgtagttgtcatatatagattttttttacaaaattagttaatgaaattaattacaaaaagtctactacaaaatgtaatttttaatagtttaattaaagtcacaaaaaatatccactaaacattaatatagtggaaaataaaaaacatatataatctcacatgcctccacaaggagagaacctatgtgtaactggtactttcttcctttttggacgcccctctctaactgtagcagttactgcatgtgacacatgaagaacatctgtctgtgatggggctagagctgcaaatagaggtggtggtagaggtagcaatctaggtcgacgtaggcctcgcgtactcctcggaatgactggcggtaaatctagctgagtagatgtgtcaatttgcactactggtgggtctgaagaggtaggaggttgtaatggaggtaggtctaaagaggtagggggttgtactgatggtgggtctgaagaggtaaggggttgggctgatggtgggtttgaagaagtagggtgctgcacttatggtacgtctgaagggatgggtgactgtactaatcgtgaggataaaaaggtagggggttgtaatgatgctgatactgacgatgtgatgggctggcaactactatatctacctctccctcgagatgttgaccgacctcgaacaagtggtggtcgagcaactgtcgactgagctggtgacctatctcttctatgctctacatgtgggagacgataattctcccgaataatgcacataacatcagtggccatacgaataatatcaacaataccagtgcggcaagcatcagtatcagagtcctccaatgcatgacctccttgagatatgatagatgtcatagtcttaatctgtcacataaaatgatatataattatttgttggaataaatattatacataatatgtacataatattaaagtgatacgaaccaataagtgggaagataaagcagtagcctggtaccgcataggtccaaaatcactcataggtgtaataaaacgatgtgtaatacgatgataccatgtcatgtacggagcatggtagtccatatgaggccctataggcttcgcagtgacaatgtggtcccccttagcctctcataatgccacgtagtgctcatgatacaacctccaatcaaactgaggtcgaccacatcgatctatggagtgaaggtcagaatctataggggttgtcgaaggaataccctgtatgagtccaaactgtcgcaacacacgctcaggacaatgccactcaacaatataaaaaaaaaaaataagtggtgacatcgtccgccaaatatcctgattagctaaacaaatgtctggaagcaacgctagtatatcatctgtgtaaggctgccataatacctgatatattcatagatgagtatgtatttaataaagtataaattatattattaacattaagatgttcatgttaaagaatactaatatttagcccaaacctgatcagatcgctgtctatcaaactcatctctatatgtgaccaacacatgatgaggagtgtctgtatgagataagggaactctccacctactccctagtgcatctggtgggaatctctcatctataggcactggtgcatggggaagtgatctactaggatgacccacatgtaatcgctcccatgaccatagctaaaaatgaaataaaattatgtttaagtgcacataattatgacaaaattacataattaataagactagtagttatacctgcaacaaatgtaatggtcctgcaatagattctgcactatctaagctaactcgacataactcccgataaagatgtgctagtgtcgtactcccctaactatattgtgcagtctcaccaaaatctcttaatatgggtagaattgctaattggatgtaaacccccttcttatctgtaaataatgaaccactaactaataataaaatataagctctagcatggcgttgtaacgtaacctcatctacaacccctagtggtaagcgggagaaatgggtagtaataaaacgaactgtaagggatgctccacgaatatcagtctctatcggttgaacacccaataactcctcacaaagtgcatgccaatcaatatctgtagaaccagtgacaggatggccatgtacatgtaatccaaataaaatggctacgtcctgcaatgtgatggtcatctcaccaactagcatgtggaatgtgtgcgtctctgggcgccatctctctaccagtgcagtaatcaaaggccaatcaaccttaacatggcccactcgatgaaagacataaaatcttgactgtataatgtatggccgaacacgatcatccaaaacccactctcgaagcatcatatgtcggcaagtcaaaacactacccatatctggatcaacacgaatggtggatgatcgatgtcgatgctgaagagtaagcacagatgtatcctcagggtcaggacgagcacgaaacaacggagtatccatgtctgcatgtacatcaatacatgatataaacaaaatatgaatgaattgacaagaaacaataatatctaacaacatgaatttcattattaaaattgtaaaaatttgaacagcatttcctctaaacagtagagattcaaaatttttcaatgtaacctgatataagtaaaatatgaatgaattgaaaaaaaacaacaatttctaacaacattaatttcattattaaaattttaaaaatttgaatagcatctcccctaaataatagagattaatatttttttcatgtaacctgatataagcaaaataagaatgaattgacaaaaaataataatttcaaacaaacaaacgtcaataagatagtttctacatatatcttaaaacgattaaggtcaacactagtaaatttaaaaaaaaaaacagtacaataagatgttcatgaagtacatcgactcctcctatcattggtttctctattaggacaataacgccgattgtgacccgattgcttgcaaagtccacatgtttgtggagtcctagtttcccttgcatccatctcattatgcaaatgacttgattttggtcgaccagaatttagccatttcattgagtctgaaggcacaattatcggtccattatattgaggccactccaactcatcaaatatgggataaaacaagggagcccatgttgataggtaagcatgtgtggtgtaataaccttgtacaaattatcgaaaatcaattactcgacaatgacaagcagcaagaatgtgcgaacatgggaatcctaacaaaagtgttttgttacatgtgcaagaccccgtttgaagggtaacatgatatgtgcgaggtttcctattactgcttccaacagagtgtctagttttaacatgaaaacatcccgccacatgatcatacaaaagaacctcatgtgcacccgccttaacaactttagcctttatcttggcgtcaatatgtggagtgaattcttcacctgaagcgagccgactgacaccatgctcccgcctgactgtgaagtaactgttaacccgatagaaagttaactggactaaagctattgttggtaagttacgagcacctttaaggacaccattaaaaacttcagacatattagttgtcataatcccatatctccgcccaccatcatatgagagtgcccatttttcaagaggaatttgctccaaccaatttctagcctcggcatttatccggccaattgtatccatgtgagaaataaattttttaactttactttccatagcagccctacacatgagatcctttaaagtcttatctttgaactttgtgttgaaattactcactaaatgacgcatgcaaaatctatgacaagcatctagctgagtccatcccgaatatgtttcattcacagcagctataatgccaggatgacgatcagaaatcagacacaaccctttcctttgtgttactccaactcggatacatgccaaaaaccaattccaactatctgtattctctccttctgtaatggcaaatgcaagtggaaacaattggttattaccatcacatcccatagcaatcagcaaagtccctttatattttccatacaaatgtgtcccatcaatactgagaactggtcgacagtgtgcaaaccctttaatagatggagcgaatgcccaaaaaacacgctgaaaaatttcttcattcggattgtttccaggaaccattttggaatacataatgcatctaggatttgactgctccaaggcaaggaagaaacgaggcaactctgcataagacttgtaccaatcaccaaataatcgagtcattgctttccttgttgccttcattgctttttgataagaaatttggtagccaaattgttccacaacaacagcttgaattgcagcaactgtaatggtcatttctgccttcaccaatgtttcaatatacttagatacaaagctagaatccaactgtgaatgatcttgattaatacatggattgacacatgtatgaggacctttgtactttgtgattctaaacatacccgtatctttcactgtcattgcccttagtcgccattggcactctggtgcttttttacattgaagaactaacacactttcatttgatctataaacagtaaactcttggtgcgcctttatggaaaacatcttcacagcatgttgcaaatctaattttgaggaaaatatttggccaattgataattctccatcaacatttcctaaaattggctttttccatggagtccaatcacttacaacacaattaattgctgcgtccatatttaaaaattgtggtgtaggtggcatatggtatgaaacgggtacaaatgtttcctgtaggttgtcattagagatattaaattgggtaccatgtggggaggcaactagtgatgtgttttcaacctcaaactcaacctcaggattattagacctatcactaacttcaaggttcacaaatcttgtgctttcacattccacaacttgttggaccatcaccaaatcaatattttctgtttgacaacaattttcatcatcattaggtaaatgaatctcatctgtgttgattgcatcatctctatcatcttcatcatctctctcatttttgtcatcaacatcagtatcacctattgataatcgtgtcaaatgacccatttcattacttaaatgataatggttgggagtttgctttatgaataattgaactgaagacattccatactttgatggcaccagtagcatacgtgcaactgttcgatcatttctcaccactaatggttgaaatttgttcatttcagttggatgacgacatttcaagactaactgatagtctctgtcaacactaatgatatcatatatcatcttcaacaactccacaaaggtcgtatgaatgggcacatctataggctcaatctctacattatttccaatatatctcaaatccgtttctgtcctcaaaattgttccattccaataacataacacttctactgtggaatcagtcataattgccttcacataaataataacaaaaggttattacataaaaaaaaatatatttattcaagtaaaaaataatactttatggtcaatgattcataaaatacaataataaacctaataaatattggaatgtaacaaagtttcatgtctaaataccaaattcaactcaaatgaaagcaatgtataagcaaataagtgtacaagtaaagagtaggatgatattatgaattaatattatttttgtggtccaataaaatgttttacatgtgtttgggttacaaacacgtttaatttatttttctaatttcataattaggatgagattaactttcaatatttttttgataaaatgaaattaatatttttatattaaaaattaaattttaaaataaatatgtgttaattatgttaattcttttacaactcaaaattatctgttaaatatatttttaaaaataaatatatgttaaatatgttattttaaataaaaaaaaaagagattttctaaagaaccttgtaaaaaaaataattttcaatatctcagaaataaaaaccatatcttaaggttattatattgttttatatatggaacataaaattaaaaactttgatattctatttggaattattttaaaaattagatcctaaaaatcatatttgataaccttccttgctattatgcttgcactgcagaatatagatagcatgtagattgtgattctaaattctagtataataataaaaatgctttattggcaatttttttttatattccctggcatcacaccctacttgaacatctagacgtgtccaagggccacaccaattgtaatactgtctagtgtgcactcacgaaaatgaagtacaacccaattgacaaaggatcacataaacaacatggtccctacccacattcaatttctccaacccataatcaaagtttttccagatgggttcacttttggcctccctttcatcctcctccactcccatcacatccacaatctagtagtctaagtggagtcatcaaacatgaggtatatggtctattttataatagtttttttttagagttggaccattcattttatacttttactattttattttaataatatttttcttaaaagtatgggtaattttgatatctttaaaaaatataattaaataaaaattaaatttttggatataaccaaatacaaaagtctttttaaagagaaaatgtctatactttaagaattgggcttttttttttttttttttaaaaaaaaaagtgtttactcatatttgagaagttttcttgatatcaaggcaaaaaaattctagatgagtattttatatttaagagctattgagacaaaattattcaagatctcttgatcagaaaaaaattatttattcattttttactttgaaattgtttatatccaaaatcatttttttcctagcaaacatgttatgtgtatatatatatatattcatacaagatacatccagtttatgatagaaacattaaatttagataaccaaaaaatatatttaaaaatcacattatctattgagtcggtcgaaattcttaacaaacacattccctattccactcaaattctcaaaaaagaaaaaataattaaaaatcattccattcaaatatatttatcattatttacaacttttatttttttttaaatctgttatctatggctattaatattattaattaatgccccataataatttcaaaaaattcttttcgattaatcctaattttttccccttaactacaaaatcttataagttaatttcatatatatgataatatcctcataaatccttttattatttaaatattatagaatattatatattttttatttccaaatttaaattaaaaatacaaactaaccacgtattctatattgcagaacaagtcaattacatcttatagaacctacaaatttaaattaaaaatgcaaactaaccacatattctatattgctagaattcccaaaaatgtctgcccaatacttaaaaatgaatatgacagattttaacatacatgtgtttgtgtatacaactgaacatgtttctaaagataaatacataaagacataccctctctctaatacacacacatatatgtttgttagtatttcacatcgcaagttttgaatcacctttaaaagtcaggtgcagggaaaaggtgtaaaacaaaaatggcttcaaacagtaacaattgcttggaaaaagtagtggaaacaacttctaacaaatattttttttatttccaaatattaatcctaggatacctaaaaaaatatttgaaatataatacaaattttaaattattgaaatagaaattggataatttttttgtggccagctgcttattgaaacaaaaggttattgcaaacatggacttaaatacaaaaaaaaacaaacccaaaacctccatttttttaagcaacaaccatttttttcatgctcatttcctgttcttgttttgttttttagaacattaaaaactcattttaattaagcccaactgttgcaatgggagggcctcagttttttgtaacaataatttactctccttgtagccaattctcaccaaccaaacagagcaacaaaacacaatcaacacaagcacaatcaacacaacccaactcacctgtttttccgtagattgagtagctcctcaatgccaacaccgcaagcctaatcctccccaacgactgccccaaaatctgatactaatagtcattaattcaccataaccacactccttaaccaatcattcacaacaatggaaattttttttttttctaaaaatcgagattttgagatgggaaaaaaaattggaaagtgccaaaaactttatacaagccaaaaagaagattaggacttaccttaaactttatgctttgtagctccaccgtcttttttagtggcccactggtggggctagggtttagaaaaaaaaatcgcacagaagagagaacagagcacggggatggatggaaatggtaaagtaaaaagggtataaaacattgatttatgggctgatgtggcttcaaagggccattttgaacaatagtttgaaaatgagcccgttttcaacgttaagtttaaaaaatgggccattttggcccaaaagtcctggtattgaggtaaggtgggtgtcat

SEQ ID NO: 13383 - DNA, 16569 bp, Vitis vinifera
  Intron number 1 from transcript GSVIVT01014084001 (locus G SVIVG01014084001) derived from phytozome v7.0 (chr-ID chr1 9; pos 245861 to 262429 reverse strand)
gaggaagaaaaaaattcggtgatgaaaaatacgaaacagaagaggtataaaattttgggaaaaaaaagaagtgaaagaaagccaggtttgaaacctcgtcatcgtcatcagaaaatgagaagaaatcaaccgattcaataagcattaattttctacttgaaattttgatttttttttttaattttatcatttttaatcgattatctttttttttatgaatttatttttcatgaattgataatctaattgttgaaaattttctcagtgaggttatagtccaaggtttaaagcaatatttgaatgattagaaaaaactaaacttaattactatcaagtttaccatcaaaaggttttgaaattttgtgtaatgaagttatttgttatgaatttataacgtatttgaatataatttttatgaaattattttatccaaatatttagaattttgatttatatatatatgttaagaaaaaactgaacttaactgctatcaagttcattgtcaacaggtggcaatttcaaaataatttggttttgtttcaaatttcaataaacactagaataatgtctccaattttttgtagctgcaatttagtaaaatataatagcttcaattgcattagtaaaataatatctttagaatattagcatttgacatgacatccttaaataataggaaaataaagtctatgttaagaagtaatatgaaatgatggatttaacatagttggataagtttggtaatataattttgctcaatttatattgatatttttacaatttgttattatcttgcagattgacattcctcctcctctcctatcttttatatctaaaatacctaaagaggagtactttcctggaaaaattgcatgtttgtctcacttggttgccattgaaaatattaagaagaaattgattgaaccacaattggagatgtttagaaattcatgttttggtcattttttactcctttccaaacttagattttcagcccaaattgttcatcaattgttgttacatcaatgtgaaaccaaaaaagacaatgaaatatggattttattaaagtcaaagggcttaagatttcgtaaagaagagtttgcattgattacaggcttgagttttggtcatattacaaaatgtgataaaaaatcattacgaataaggggcacatactttaaaggagaaaacaaggtgcgtaatgatgagttggagaaagtttttctttttttaagagaggaaaagaaaaagaaaaaaaataagaaaaaaaaaaaattgaagatggattaagcatggcaagaaatggaaccaattcaaattaccagagaatgacattcttattgattatgccaatggtttgcagcctctttattctgtcaaatggcctaatgttgacattgtgtatgtccccatcaatgttcaggctagtcactaggtattaggagttgtccaccttcatcgaaggattatatatgtatatgactcattgatgggcatcaataataatgcaagattgcaagttgccattaaaccattagccaaattgttgccgcatatattgaatgcaatagcatattatgggtttcatggtgacacaaaagttaactaccatgaatgggaaattgaacggttgcaagatattcctcaacaggaaaatgagtaagtgatcttcaatttactttcataacttatacacttaatccttaataatagccctaacattgattatttgtgtaccatgcagtggtgattgtggcatgtttgttatcaaatatgttgaatacttaatgcacaaccatccattgaagtcattaacaagtgctcgaatggactggtttcgggaaaagatggcagtagagttattttatatgaaatacttgcctatgtaatgaattcatgttgatatttcacattttgataatgtagttggatggtttgttatatgtaattggatagcttcatatatgtagttagacattttgataaatgtagttggacaggttgatatatctacttggatattttgatgaatgttgttcaatagttatgtatacaattgaccttttaaactaaacttgaatgttgtcaagttgttatgtgtacaaacttgaacgtagttaagttcacagtcttaatagaacacctgaacttaactactttcaagttaactgtgaacaaacttgacagatattaagtcgaaatctattccataataacatatttaatctggacttaacaggtatcaagttgatcttctatagactcataggaagttgtgtctacagtttgccattttaacttaaacttaactattgtcaagttattttatgaacaaacttgaaggtagttaagtccacagtcttcagacaaaacctgaacttaactattgtcaagttgttttatgaataaacttgaaggtagttaagttcacagtcttcagacaaaacctgaacttaactattgtcaagttgttttatgtacaaacttgaaggtagttaagttcacagtctttaaacaaaacctgaacttaactattgtcaagttgttttatgtacaaacttgaaggtagttaagtccacaatctttagacaaaacctgaacttaactattgtcaagttgttttatgtaccaacttgaaggcagttaagtcaacggtctttagacaaaacctgaacttaactattgtcaagttgttttatgtaccaacttgaaggcagttaagtcaacggtctttagacaaaacctgaacttaaccattgtcaagttgttttatgtacaaacttgaaggtagttaagtctacagtcttcagacaaaacctgaacttaactattgtcaagttccttatcaataaacgtgagaacagttgagtccatagtttgataataaacatgtaattttcattcatactttatacataactcatcataacatatatgtacaaaagtaacaaatatctccatttctatgggtatgcaaaaaaaaggggatcattattacaatattcatctatgtgctcatcctatcaccttatacaaaaaagtaacttacatttccattcacatgggtaccaaaaaaacaaaaaagctaactattacaattttcattccatgtaagttcatagagtgccaaagctatcatgatatcaagggattggtcgtttgcatgttttccgattatgcccatattgaccacatcgactacaacgagatgtgcgcttgccctctccaccagaaggaattcttactttctttggtcttcctgttggacgtctcattttaggtggtaacacaactttgtcacgaatatgattaggtactacccaatctatttcatttccagttggataaatacactctgaatatgaagataacaatgctatagtagtaaaatacttggagcacaaagtgtaacatgaaatgttgtaaaatctacaagcagcaatagcatgtgcagatggaatatgatcaagatcaaattgtcaacatgtgcatgaacgagtgtctaaattcacttgagcactaatgtcagcatagttaacattacactccttggagttgataggttccactagatatgttgctgacatattatacctcgaatgaagttctctatcagcccatatggtaatttcagttgacattgacattgcttgttgttgacgagtcacaaaccatttttgaagtaagtttctcaattcttcaaccaatttcaaaaccggaagatctctagcattttttaacacaacattaaggctttcaatgatccctgtcgtcatgatattatatctttttccggtagaatatgaacgtgcccattgatcaacacctatatccatcaaatatcttgctactcttgggtcaatcatctctagttgcccaaatataaaattaaactttgaaacacgttaagcatgggcagcaggattcttgaactttgtcttcaaattttgtccaacgtgataagtgcaaacaccatgcctcacatggggaaatactttatgtactgctttctcaatgctaccatgtcgatctgatatcacaaacaaatcattaatgtgttcaagtgcatcatgcagtttttgtaaaaaccactcccatgaggcatcattttctaaatcactaatcccaaaggctaaaggatatatctaattgttgccatctttacacgctgcaataaataaagtccctaagtactttgctttcaaaaatgtcccatcaactgcaatcataggccttattgatgtgtgaaacccagcaagagatgcaccaatcgacataaaaaagtatttgaattgattatcacaatcagtaattatatcaataatggtaccaggatttttttgctctaaaacatagcaataggatggtaaagtgttataagactcctcaggtgatcccctaatagaacctagaacaagttctttggctctccacgccttatcataacttatttgaacgccatactgctttcgaatgtctgctacaatgtcttttggtcgaaattcacaaccaaccccttgatatgtttcttttatactctcaccaatcaaccaactacttgcatgtcgattgtcacgaggcatcatatctaaccgacaagtgtgtgttgaatagaatttcattatttgaaacatattggaaatccccaacttggtagcacgaactcgccacttgcattctttatcaaaacattcaacaagcaataacttagtagtggatttagttgttttgaactcaaacttccttttcagagccatcatatacaacttcttttgtaattctttcttactcgagtatatgtggtgctcttctagatggttatcactaattccattaactataggttgttgcatcatgttttgtctttcatttgctacatctttgattataatgggattgtcatatatgaaaccatcatttgtatcaatcatggtcaagatttctgcattctgagttgaaccaattctgaatgagccaatttgggtcacttgcttatcactagtagggttagtattcatcctataatcctcttcattagttgcagtctcattcatgttccaatcatgaactttatacccttcaagtgactcattttgaaatcttagtccattttcaccatcaacagtaagagtttcaactgaatcacaatgaatgtgtctacttttttgcatcaacattgagtcctcattcaattctttatcaatctcaaaagacatatgagattcaaaataagaattgcaaattgatttctgattgtgattatcaattctcttttcaactgtgatgcataatggaacagacagcttaccttttgtacaatttaaaccaataaagaatttcacatccccatcatcagttagttgtataggacttgtgggtatgttggcattgaatacatacttcattgaaagaaaacaatttgttagatctagcttcagaatatgatggacaacccctaataactctttatatgatatagttttcgggatctcaatgcctttacctttacttccttcaaaatagaaaacatttccatctcgtacccattctccttcatataaaagcattattcctacttcatcaaccactgaaataacaaaataattcaattagtggcatcaacaaacaatattagaatattttttagttacatcatagcattagcaccaataagtaggtattaattttaaaaaactcattcattattaaatacatattatttaattacacatatttatttttttaataaacaacaaataaataacattattaatcatctttactacctcaaataataccaataatgctatagaaatacaatgtatatagttattaaataaattcagacattgtaactctaaactattttaaacaataaaaatatatttatttactaaaagattggttatgttgtaattcatttaatgtcaagggtaatttgcaaatgattcaactcaaattgagtataattaaataaaataacaataatataatgttactataaaataactatatacaatcttaacttacgtcaagttcaacttaatatccgtaaggttttgatatataactaaaaaagataactttatatattatatcaaaaccctattaacacatatttacatctatataaagaacaaatatgcaaataataccaaaaccatcataaaattttataagttttcttacttaccatcatttgatttttccatatagacaatgtttctccacattacactttttaagttgattgtttccttcttttaatccattttttcatggttgtaaatgatatgaaaaaaattataacaatttcaaacttatttaaatatttactacatctcattaaatgtttgaaaatattcaataaataaaacatgaaagaaaaaaatatggaaaaataaaaataaacgtacactgtttatccaaccacaacttaaaacgctttaagttgaagaaatttgaagagaaactgtgtgagacttgaagaaatgcactgaaaagagagaaacagaataacaggagaaaatgaaaaaaaggagaaagtggaagaaataataaaaaagaagtgaatggagggaaataaaattagaatgagaggaaaaaaggagttgatgtagctgaggagtatttttgtccagatcgggtcattttggaggctattaaaagtggggggttagttttacaatactgagggatttttgtccctttttgatcagttttcccaacaaagaatttgtaaatcaaacaaaatatttttgggataactgattaaaagggacaaaaattcctcaatattgcaaaactaaccctttacttatttaagtctcaaaaatgacctaattcggacaaaaataccctttcagttatcttttcagtcctttttccctccaactccaattttctcttgtgttgtgtctcttccttaccctgcaaacccatttgttccatctgttaacctgcgagaaagaaatcacgaaggatttttccgtttattgcaagagaacaaaaagacaacacaatacaaagaaaaaacagaaagtaagtttcactatttcattctttgattttagtttttcgaactgtatatttgaatcttcatccatgaaatgagaagaaaccctaagtgccttattttggttctttttttttatttttaatcaaaccctatttttcatctttctaatattgtgtgttgattcagttcacgaaaatggaggaagaaaaaaatttggtgatgaaaaatacgaaacagaagaggtataaaattttgggaaaaaagagaagtgaaagaaagccaggttttgaaaccttgtcatcgtcatcagaaaatgagaagaaatcaactgattcagtaagcattaattttctacttgaaattttgatttttaattttttttttaattttatcatttttaatagattttttttttatgaatttatttttcatgaattgataatctaattgttggaaatttcctcagtgaggttgtagtccaaggtttaaagcaatatttgaatgattagaaaaaactaaacttaactactatcaagtttaccatcaaaaggttttgaaattttgtgtaatgaagttatttgttatgaatttataacatatttgaatataatttttatgaaattattttatccaaatatttagaattttcatttaaatatatatgttaagaaaaaactgaacttaactgctatcaagttcattgtcaacaggttgcaatttcaaaatggttttgttttgtttcaaatttcaataaacactagaataatgtctccaattttttgtagctgcaacttagtaaaatataatagcttcaattgcattagtaaaataatatctttagaatattagcatttgacatgacatccttaaataataggaaaataaagtctatgttaagaagtaatacaaaatgatggatttaacatagttggataagtttggtaatataattttgctcaatttatattgatatttttacaatttgttattatcttgcagattgacattcatcttcctctcctatcttttatatctaaaatatctaaagatgagtactttcctggaaaaattgcatgtttgtctcacttggtagccattgaaaatattaagaagaaattgactgaaccacaattggagatgtttagaaaatcatgttttggtcattttttactccttcccgaacttagattttcagtccaaattgttcatcaattgttgttacgtcaatgtgaaaccaaaaaaggcaatgaaatatggattttattaaagtcaaagggcttaagatttagtaaagaagagtttacattgactacgggcttgagttttggtcctattacaaaatgtgataaaaaatcattacgaataagggacacatactttaaaggagaaaacaaggtgcgtaatgatgagttggagaaagtttttctttctttaggagaggaaaagaaaaagaaaaagaataagaaaaaaaaaaaaaagaatttgaagatgaagaggtgataaagttggcacttttgtattttttagagcatgttttatttgggaaagaaggaaaaaatttaatagatatggaatgggttgctttggttgataatttggaggcttttaacaagtatccatgggggggatttgttatgagaggacactatttggtttgcaaagagctttggagaaccgggtatccaaataccaagataaaaagaaagcaaagggagaagctgcagttgaagcatatagtcttgttggatttccatatgcattcgaagtttgggcatacgaggctattccacttattggattgaaatatgtcactcgtgtatctgagagctatcctcgaatattaaattggagtgcaacaagtgctccaaggtctaccgaggttgaaaatgtatttctagagcctcatgtaagtaattctttacctttaaattttaagaatgcagttataaatattattgtattgttgtttattaataattatatttgatttggactttgtagttaacttttcattcgcttctaacacccactttagaggagcaacaacaatactattacaagcatgtagataaacaaggagcttcagcaaaaatgttacaccaatcaaatgcctcacaagatgccaagaaggatgacttaaggcatgaaaaaagttcatctaacactactgcatatgttgctgctgctactgctgcaatggcagaagaaacaacaaatgatgcagtcgccctatcaatagaggtaacttaacctaaacttagccatcataaataatgcatgcatgtttttttttttggtactttatttaatataagatgttcattccataattaacatgtggaacctgaccttaactataaataaacttataggaagttaagtttgtagggatcatgaaaaaacctaaatttaacaagtgtgttatttcaaagtgaacaaacttgtcatagtatatatataaatattgtaagtgttaaatttttatttcatttatgtgcaatatgtgcagaaattatggatggagtttgtgaaattcagacaaagctcaaagttaaatttcaatcatctaaagaaagaaattgaaggactcaacttgaagatggatgaattgaaacaacttttattagaagttagtgacacgtttacttgtttaaattttctaatacttaaacgttttgacatttgtgttttttcatatttattattattgggtggtgtatgcaattttaggttaagagttcgaatgaggaacatggtatgcatgacactagatttagaaaatctagtacaaaagaaaatgataacaatatgggctttgatttccagactggaatttttgaggatgttacagatgatgaagtggagaggaatgacattcccatggatgtgaacattgatatggaagcttctagaaaccttcagcttgcagaaaaacacatgactaaagagttgaaagatgactactctattgatgatccagttattgatattgccaagttatttggtactccaactatgtcgggcgagttttcagtatatgtcatacctcaccatctatcttttgccatttttaagcgaagacgtgagattaaaaagtctcgtatcttgcagcacccttttacagatcccaccaagagaaagaaactaagaaaagagattgagaaaccattaacttcacttgatcaagggtaagttgtatacatctatacttgtaaatttgtgttcttcacaagttataaaattactaatgttttttttttttttttatgtcaaaggtccacaattgacattgactacatgcatatagataaaaaatggtttcaatcactgtctaatcatggttcatggcttgctgacacgatttgtaaatgatgcattttttttttgtttttatttattattatgttcagcttacaaccaaataatataactaatttactttattgtaattgttagcacattgatgttgccttcttctttttctgaaagtggcgaatagaaaatcctcatcttttttcccaaaagtttaccacagtggatactatgttttgggtatgtgtagtttgaattttagttatcatttttaatttttttgtaataatgaatcttatgatcttggttatttatttatctatgttaactttattctatgtagcaaaatgctcaagcaagatggattaagcatggcaaaaagtggaaccaattcaaattaccagagaatgacatccttattgattatgccaatggtttgcagcctttttattctgtcaaatggcctgatgttgacattgtgtatgtccctatcaatgttcaggctagtcaccgggtattaggagttgtccaccttcatcgaaggattatatacgtatatgactcattgatgggcatcaataataatgcaagattgcaagttgccattaaaccattagccaaattgttgccgcatatattgaatgcaatagcatattatggttttcatggtgacacaaaagttaactactaggaatgggaaattgaacggctgcaagatattcctcaacaggaaaatgagtaagtgatcttaaatttactttcataacttatacacttaatctttaataatagccctaacattgattatctatgtaccatgcagtggtgattgtggcatgtttgttatcaaatatgttgaatacttaatgcacaaccatccattgaagtcattaacaagtgcacgaatggactggtttcgggaaaagatggcagcagagttattttatatgaaatacttgcctatgtaatgaattcatgttgatatttcacattttgataatgtagttagatggtttgttatatgtaattggatagcttcatatatgtagttagacattttgataaatgtagttggacaggttgatatatctacttggatattttgatgaatgttgttcgatagttatgtatacaattgaccttttaaactaaacttgaatgttgtcaagttgttatgtgtacaaacttgaaggtagttaagtccacagtcttaatagaacacatgaacttaactactatcaagttagccgcctcagccttcgagttcctccacatctcaaggtatttctctcactgacattgagtatgatgactatctccgcaatcaggccaccaagtcagcttctgttgcccagactagtaatgtttctgcttgtcttacccacacatcttctcttggaccttagattctagattccggtgcttctgatcacatatctggtaataaggatcttttcttttctattactactacctctgtcttacctactgttaccttagctaatggttctcaaactgtggctaaagacattggtttgacacatcctctcccttctctacctctcacttctgtcctttatactcctgagtgttcctttaatcttatctttatcaacaaaatcactcgttctcttaactgctctattactttttttaataaatttgtgaccttgcaagaccggagtacggggaagacgattggcataggacgtgagtctcaaggcctctatcaccttacctcacctcaccttcaactcctgcagtttgcatttccactgatgctcccctcctcatctacagtcgcctgggccaccctagtctatccaagttccagaaaatggtccctcatttttcatctttgtcgtcgcttgcgtgtgagtcttgtcagcttgggaaacatacttgtgtctcgttcccaaagtgtttgaataatcgggcaaagtctcattttgaacttgtccacattgatgtttgcggtccttgtcggaccgcatctactttatgatttcagtattttgtcactttcattaatgactattctcgatgtacttggttatttttaatgaaaaatcgagctgagttattccctattttccagaaattttatgctgaaatctaaacccagttcaatatttctattcgtgtgttacgcagtgacaataccaaggaatatttttctgcaccatttactttatttatgccccaacatgggatccttcatcagtcttcttgtgctcatactcctcaataaaatgaggtagttgaacgtaaaaatcgacatcttgttgagacaactcatactctccttctccatagtaatgtcccttttcgtttttggggggacgttgttcttataacatgttatttgattaatcgtatgccctcatttgtattacacgatcagattcctcattcccttctttttcctgatcaactactttatttccttcctcctcgtgtttttggttgtacttgttttgttcatattctcactcctggacaggacaaactttctgccaaagctacaaaatgcattttcttaggatactctagacttcaaaaggattatcgttgttattcctctaagactcatcgctactttctctctgctgatgtcaccttctttaagaactcaccattcttttccatttctgagtctcttcttgtttctaaagtcttaccccttcccattatcttcccagctgatgcagtgccttttcgcccacttcaggtttatcatcgccgccatcgtgtccctgttcctccttccttggccgaggtccctgctaactcacttcctatcccttcgacttctcctgccctggctctacctcattctgctgacttatccattgctcttcggaaaagtaatcgatctactcgtaatcctcatcccatttacaattttttgagttaccatcgattatcttcaccctattctgcatttgtttctgttatatcttctgtttctcttcccaagagcacccttgaggctctttcccatccaggttggcgacaggcaatggtagatgaaatgactgttttacactccaatggcacttgtgatcttgttgttttaccctctggtaaatctatagttggttgtcgttgggtctacatagttaaggttggccctgatggttaagttgatcgccttaaggctcgcttagttgctaaaggctatactcaggtttatggttctgattatggtgacactttctctcttattgccaagatagcttatgttcgattgctctccatggttgctatgcgttcttggcctctttatcagttagatattaaaaatgttttccttcatggggatcttgctgaggaagtttatatggagtaaccacctggttttgttactcagggggagtctggtttagtgtgcaggttacgttgttctctatatggcttgaaacaatctcctcgagcatggtttagtcgttttagttctgttgttcaggagtttggcatgttccgcagtatagcagaccattccgttttctatcatcataactcttcggggcagtgtatttatctggtagtttatgtggacgacatcgtcattacaggcagtgatcagaatggtatttagaaactaaagcaacaccttttcacccactttcagactaaagacttgggaaaactcaagtatttcttagggattgagatagctcaatccagttccggtgtggttctttcccaaaggaagtatgctttagacatcttgaaagaaagcggtatgttaaactgtaaactggtagacactcgtatggatccaaatgtcaaacttataccaagacagggggagcctttaggagatcctgggagatatcggcgacttgtaggtaaattgaactacctcgctattacttgtccagacatttcttttcctgtaagtgttgttagtcaattcctacagtcaccatgtgatagccattgggatgttgtaatccacattcttcgatatatcaaaaacacaccaggccaaggtgtgttgtacgagaacagagttcatacccaggttgttggttacacagatgtagattgggctggctcacccacagatagacattccacttccgagtattgtgtttttattggaggtaaactaatatcctggaagagtaagaaacaagatatgccagatctagtgttgaagccgagtatcgagctatggctctggccacatgtgaactcatatggctgaaacatcttcttcgggagatgagatttggaaaggatgaacagatgaagctcatctgtgacaaccaagtagctttgcatattgcatccaatccagtcttccatgaaatgaccaaacacattgaagttgactgtcatttcattagagagaaaattgcatcaggatgtgtggcgactagttttgtcaattcaaatgatcaactagcagatatttttactaaatctcttagaggtcctagaattaaatatatttgtaacaagcttggtgcatataacatatatgcttcaacttgagggggagtgttagatagtgtacagttatttcagttatttacttttcattttctttccttattgtattgtgggtcccactaacatgtatatatatacccaaatccaatgtgtattattaacagttttttaataacaaaaattaaggattctcccttttctctcttttcacaatgtgtttcatttcaaatgcaaaatgtggtataaaaatctgtcttgtcagcttttgctgcatgatttccacagataatgccttaagaagatcttaatgattttcttttggttaggtaaaaagcttcctagaaaaatccattcctttattttatagtttggggattaattattattgttaacttgcaaactaagcttgaagttggtgtttttttcctttcctttttatccatacaacaatctgaggaaaattggttaattttgcgcatgcaaggcctggctgagtaatttatgctggtcttgtaaatttctattataaatatttttcttttggataccttttttgtttcaaaaatctgtacgtcaccccttgtattaatttttgtacactagagcagcagagcccatgacccatgcagtgcatgtgtgcaatttcaagaataagttggaaatggtggagattaagaagttgaaaatagtttaaaaaatgaaaatggtgggtgggaggttttacaattgtggtgatttgatatagtcatgctgcccttagattttgagagttaaaagtaaccatctggcaagagtggtctctcaccccattcaccctataaagcatgtagttcaagtcaggttgtatcaaatctgaacatgttccttttgtttagaatatcattttaaaaatatctaaaaataataaaaatgcatatgtatatgtatatgaatgtatgtatgcaaaactcacaaaattttagtcaggttataggcttttgattagacttttgtggatggacttttcagaatttggcacatatagctgtatggatccatttatctatttaaattaacatgaaatatctttgatgaatttaaaagtacttagaataagtgggtatttgcagtggtttggaataaaatcaatacctatttaagctaagcaagttcagctattcaggtgggttgcaccaagttcttttggacttcgtcaatgctaaccataataatcacagttggctgtcattaaggccaaatttaagctaatgggtgggttcaagctatcctaaaattgattatcctttctaaaacatacattttaaatgcattttttccttctaaatccaaaagggtttaggggtatgtctgcatgggtacttttggaccggtttgaactttgatgtttcctgcacccatccaaaaattatgtgtcttgaaatattcttgaatgacttctcaattcctgtaaatgttattaaatcaaagacagatggttgatgatcatggcctagtgtaactgcgaatcatttggaatcctaatttagcctactagaaacccatcaagtgccagttctattagtggttttgcatggaatagagcaattgggataacatgcacaatgttgtggcatttttgaaagtgctacctgaaactactgatccttcagcaaagatatcttagaataatgaaccaaacaccccttaggagttcatttctcttccatgtgtccaaaaaaaggaagaagaaaaaaaaatctgcgttcttttaaccctgaagattcatgttgcaggtc
